United States Patent Application Publication US 2007/0214517 A1 - sequence listing, part 58

SEQ ID NO: 77079 - protein, 534 aa, Arabidopsis thaliana
  peptide (1)..(534): Ceres Seq. ID no. 12560894
  misc_feature (1)..(59): Pfam Name: XPG N-terminal domain Pfam Description: XPG N-terminal domain
  misc_feature (1)..(534): Homolog of NCBI NO: 18394573 NR Description: expressed protein; protein id: At1g18090.1, by cDNA: gi_15215781 [Arabidopsis thaliana] At1g18090/T10F20_6 [Arabidopsis thaliana]
  misc_feature (1)..(534): Homolog of NCBI NO: 30685678 NR Description: expressed protein [Arabidopsis thaliana]
  misc_feature (1)..(534): Homolog of NCBI NO: 9719724 NR Description: Contains similarity to exonuclease ExoI from
  misc_feature (176)..(534): Homolog of NCBI NO: 25402838 NR Description: protein T10O22.7 [imported] - Arabidopsis >gi|8671764|gb|AAF78370.1|AC069551_3 T10O22.7 [Arabidopsis
  misc_feature (44)..(145): Homolog of NCBI NO: 25402838 NR Description: protein T10O22.7 [imported] - Arabidopsis >gi|8671764|gb|AAF78370.1|AC069551_3 T10O22.7 [Arabidopsis
  misc_feature (1)..(14): Homolog of NCBI NO: 25402838 NR Description: protein T10O22.7 [imported] - Arabidopsis >gi|8671764|gb|AAF78370.1|AC069551_3 T10O22.7 [Arabidopsis
  misc_feature (1)..(281): Homolog of NCBI NO: 15220506 NR Description: exonuclease, putative; protein id: At1g29630.1
  misc_feature (1)..(289): Homolog of NCBI NO: 34910036 NR Description: putative exonuclease [Oryza sativa (japonica group)] >gi|22202704|dbj|BAC07362.1| putative exonuclease [Oryza
  misc_feature (1)..(308): Homolog of NCBI NO: 4884906 NR Description: exonuclease ExoI [Xenopus laevis]
  misc_feature (1)..(302): Homolog of NCBI NO: 40744430 NR Description: hypothetical protein AN3035.2 [Aspergillus
MELCLDTDGKKKLRYIDYFMHRVNLLQHYEIIPVVVLDGGNMPCKAATGDERHRKRKANFDAAMVKLKEGNVAAATELFQRAVSVTSSMAHQLIQVLKSENVEFIVAPYEADAQLAYLSSLELEQGGIAAVITEDSDLLAYGCKAVIFKMDRYGKGEELVLDNVFQAVDQKPSFQNFDQELFTAMCVLAGCDFLPSVPGVGISRAHAFISKYQSVELVLSFLKTKKGKLVPDDYSSSFTEAVSVFQHARVYDFDAKKLKHLKPLSHNLLNLPVEQLEFLGPDLSPSVAVAIAEGNVDPITMKAFNHFSVSRKPLKTPVRSFKEQEKGSSFLVCSLSKSEEIIELKRTADEAMIDPEAIVKKKMYSKQDSDLYKLLAQPNRDQVVTRPSNPSLIPDNNPFKIRKTDEINLEIAEYGVQELADSFVTKSKAVDVASSSPNSHEHEDQKECVTIDLSKLDAAGIKQDSEKNRVKETFETTEVDLAEVQDHVNMTTKRVRGTKPRTENFKVKTSCKSSENNKTIIKKKHSILDFFQRL

SEQ ID NO: 77080 - DNA, 2501 bp, Arabidopsis thaliana
  misc_feature (1)..(2501): Ceres Seq. ID no. 12561051
  misc_feature: MA Experiment ID: 20000173 Result: Up-regulated in Transcription
  misc_feature: MA Experiment 20000173 PARAMETER Experiment Name: At_42deg_Heat_P Parameter: Age (day) Value: 14
  misc_feature: MA Experiment 20000173 PARAMETER Experiment Name: At_42deg_Heat_P Parameter: Organism Value: A. thaliana
  misc_feature: MA Experiment 20000173 PARAMETER Experiment Name: At_42deg_Heat_P Parameter: Plant Line Value: WS
  misc_feature: MA Experiment 20000173 PARAMETER Experiment Name: At_42deg_Heat_P Parameter: Temperature (deg C) Value: 42 vs. 22
  misc_feature: MA Experiment 20000173 PARAMETER Experiment Name: At_42deg_Heat_P Parameter: Timepoint (hr) Value: 6
  misc_feature: MA Experiment 20000173 PARAMETER Experiment Name: At_42deg_Heat_P Parameter: Tissue Value: Aerial
  misc_feature: MA Experiment ID: 20000179 Result: Down-regulated in Transcription
  misc_feature: MA Experiment 20000179 PARAMETER Experiment Name: At_Germinating_Seeds_P Parameter: Age (hr) Value: 6 vs. 0
  misc_feature: MA Experiment 20000179 PARAMETER Experiment Name: At_Germinating_Seeds_P Parameter: Tissue Value: Germinating Seeds
  misc_feature: MA Experiment ID: 20000180 Result: Down-regulated in Transcription
  misc_feature: MA Experiment 20000180 PARAMETER Experiment Name: At_Germinating_Seeds_P Parameter: Age (hr) Value: 24 vs. 0
  misc_feature: MA Experiment 20000180 PARAMETER Experiment Name: At_Germinating_Seeds_P Parameter: Tissue Value: Germinating Seeds
  misc_feature: MA Experiment ID: 20000495 Result: Up-regulated in Transcription
  misc_feature: MA Experiment 20000495 PARAMETER Experiment Name: At_Guard_Cells_P Parameter: Harvest Date Value: 8/2/2002
  misc_feature: MA Experiment 20000495 PARAMETER Experiment Name: At_Guard_Cells_P Parameter: Organism Value: A. thaliana
  misc_feature: MA Experiment 20000495 PARAMETER Experiment Name: At_Guard_Cells_P Parameter: Tissue Value: Guard Cells vs. Leaves
  misc_feature: MA Experiment ID: 20001555 Result: Down-regulated in Transcription
  misc_feature: MA Experiment 20001555 PARAMETER Experiment Name: At_Drought_Soil_Dry_P Parameter: Age (day) Value: 24
  misc_feature: MA Experiment 20001555 PARAMETER Experiment Name: At_Drought_Soil_Dry_P Parameter: Organism Value: A. thaliana
  misc_feature: MA Experiment 20001555 PARAMETER Experiment Name: At_Drought_Soil_Dry_P Parameter: Plant Line Value: WS
  misc_feature: MA Experiment 20001555 PARAMETER Experiment Name: At_Drought_Soil_Dry_P Parameter: Post Timepoint (hr) Value: None
  misc_feature: MA Experiment 20001555 PARAMETER Experiment Name: At_Drought_Soil_Dry_P Parameter: Post-Treatment Value: None
  misc_feature: MA Experiment 20001555 PARAMETER Experiment Name: At_Drought_Soil_Dry_P Parameter: Timepoint (day) Value: 10
  misc_feature: MA Experiment 20001555 PARAMETER Experiment Name: At_Drought_Soil_Dry_P Parameter: Treatment Value: Drought vs. No Drought
  misc_feature: MA Experiment ID: 20001556 Result: Down-regulated in Transcription
  misc_feature: MA Experiment 20001556 PARAMETER Experiment Name: At_Drought_Soil_Dry_P Parameter: Age (day) Value: 26
  misc_feature: MA Experiment 20001556 PARAMETER Experiment Name: At_Drought_Soil_Dry_P Parameter: Organism Value: A. thaliana
  misc_feature: MA Experiment 20001556 PARAMETER Experiment Name: At_Drought_Soil_Dry_P Parameter: Plant Line Value: WS
  misc_feature: MA Experiment 20001556 PARAMETER Experiment Name: At_Drought_Soil_Dry_P Parameter: Post Timepoint (hr) Value: None
  misc_feature: MA Experiment 20001556 PARAMETER Experiment Name: At_Drought_Soil_Dry_P Parameter: Post-Treatment Value: None
  misc_feature: MA Experiment 20001556 PARAMETER Experiment Name: At_Drought_Soil_Dry_P Parameter: Timepoint (day) Value: 12
  misc_feature: MA Experiment 20001556 PARAMETER Experiment Name: At_Drought_Soil_Dry_P Parameter: Treatment Value: Drought vs. No Drought
  misc_feature: MA Experiment ID: 20001911 Result: Up-regulated in Transcription
  misc_feature: MA Experiment 20001911 PARAMETER Experiment Name: At_Drought_Reproduction_P Parameter: Age (day) Value: 40
  misc_feature: MA Experiment 20001911 PARAMETER Experiment Name: At_Drought_Reproduction_P Parameter: Organism Value: A. thaliana
  misc_feature: MA Experiment 20001911 PARAMETER Experiment Name: At_Drought_Reproduction_P Parameter: Plant Line Value: WS
  misc_feature: MA Experiment 20001911 PARAMETER Experiment Name: At_Drought_Reproduction_P Parameter: Timepoint (day) Value: 10
  misc_feature: MA Experiment 20001911 PARAMETER Experiment Name: At_Drought_Reproduction_P Parameter: Tissue Value: Flowers
  misc_feature: MA Experiment 20001911 PARAMETER Experiment Name: At_Drought_Reproduction_P Parameter: Treatment Value: Drought vs. No Drought
cccccatcagaagcggtcaagtcaagcttttagtcaataccccccaaaaccctaaaatcctccaaaacttttgagagggaaaatctctccgccaaaattactctctccttaaacctcttcaccttctctctctcccctcctctgtatctatctcaaatctctctctctgtatctttaactcttattctagttttaatttaagtgtcggaaaaaacccttgttacacagtcatggcggtgatgaacggtggtcgtgcgacgaagcgagcgaggcgtagcaacagaatctcagctgatctttacgatttctctactttcccgacggcggagatcaacggcgagtcgacgactttgccgccgttccgagacggtgtgagaaccttcctcgcgacccacgcgcgtgtcactttccctccttcgacgctcttctcgagtttgatgacgtggcagatcatgcttagacctggagattcgacggacggttcagatctctcttctaaactcgtctctctcgacgttgtggaggaggatgtgacgagatcctctagatctgtttactgtgaacactgctgtgtcgttggttggagtagtcatccagtgtgtagaaagaggtaccgcttcatcataaggtcaggaggagacactaaggcttgcacgaggtgtggtaatactcagaatttgtctgaaggtagcaattgcaaatggtgcagcatggctttagacattgaaaactgggtttactctcagctagaggataacactcacctccttcacggcgttatccactctaatggctacgctcatctactgtgtcttaatggaagagaaggtggctctggttttttgactggtcgtgccattatggacttctgggataggctttgttcctcccttgctgttcgaaaagctagtgtgatggatgtgtcaaggaagtatgggatggactaccggttgcttcatgggattactagagggtgttcgtggtacagtgagtggggttatgaattcaaatcggggagctatgcactcaccaaagaagcttaccagagtgcagtggatactttatctgcgattcctctctctgagtttttgttccaggggaggaaaccaagaactcagctccactccattattagcttctaccaatcactctcgtgttcagagcttgtgactgtcaaagacctcttctcctttctcctacagatgattcgtgagaacagttccaaacctgcatctaagtcgtctgtactgtgtgcttggtctaaaagtgatgtggaacgtgtacagcaaaccatggttaagatactgaaagcttcaggacgcccacaagccaactgggttacaaggtgggctctcaagaggtctatttgcaaatcagcctctccacaactgattgattactgtctcaagcattttggaggggttttggtggatgatggatctcgagtagtcagctcacgttgcaatcctggttcaaacgactttgagtacaggcttgaatctgtcaacaatgtgcaccgcttatctaatcaagatgtaaataatgcatcagtggagcatgtcaaacaggatttaagatatttgtatgaaactttattgcacccacaaaccatggccgagtttaggtctcgagctacaagagaaaaaatgattgacgcagccacaaaaatactggactgtaagcatttcataaaagattacctgtctagcacagtgaaccccgttgcaatcaacctctggtgctgtgttgagctttcggatgaactcaaagaatccccagcccctccacctgaacggttggttttgccattgaacgctactgtttccgaccttaaaatcgaagctgctaaggcttttcaggaagtgtatgcaatgttcaagaggtttgaagttgaggagctcctaggttacggttctatagatgactctattaccctgaaatttctagttggcacaaacggggtcatacggattaaagggagatgctcaaaacacgggctccttagataccgcatggagagaggggtggataattggaaagttgattgcaagtgtggcacaaaggatgatgatggcgagaggatgttggcctgtgatggatgtggtgtgtggcaccacactagatgtattgggatcaataacgctgatgccctaccttccaagttcctttgtttcagatgcattgagttgtacagcaagaaaccaaagcaatctaaaaaagagcgtggatctagtcaagtgcccaaagctggctttgtttgtagaggtgagtcagctgctatgggcagtggatctaatttatccgtaacacttagagtaggctgactgtatttatgatctttctgtatataggttcttatctaggcacaaaactgcaaatggcttaaggtttctacccgtgattgtaactaacacatgaccacttcaagatttcaatcctaagcttaaaagtgttatgtaaacatgggattaagacatttatgaaagtcgaatgttttgttt

SEQ ID NO: 77081 - protein, 697 aa, Arabidopsis thaliana; identical to SEQ ID NO: 45869
  peptide (1)..(697): Ceres Seq. ID no. 12561052
  misc_feature (605)..(653): Pfam Name: PHD-finger Pfam Description: PHD-finger
  misc_feature (3)..(687): Homolog of NCBI NO: 34907348 NR Description: putative male sterility 1 protein [Oryza sativa
  misc_feature (92)..(436): Homolog of NCBI NO: 15242181 NR Description: putative protein; protein id: At5g22260.1 thaliana] >gi|9757806|dbj|BAB08324.1| contains similarity to
  misc_feature (413)..(650): Homolog of NCBI NO: 15242181 NR Description: putative protein; protein id: At5g22260.1 thaliana] >gi|9757806|dbj|BAB08324.1| contains similarity to
  misc_feature (92)..(436): Homolog of NCBI NO: 15554513 NR Description: male sterility 1 protein [Arabidopsis thaliana]
  misc_feature (413)..(650): Homolog of NCBI NO: 15554513 NR Description: male sterility 1 protein [Arabidopsis thaliana]
  misc_feature (343)..(657): Homolog of NCBI NO: 15226359 NR Description: hypothetical protein; protein id: At2g01810.1
  misc_feature (176)..(340): Homolog of NCBI NO: 15226359 NR Description: hypothetical protein; protein id: At2g01810.1
  misc_feature (44)..(132): Homolog of NCBI NO: 15226359 NR Description: hypothetical protein; protein id: At2g01810.1
  misc_feature (341)..(650): Homolog of NCBI NO: 18071367 NR Description: putative collagen [Oryza sativa (japonica >gi|28301925|gb|AAO38818.1| hypothetical protein [Oryza sativa
  misc_feature (178)..(323): Homolog of NCBI NO: 18071367 NR Description: putative collagen [Oryza sativa (japonica >gi|28301925|gb|AAO38818.1| hypothetical protein [Oryza sativa

SEQ ID NO: 77082 - protein, 694 aa, Arabidopsis thaliana; identical to SEQ ID NO: 45870
  peptide (1)..(694): Ceres Seq. ID no. 12561053
  misc_feature (602)..(650): Pfam Name: PHD-finger Pfam Description: PHD-finger
  misc_feature (1)..(684): Homolog of NCBI NO: 34907348 NR Description: putative male sterility 1 protein [Oryza sativa
  misc_feature (89)..(433): Homolog of NCBI NO: 15242181 NR Description: putative protein; protein id: At5g22260.1 thaliana] >gi|9757806|dbj|BAB08324.1| contains similarity to
  misc_feature (410)..(647): Homolog of NCBI NO: 15242181 NR Description: putative protein; protein id: At5g22260.1 thaliana] >gi|9757806|dbj|BAB08324.1| contains similarity to
  misc_feature (89)..(433): Homolog of NCBI NO: 15554513 NR Description: male sterility 1 protein [Arabidopsis thaliana]
  misc_feature (410)..(647): Homolog of NCBI NO: 15554513 NR Description: male sterility 1 protein [Arabidopsis thaliana]
  misc_feature (340)..(654): Homolog of NCBI NO: 15226359 NR Description: hypothetical protein; protein id: At2g01810.1
  misc_feature (173)..(337): Homolog of NCBI NO: 15226359 NR Description: hypothetical protein; protein id: At2g01810.1
  misc_feature (41)..(129): Homolog of NCBI NO: 15226359 NR Description: hypothetical protein; protein id: At2g01810.1
  misc_feature (338)..(647): Homolog of NCBI NO: 18071367 NR Description: putative collagen [Oryza sativa (japonica >gi|28301925|gb|AAO38818.1| hypothetical protein [Oryza sativa
  misc_feature (175)..(320): Homolog of NCBI NO: 18071367 NR Description: putative collagen [Oryza sativa (japonica >gi|28301925|gb|AAO38818.1| hypothetical protein [Oryza sativa

SEQ ID NO: 77083 - protein, 628 aa, Arabidopsis thaliana
  peptide (1)..(628): Ceres Seq. ID no. 12561054
  misc_feature (536)..(584): Pfam Name: PHD-finger Pfam Description: PHD-finger
  misc_feature (1)..(618): Homolog of NCBI NO: 34907348 NR Description: putative male sterility 1 protein [Oryza sativa
  misc_feature (23)..(367): Homolog of NCBI NO: 15242181 NR Description: putative protein; protein id: At5g22260.1 thaliana] >gi|9757806|dbj|BAB08324.1| contains similarity to
  misc_feature (344)..(581): Homolog of NCBI NO: 15242181 NR Description: putative protein; protein id: At5g22260.1 thaliana] >gi|9757806|dbj|BAB08324.1| contains similarity to
  misc_feature (23)..(367): Homolog of NCBI NO: 15554513 NR Description: male sterility 1 protein [Arabidopsis thaliana]
  misc_feature (344)..(581): Homolog of NCBI NO: 15554513 NR Description: male sterility 1 protein [Arabidopsis thaliana]
  misc_feature (274)..(588): Homolog of NCBI NO: 15226359 NR Description: hypothetical protein; protein id: At2g01810.1
  misc_feature (107)..(271): Homolog of NCBI NO: 15226359 NR Description: hypothetical protein; protein id: At2g01810.1
  misc_feature (1)..(63): Homolog of NCBI NO: 15226359 NR Description: hypothetical protein; protein id: At2g01810.1
  misc_feature (272)..(581): Homolog of NCBI NO: 18071367 NR Description: putative collagen [Oryza sativa (japonica >gi|28301925|gb|AAO38818.1| hypothetical protein [Oryza sativa
  misc_feature (109)..(254): Homolog of NCBI NO: 18071367 NR Description: putative collagen [Oryza sativa (japonica >gi|28301925|gb|AAO38818.1| hypothetical protein [Oryza sativa
MTWQIMLRPGDSTDGSDLSSKLVSLDVVEEDVTRSSRSVYCEHCCVVGWSSHPVCRKRYRFIIRSGGDTKACTRCGNTQNLSEGSNCKWCSMALDIENWVYSQLEDNTHLLHGVIHSNGYAHLLCLNGREGGSGFLTGRAIMDFWDRLCSSLAVRKASVMDVSRKYGMDYRLLHGITRGCSWYSEWGYEFKSGSYALTKEAYQSAVDTLSAIPLSEFLFQGRKPRTQLHSIISFYQSLSCSELVTVKDLFSFLLQMIRENSSKPASKSSVLCAWSKSDVERVQQTMVKILKASGRPQANWVTRWALKRSICKSASPQLIDYCLKHFGGVLVDDGSRVVSSRCNPGSNDFEYRLESVNNVHRLSNQDVNNASVEHVKQDLRYLYETLLHPQTMAEFRSRATREKMIDAATKILDCKHFIKDYLSSTVNPVAINLWCCVELSDELKESPAPPPERLVLPLNATVSDLKIEAAKAFQEVYAMFKRFEVEELLGYGSIDDSITLKFLVGTNGVIRIKGRCSKHGLLRYRMERGVDNWKVDCKCGTKDDDGERMLACDGCGVWHHTRCIGINNADALPSKFLCFRCIELYSKKPKQSKKERGSSQVPKAGFVCRGESAAMGSGSNLSVTLRVG

SEQ ID NO: 77084 - DNA, 1531 bp, Arabidopsis thaliana
  misc_feature (1)..(1531): Ceres Seq. ID no. 12561408
  misc_feature: MA Experiment ID: 20000171 Result: Down-regulated in Transcription
  misc_feature: MA Experiment 20000171 PARAMETER Experiment Name: At_42deg_Heat_P Parameter: Age (day) Value: 14
  misc_feature: MA Experiment 20000171 PARAMETER Experiment Name: At_42deg_Heat_P Parameter: Organism Value: A. thaliana
  misc_feature: MA Experiment 20000171 PARAMETER Experiment Name: At_42deg_Heat_P Parameter: Plant Line Value: WS
  misc_feature: MA Experiment 20000171 PARAMETER Experiment Name: At_42deg_Heat_P Parameter: Temperature (deg C) Value: 42 vs. 22
  misc_feature: MA Experiment 20000171 PARAMETER Experiment Name: At_42deg_Heat_P Parameter: Timepoint (hr) Value: 1
  misc_feature: MA Experiment 20000171 PARAMETER Experiment Name: At_42deg_Heat_P Parameter: Tissue Value: Aerial
  misc_feature: MA Experiment ID: 20000173 Result: Down-regulated in Transcription
  misc_feature: MA Experiment 20000173 PARAMETER Experiment Name: At_42deg_Heat_P Parameter: Age (day) Value: 14
  misc_feature: MA Experiment 20000173 PARAMETER Experiment Name: At_42deg_Heat_P Parameter: Organism Value: A. thaliana
  misc_feature: MA Experiment 20000173 PARAMETER Experiment Name: At_42deg_Heat_P Parameter: Plant Line Value: WS
  misc_feature: MA Experiment 20000173 PARAMETER Experiment Name: At_42deg_Heat_P Parameter: Temperature (deg C) Value: 42 vs. 22
  misc_feature: MA Experiment 20000173 PARAMETER Experiment Name: At_42deg_Heat_P Parameter: Timepoint (hr) Value: 6
  misc_feature: MA Experiment 20000173 PARAMETER Experiment Name: At_42deg_Heat_P Parameter: Tissue Value: Aerial
  misc_feature: MA Experiment ID: 20000180 Result: Up-regulated in Transcription
  misc_feature: MA Experiment 20000180 PARAMETER Experiment Name: At_Germinating_Seeds_P Parameter: Age (hr) Value: 24 vs. 0
  misc_feature: MA Experiment 20000180 PARAMETER Experiment Name: At_Germinating_Seeds_P Parameter: Tissue Value: Germinating Seeds
  misc_feature: MA Experiment ID: 20000184 Result: Down-regulated in Transcription
  misc_feature: MA Experiment 20000184 PARAMETER Experiment Name: At_Shoots__P Parameter: Age (day) Value: 7
  misc_feature: MA Experiment 20000184 PARAMETER Experiment Name: At_Shoots__P Parameter: Tissue Value: Shoots vs. Whole Plant
  misc_feature: MA Experiment ID: 20000185 Result: Up-regulated in Transcription
  misc_feature: MA Experiment 20000185 PARAMETER Experiment Name: At_Roots__P Parameter: Age (day) Value: 7 vs. 21
  misc_feature: MA Experiment 20000185 PARAMETER Experiment Name: At_Roots__P Parameter: Organism Value: A. thaliana
  misc_feature: MA Experiment 20000185 PARAMETER Experiment Name: At_Roots__P Parameter: Tissue Value: Roots vs. Whole Plant
  misc_feature: MA Experiment ID: 20000234 Result: Up-regulated in Transcription
  misc_feature: MA Experiment 20000234 PARAMETER Experiment Name: At_Siliques_P Parameter: Age (day) Value: 21
  misc_feature: MA Experiment 20000234 PARAMETER Experiment Name: At_Siliques_P Parameter: Organism Value: A. thaliana
  misc_feature: MA Experiment 20000234 PARAMETER Experiment Name: At_Siliques_P Parameter: Plant Line Value: WS
  misc_feature: MA Experiment 20000234 PARAMETER Experiment Name: At_Siliques_P Parameter: Tissue Value: Less Than 5mm Siliques vs. Whole Plant
  misc_feature: MA Experiment ID: 20000235 Result: Up-regulated in Transcription
  misc_feature: MA Experiment 20000235 PARAMETER Experiment Name: At_Siliques_P Parameter: Age (day) Value: 21
  misc_feature: MA Experiment 20000235 PARAMETER Experiment Name: At_Siliques_P Parameter: Organism Value: A. thaliana
  misc_feature: MA Experiment 20000235 PARAMETER Experiment Name: At_Siliques_P Parameter: Plant Line Value: WS
  misc_feature: MA Experiment 20000235 PARAMETER Experiment Name: At_Siliques_P Parameter: Tissue Value: 5-10mm Siliques vs. Whole Plant
  misc_feature: MA Experiment ID: 20000264 Result: Up-regulated in Transcription
  misc_feature: MA Experiment 20000264 PARAMETER Experiment Name: At_Open_Flower_P Parameter: Age (day) Value: 21
  misc_feature: MA Experiment 20000264 PARAMETER Experiment Name: At_Open_Flower_P Parameter: Plant Line Value: WS
  misc_feature: MA Experiment 20000264 PARAMETER Experiment Name: At_Open_Flower_P Parameter: Tissue Value: Open Flower vs. Whole Plant
  misc_feature: MA Experiment ID: 20000265 Result: Up-regulated in Transcription
  misc_feature: MA Experiment 20000265 PARAMETER Experiment Name: At_Open_Flower_P Parameter: Age (day) Value: 21
  misc_feature: MA Experiment 20000265 PARAMETER Experiment Name: At_Open_Flower_P Parameter: Plant Line Value: WS
  misc_feature: MA Experiment 20000265 PARAMETER Experiment Name: At_Open_Flower_P Parameter: Tissue Value: Closed Flower vs. Whole Plant
  misc_feature: MA Experiment ID: 20000286 Result: Up-regulated in Transcription
  misc_feature: MA Experiment 20000286 PARAMETER Experiment Name: At_Open_Flower_P Parameter: Age (day) Value: 21
  misc_feature: MA Experiment 20000286 PARAMETER Experiment Name: At_Open_Flower_P Parameter: Plant Line Value: WS
  misc_feature: MA Experiment 20000286 PARAMETER Experiment Name: At_Open_Flower_P Parameter: Tissue Value: Half Open vs. Whole Plant
  misc_feature: MA Experiment ID: 20000439 Result: Up-regulated in Transcription
  misc_feature: MA Experiment 20000439 PARAMETER Experiment Name: At_Roots__P Parameter: Age (day) Value: 14 vs. 21
  misc_feature: MA Experiment 20000439 PARAMETER Experiment Name: At_Roots__P Parameter: Organism Value: A. thaliana
  misc_feature: MA Experiment 20000439 PARAMETER Experiment Name: At_Roots__P Parameter: Tissue Value: Roots vs. Whole Plant
  misc_feature: MA Experiment ID: 20000794 Result: Up-regulated in Transcription
  misc_feature: MA Experiment 20000794 PARAMETER Experiment Name: At_Petals_P Parameter: Age (day) Value: 23-25 days
  misc_feature: MA Experiment 20000794 PARAMETER Experiment Name: At_Petals_P Parameter: Plant Line Value: WS
  misc_feature: MA Experiment 20000794 PARAMETER Experiment Name: At_Petals_P Parameter: Tissue Value: Petals vs. Whole plant
  misc_feature: MA Experiment ID: 20001757 Result: Down-regulated in Transcription
  misc_feature: MA Experiment 20001757 PARAMETER Experiment Name: At_50mM_NH4NO3_L-to-H_P Parameter: Timepoint (hr) Value: 6
  misc_feature: MA Experiment 20001757 PARAMETER Experiment Name: At_50mM_NH4NO3_L-to-H_P Parameter: Tissue Value: Leaf
  misc_feature: MA Experiment 20001757 PARAMETER Experiment Name: At_50mM_NH4NO3_L-to-H_P Parameter: Treatment Value: 50mM NH4NO3 vs 100mM Mannitol
gcgagtccagtgagaaaaaaagaataacaatccgacgagaaagaggaaagatcaaatcatctaagtgctggtgccttgattctgcagttctccattttaatccaacaaaaaaagaagctgaatcgacggtatagattcttcaaagaagcaatcataacgcaattgattatatccccaaaagaaaaggtttttaaactccaaaaatgcagactccaaaatcaaggccaggatcattggagctgccacaaaagaagtctcctttaccagctcccaaagttgttaggagactcaaaccaagcggagcagaatccgatccaaaaaccaagacaatatcgaaaactcaaatcccgaaagtagtagctgatcgtcgctctgcaagaatccctctcaatgagattcagaagaagcggacgggaaggataccggaactggaatctacgatatctcagcttcaagaagagcttaagaaggcaaaagaagagctaaacagatcagaagcattgaaaagagaagctcaagaagaagctgaagatgccaagcatcagttaatggatatcaatgcctcggaagattcaagaattgaggagctgcgtaaactctcgcaggagcgagacaagacatggcagtctgaacttgaagctatgcagagacaacacggaatggattctaccgctctgtcttctgccattaacgaagttcagaaactgaaatcgaagctctttgagtccgagtctgagttagagcagtctaagtatgaggtaaggtctttagagaaactcgtcagacagctcgaggaagaaagagtaaacagtagagactcttcatcatcaatggaagtggaagagctgaaagaagcaatgaatctttcaaggcaagagataacacaattgaaatctgcagttgaagcagcagagacaaggtatcaagaagagtatatacagagcacattgcagataagaagcgcatacgaacaaacagaggcggttaaatcaagatattcacagagagaagcagagttaacggaagaattgaacagaaccaaagatgaaatcgaaggtttgcgcaaagagttaatggagaaggtgaaagaagacgaatctacgggcgatttgaagaagctagaatcggatttgatggaagtgagagggagtttaatggataaagagatggagttgcagattctaaggagtgcaatggagaagaaagtggaaaccgcaaacacggaagccatggaagctgagcttaaaagagtgaagattcaatgtgagcaatggaggaaagctgctgagacggcagcttctatactgaacaatgatgaggaaagaacagattctattgagactagcaaaatgttgaagaagtttggtgtgttactcaagaaaaaccataagtaataataatactgattctttttacttgatttaataaaaatggcattattgttgtatgtaaatttataaaatttcgatttgtctaagtttaatttttttgttgaaacgttgccacatttgttgatgaaatttgtattgtg

SEQ ID NO: 77085 - protein, 396 aa, Arabidopsis thaliana; identical to SEQ ID NO: 49913
  peptide (1)..(396): Ceres Seq. ID no. 12561409
  misc_feature (11)..(369): Pfam Name: Myosin tail Pfam Description: Myosin tail
  misc_feature (1)..(396): Homolog of NCBI NO: 22331765 NR Description: putative protein; protein id: At3g53350.1,
  misc_feature (1)..(396): Homolog of NCBI NO: 17978993 NR Description: AT3g53350/F4P12_50 [Arabidopsis thaliana]
  misc_feature (1)..(396): Homolog of NCBI NO: 11357801 NR Description: hypothetical protein F4P12.50 - Arabidopsis >gi|6729486|emb|CAB67642.1| putative protein [Arabidopsis
  misc_feature (1)..(298): Homolog of NCBI NO: 15228082 NR Description: putative myosin heavy chain; protein id: [Arabidopsis thaliana] >gi|25408529|pir||C84788 probable myosin
  misc_feature (1)..(383): Homolog of NCBI NO: 18076679 NR Description: P70 protein [Nicotiana tabacum]
  misc_feature (1)..(396): Homolog of NCBI NO: 15228082 NR Description: putative myosin heavy chain; protein id: [Arabidopsis thaliana] >gi|25408529|pir||C84788 probable myosin
  misc_feature (1)..(396): Homolog of NCBI NO: 8885572 NR Description: myosin heavy chain-like [Arabidopsis thaliana]
  misc_feature (7)..(396): Homolog of NCBI NO: 30697347 NR Description: expressed protein [Arabidopsis thaliana]
  misc_feature (65)..(392): Homolog of NCBI NO: 34908020 NR Description: P0460C04.20 [Oryza sativa (japonica
  misc_feature (75)..(380): Homolog of NCBI NO: 34860755 NR Description: similar to hypothetical protein [Rattus

SEQ ID NO: 77086 - protein, 281 aa, Arabidopsis thaliana; identical to SEQ ID NO: 49914
  peptide (1)..(281): Ceres Seq. ID no. 12561410
  misc_feature (1)..(254): Pfam Name: Myosin tail Pfam Description: Myosin tail
  misc_feature (1)..(281): Homolog of NCBI NO: 22331765 NR Description: putative protein; protein id: At3g53350.1,
  misc_feature (1)..(281): Homolog of NCBI NO: 17978993 NR Description: AT3g53350/F4P12_50 [Arabidopsis thaliana]
  misc_feature (1)..(281): Homolog of NCBI NO: 11357801 NR Description: hypothetical protein F4P12.50 - Arabidopsis >gi|6729486|emb|CAB67642.1| putative protein [Arabidopsis
  misc_feature (1)..(183): Homolog of NCBI NO: 15228082 NR Description: putative myosin heavy chain; protein id: [Arabidopsis thaliana] >gi|25408529|pir||C84788 probable myosin
  misc_feature (1)..(268): Homolog of NCBI NO: 18076679 NR Description: P70 protein [Nicotiana tabacum]
  misc_feature (1)..(281): Homolog of NCBI NO: 15228082 NR Description: putative myosin heavy chain; protein id: [Arabidopsis thaliana] >gi|25408529|pir||C84788 probable myosin
  misc_feature (1)..(281): Homolog of NCBI NO: 8885572 NR Description: myosin heavy chain-like [Arabidopsis thaliana]
  misc_feature (1)..(281): Homolog of NCBI NO: 30697347 NR Description: expressed protein [Arabidopsis thaliana]
  misc_feature (1)..(277): Homolog of NCBI NO: 34908020 NR Description: P0460C04.20 [Oryza sativa (japonica
  misc_feature (1)..(265): Homolog of NCBI NO: 34860755 NR Description: similar to hypothetical protein [Rattus

SEQ ID NO: 77087 - protein, 250 aa, Arabidopsis thaliana; identical to SEQ ID NO: 49915
  peptide (1)..(250): Ceres Seq. ID no. 12561411
  misc_feature (1)..(223): Pfam Name: Myosin tail Pfam Description: Myosin tail
  misc_feature (1)..(250): Homolog of NCBI NO: 22331765 NR Description: putative protein; protein id: At3g53350.1,
  misc_feature (1)..(250): Homolog of NCBI NO: 17978993 NR Description: AT3g53350/F4P12_50 [Arabidopsis thaliana]
  misc_feature (1)..(250): Homolog of NCBI NO: 11357801 NR Description: hypothetical protein F4P12.50 - Arabidopsis >gi|6729486|emb|CAB67642.1| putative protein [Arabidopsis
  misc_feature (1)..(152): Homolog of NCBI NO: 15228082 NR Description: putative myosin heavy chain; protein id: [Arabidopsis thaliana] >gi|25408529|pir||C84788 probable myosin
  misc_feature (1)..(237): Homolog of NCBI NO: 18076679 NR Description: P70 protein [Nicotiana tabacum]
  misc_feature (1)..(250): Homolog of NCBI NO: 15228082 NR Description: putative myosin heavy chain; protein id: [Arabidopsis thaliana] >gi|25408529|pir||C84788 probable myosin
  misc_feature (1)..(250): Homolog of NCBI NO: 8885572 NR Description: myosin heavy chain-like [Arabidopsis thaliana]
  misc_feature (1)..(250): Homolog of NCBI NO: 30697347 NR Description: expressed protein [Arabidopsis thaliana]
  misc_feature (1)..(246): Homolog of NCBI NO: 34908020 NR Description: P0460C04.20 [Oryza sativa (japonica
  misc_feature (1)..(234): Homolog of NCBI NO: 34860755 NR Description: similar to hypothetical protein [Rattus

SEQ ID NO: 77088 - DNA, 1202 bp, Arabidopsis thaliana
  misc_feature (1)..(1202): Ceres Seq. ID no. 12561438
  misc_feature: MA Experiment ID: 108434 Result: Down-regulated in Transcription
  misc_feature: MA Experiment 108434 PARAMETER Experiment Name: At_Root_Tips_cDNA_P Parameter: Tissue Value: Root Tips
  misc_feature: MA Experiment ID: 108435 Result: Down-regulated in Transcription
  misc_feature: MA Experiment 108435 PARAMETER Experiment Name: At_stm_Mutants_cDNA_P Parameter: Plant Line Value: wt Landsburg vs stm
  misc_feature: MA Experiment 108435 PARAMETER Experiment Name: At_stm_Mutants_cDNA_P Parameter: Tissue Value: Shoot Apical Meristem Region
  misc_feature: MA Experiment ID: 108461 Result: Up-regulated in Transcription
  misc_feature: MA Experiment 108461 PARAMETER Experiment Name: At_Germinating_Seeds_cDNA_P Parameter: Age (day) Value: 1 vs. 0
  misc_feature: MA Experiment 108461 PARAMETER Experiment Name: At_Germinating_Seeds_cDNA_P Parameter: Tissue Value: Germinating Seeds
  misc_feature: MA Experiment ID: 108462 Result: Up-regulated in Transcription
  misc_feature: MA Experiment 108462 PARAMETER Experiment Name: At_Germinating_Seeds_cDNA_P Parameter: Age (day) Value: 2 vs. 0
  misc_feature: MA Experiment 108462 PARAMETER Experiment Name: At_Germinating_Seeds_cDNA_P Parameter: Tissue Value: Germinating Seeds
  misc_feature: MA Experiment ID: 108463 Result: Up-regulated in Transcription
  misc_feature: MA Experiment 108463 PARAMETER Experiment Name: At_Germinating_Seeds_cDNA_P Parameter: Age (day) Value: 3 vs. 0
  misc_feature: MA Experiment 108463 PARAMETER Experiment Name: At_Germinating_Seeds_cDNA_P Parameter: Tissue Value: Germinating Seeds
  misc_feature: MA Experiment ID: 108464 Result: Up-regulated in Transcription
  misc_feature: MA Experiment 108464 PARAMETER Experiment Name: At_Germinating_Seeds_cDNA_P Parameter: Age (day) Value: 4 vs. 0
  misc_feature: MA Experiment 108464 PARAMETER Experiment Name: At_Germinating_Seeds_cDNA_P Parameter: Tissue Value: Germinating Seeds
  misc_feature: MA Experiment ID: 108469 Result: Up-regulated in Transcription
  misc_feature: MA Experiment ID: 108488 Result: Down-regulated in Transcription
  misc_feature: MA Experiment ID: 108573 Result: Down-regulated in Transcription
  misc_feature: MA Experiment 108573 PARAMETER Experiment Name: At_Drought_cDNA_P Parameter: Timepoint (hr) Value: 6
  misc_feature: MA Experiment 108573 PARAMETER Experiment Name: At_Drought_cDNA_P Parameter: Tissue Value: Aerial
  misc_feature: MA Experiment 108573 PARAMETER Experiment Name: At_Drought_cDNA_P Parameter: Treatment Value: Drought vs. No Drought
  misc_feature: MA Experiment ID: 108577 Result: Down-regulated in Transcription
  misc_feature: MA Experiment 108577 PARAMETER Experiment Name: At_42deg_Heat_cDNA_P Parameter: Temperature (deg C) Value: 42 vs. 22
  misc_feature: MA Experiment 108577 PARAMETER Experiment Name: At_42deg_Heat_cDNA_P Parameter: Timepoint (hr) Value: 6
  misc_feature: MA Experiment 108577 PARAMETER Experiment Name: At_42deg_Heat_cDNA_P Parameter: Tissue Value: Aerial
  misc_feature: MA Experiment ID: 108594 Result: Down-regulated in Transcription
  misc_feature: MA Experiment 108594 PARAMETER Experiment Name: At_Ler-rhl_Root_cDNA_P Parameter: Plant Line Value: null
  misc_feature: MA Experiment ID: 108595 Result: Down-regulated in Transcription
  misc_feature: MA Experiment 108595 PARAMETER Experiment Name: At_Ler-pi_Ovule_cDNA_P Parameter: Plant Line Value: null
  misc_feature: MA Experiment ID: 108668 Result: Up-regulated in Transcription
  misc_feature: MA Experiment 108668 PARAMETER Experiment Name: At_2mM_SA_cDNA_P Parameter: Plant Line Value: WS
  misc_feature: MA Experiment 108668 PARAMETER Experiment Name: At_2mM_SA_cDNA_P Parameter: Timepoint (hr) Value: 6
  misc_feature: MA Experiment 108668 PARAMETER Experiment Name: At_2mM_SA_cDNA_P Parameter: Treatment Value: 2mM SA vs. No Treatment
  misc_feature: MA Experiment ID: 20000088 Result: Up-regulated in Transcription
  misc_feature: MA Experiment 20000088 PARAMETER Experiment Name: At_100uM_ABA_Mutants_cDNA_P Parameter: Plant Line Value: Landsberg
  misc_feature: MA Experiment 20000088 PARAMETER Experiment Name: At_100uM_ABA_Mutants_cDNA_P Parameter: Timepoint (hr) Value: 6
  misc_feature: MA Experiment 20000088 PARAMETER Experiment Name: At_100uM_ABA_Mutants_cDNA_P Parameter: Tissue Value: Aerial
  misc_feature: MA Experiment 20000088 PARAMETER Experiment Name: At_100uM_ABA_Mutants_cDNA_P Parameter: Treatment Value: 100uM ABA vs. No Treatment
  misc_feature: MA Experiment ID: 20000113 Result: Down-regulated in Transcription
  misc_feature: MA Experiment 20000113 PARAMETER Experiment Name: At_42deg_Heat_cDNA_P Parameter: Temperature (deg C) Value: 42 vs. 22
  misc_feature: MA Experiment 20000113 PARAMETER Experiment Name: At_42deg_Heat_cDNA_P Parameter: Timepoint (hr) Value: 8
  misc_feature: MA Experiment 20000113 PARAMETER Experiment Name: At_42deg_Heat_cDNA_P Parameter: Tissue Value: Aerial
  misc_feature: MA Experiment ID: 20000173 Result: Down-regulated in Transcription
  misc_feature: MA Experiment 20000173 PARAMETER Experiment Name: At_42deg_Heat_P Parameter: Age (day) Value: 14
  misc_feature: MA Experiment 20000173 PARAMETER Experiment Name: At_42deg_Heat_P Parameter: Organism Value: A. thaliana
  misc_feature: MA Experiment 20000173 PARAMETER Experiment Name: At_42deg_Heat_P Parameter: Plant Line Value: WS
  misc_feature: MA Experiment 20000173 PARAMETER Experiment Name: At_42deg_Heat_P Parameter: Temperature (deg C) Value: 42 vs. 22
  misc_feature: MA Experiment 20000173 PARAMETER Experiment Name: At_42deg_Heat_P Parameter: Timepoint (hr) Value: 6
  misc_feature: MA Experiment 20000173 PARAMETER Experiment Name: At_42deg_Heat_P Parameter: Tissue Value: Aerial
  misc_feature: MA Experiment ID: 20000179 Result: Down-regulated in Transcription
  misc_feature: MA Experiment 20000179 PARAMETER Experiment Name: At_Germinating_Seeds_P Parameter: Age (hr) Value: 6 vs. 0
  misc_feature: MA Experiment 20000179 PARAMETER Experiment Name: At_Germinating_Seeds_P Parameter: Tissue Value: Germinating Seeds
  misc_feature: MA Experiment ID: 20000180 Result: Up-regulated in Transcription
  misc_feature: MA Experiment 20000180 PARAMETER Experiment Name: At_Germinating_Seeds_P Parameter: Age (hr) Value: 24 vs. 0
  misc_feature: MA Experiment 20000180 PARAMETER Experiment Name: At_Germinating_Seeds_P Parameter: Tissue Value: Germinating Seeds
  misc_feature: MA Experiment ID: 20000182 Result: Up-regulated in Transcription
  misc_feature: MA Experiment 20000182 PARAMETER Experiment Name: At_2mM_SA_P Parameter: Age (day) Value: 14
  misc_feature: MA Experiment 20000182 PARAMETER Experiment Name: At_2mM_SA_P Parameter: Organism Value: A. thaliana
  misc_feature: MA Experiment 20000182 PARAMETER Experiment Name: At_2mM_SA_P Parameter: Plant Line Value: WS
  misc_feature: MA Experiment 20000182 PARAMETER Experiment Name: At_2mM_SA_P Parameter: Timepoint (hr) Value: 6
  misc_feature: MA Experiment 20000182 PARAMETER Experiment Name: At_2mM_SA_P Parameter: Tissue Value: Aerial
  misc_feature: MA Experiment 20000182 PARAMETER Experiment Name: At_2mM_SA_P Parameter: Treatment Value: 2mM SA vs. No Treatment
  misc_feature: MA Experiment ID: 20000184 Result: Up-regulated in Transcription
  misc_feature: MA Experiment 20000184 PARAMETER Experiment Name: At_Shoots__P Parameter: Age (day) Value: 7
  misc_feature: MA Experiment 20000184 PARAMETER Experiment Name: At_Shoots__P Parameter: Tissue Value: Shoots vs. Whole Plant
  misc_feature: MA Experiment ID: 20000234 Result: Down-regulated in Transcription
  misc_feature: MA Experiment 20000234 PARAMETER Experiment Name: At_Siliques_P Parameter: Age (day) Value: 21
  misc_feature: MA Experiment 20000234 PARAMETER Experiment Name: At_Siliques_P Parameter: Organism Value: A. thaliana
  misc_feature: MA Experiment 20000234 PARAMETER Experiment Name: At_Siliques_P Parameter: Plant Line Value: WS
  misc_feature: MA Experiment 20000234 PARAMETER Experiment Name: At_Siliques_P Parameter: Tissue Value: Less Than 5mm Siliques vs. Whole Plant
  misc_feature: MA Experiment ID: 20000264 Result: Down-regulated in Transcription
  misc_feature: MA Experiment 20000264 PARAMETER Experiment Name: At_Open_Flower_P Parameter: Age (day) Value: 21
  misc_feature: MA Experiment 20000264 PARAMETER Experiment Name: At_Open_Flower_P Parameter: Plant Line Value: WS
  misc_feature: MA Experiment 20000264 PARAMETER Experiment Name: At_Open_Flower_P Parameter: Tissue Value: Open Flower vs. Whole Plant
  misc_feature: MA Experiment ID: 20000265 Result: Down-regulated in Transcription
  misc_feature: MA Experiment 20000265 PARAMETER Experiment Name: At_Open_Flower_P Parameter: Age (day) Value: 21
  misc_feature: MA Experiment 20000265 PARAMETER Experiment Name: At_Open_Flower_P Parameter: Plant Line Value: WS
  misc_feature: MA Experiment 20000265 PARAMETER Experiment Name: At_Open_Flower_P Parameter: Tissue Value: Closed Flower vs. Whole Plant
  misc_feature: MA Experiment ID: 20000286 Result: Down-regulated in Transcription
  misc_feature: MA Experiment 20000286 PARAMETER Experiment Name: At_Open_Flower_P Parameter: Age (day) Value: 21
  misc_feature: MA Experiment 20000286 PARAMETER Experiment Name: At_Open_Flower_P Parameter: Plant Line Value: WS
  misc_feature: MA Experiment 20000286 PARAMETER Experiment Name: At_Open_Flower_P Parameter: Tissue Value: Half Open vs. Whole Plant
  misc_feature: MA Experiment ID: 20000436 Result: Down-regulated in Transcription
  misc_feature: MA Experiment 20000436 PARAMETER Experiment Name: At_Drought_P Parameter: Age (day) Value: 7
  misc_feature: MA Experiment 20000436 PARAMETER Experiment Name: At_Drought_P Parameter: Organism Value: A. thaliana
  misc_feature: MA Experiment 20000436 PARAMETER Experiment Name: At_Drought_P Parameter: Plant Line Value: WS
  misc_feature: MA Experiment 20000436 PARAMETER Experiment Name: At_Drought_P Parameter: Timepoint (hr) Value: 12
  misc_feature: MA Experiment 20000436 PARAMETER Experiment Name: At_Drought_P Parameter: Tissue Value: Whole Plant
  misc_feature: MA Experiment 20000436 PARAMETER Experiment Name: At_Drought_P Parameter: Treatment Value: Drought vs. No Drought
  misc_feature: MA Experiment ID: 20000437 Result: Down-regulated in Transcription
  misc_feature: MA Experiment 20000437 PARAMETER Experiment Name: At_Drought_P Parameter: Age (day) Value: 8
  misc_feature: MA Experiment 20000437 PARAMETER Experiment Name: At_Drought_P Parameter: Organism Value: A. thaliana
  misc_feature: MA Experiment 20000437 PARAMETER Experiment Name: At_Drought_P Parameter: Plant Line Value: WS
  misc_feature: MA Experiment 20000437 PARAMETER Experiment Name: At_Drought_P Parameter: Timepoint (hr) Value: 24
  misc_feature: MA Experiment 20000437 PARAMETER Experiment Name: At_Drought_P Parameter: Tissue Value: Whole Plant
  misc_feature: MA Experiment 20000437 PARAMETER Experiment Name: At_Drought_P Parameter: Treatment Value: Drought vs. No Drought
  misc_feature: MA Experiment ID: 20000438 Result: Up-regulated in Transcription
  misc_feature: MA Experiment 20000438 PARAMETER Experiment Name: At_Shoots__P Parameter: Age (day) Value: 14
  misc_feature: MA Experiment 20000438 PARAMETER Experiment Name: At_Shoots__P Parameter: Tissue Value: Shoots vs. Whole Plant
  misc_feature: MA Experiment ID: 20000439 Result: Down-regulated in Transcription
  misc_feature: MA Experiment 20000439 PARAMETER Experiment Name: At_Roots__P Parameter: Age (day) Value: 14 vs. 21
  misc_feature: MA Experiment 20000439 PARAMETER Experiment Name: At_Roots__P Parameter: Organism Value: A. thaliana
  misc_feature: MA Experiment 20000439 PARAMETER Experiment Name: At_Roots__P Parameter: Tissue Value: Roots vs. Whole Plant
  misc_feature: MA Experiment ID: 20000441 Result: Up-regulated in Transcription
  misc_feature: MA Experiment 20000441 PARAMETER Experiment Name: At_1uM_BR-BRZ__P Parameter: Tissue Value: Shoot Apices
  misc_feature: MA Experiment 20000441 PARAMETER Experiment Name: At_1uM_BR-BRZ__P Parameter: Treatment Value: 1uM BR vs. No Treatment
  misc_feature: MA Experiment ID: 20000527 Result: Down-regulated in Transcription
  misc_feature: MA Experiment 20000527 PARAMETER Experiment Name: At_10percent_PEG_P Parameter: Age (day) Value: 20
  misc_feature: MA Experiment 20000527 PARAMETER Experiment Name: At_10percent_PEG_P Parameter: Organism Value: A. thaliana
  misc_feature: MA Experiment 20000527 PARAMETER Experiment Name: At_10percent_PEG_P Parameter: Plant Line Value: WS
  misc_feature: MA Experiment 20000527 PARAMETER Experiment Name: At_10percent_PEG_P Parameter: Timepoint (day) Value: 20
  misc_feature: MA Experiment 20000527 PARAMETER Experiment Name: At_10percent_PEG_P Parameter: Tissue Value: Whole Plant
  misc_feature: MA Experiment 20000527 PARAMETER Experiment Name: At_10percent_PEG_P Parameter: Treatment Value: 10percent PEG vs. No Treatment
  misc_feature: MA Experiment ID: 20001248 Result: Up-regulated in Transcription
  misc_feature: MA Experiment 20001248 PARAMETER Experiment Name: At_Far-red-induction_P Parameter: Age (day) Value: 7
  misc_feature: MA Experiment 20001248 PARAMETER Experiment Name: At_Far-red-induction_P Parameter: Light Value: Far-red vs. White
  misc_feature: MA Experiment 20001248 PARAMETER Experiment Name: At_Far-red-induction_P Parameter: Organism Value: A. thaliana
  misc_feature: MA Experiment 20001248 PARAMETER Experiment Name: At_Far-red-induction_P Parameter: Plant Line Value: Columbia
  misc_feature: MA Experiment 20001248 PARAMETER Experiment Name: At_Far-red-induction_P Parameter: Timepoint (hr) Value: 4
  misc_feature: MA Experiment 20001248 PARAMETER Experiment Name: At_Far-red-induction_P Parameter: Tissue Value: Whole Plant
  misc_feature: MA Experiment ID: 20001554 Result: Down-regulated in Transcription
  misc_feature: MA Experiment 20001554 PARAMETER Experiment Name: At_Drought_Soil_Dry_P Parameter: Age (day) Value: 21
  misc_feature: MA Experiment 20001554 PARAMETER Experiment Name: At_Drought_Soil_Dry_P Parameter: Organism Value: A. thaliana
  misc_feature: MA Experiment 20001554 PARAMETER Experiment Name: At_Drought_Soil_Dry_P Parameter: Plant Line Value: WS
  misc_feature: MA Experiment 20001554 PARAMETER Experiment Name: At_Drought_Soil_Dry_P Parameter: Post Timepoint (hr) Value: None
  misc_feature: MA Experiment 20001554 PARAMETER Experiment Name: At_Drought_Soil_Dry_P Parameter: Post-Treatment Value: None
  misc_feature: MA Experiment 20001554 PARAMETER Experiment Name: At_Drought_Soil_Dry_P Parameter: Timepoint (day) Value: 7
  misc_feature: MA Experiment 20001554 PARAMETER Experiment Name: At_Drought_Soil_Dry_P Parameter: Treatment Value: Drought vs. No Drought
  misc_feature: MA Experiment ID: 20001555 Result: Down-regulated in Transcription
  misc_feature: MA Experiment 20001555 PARAMETER Experiment Name: At_Drought_Soil_Dry_P Parameter: Age (day) Value: 24
  misc_feature: MA Experiment 20001555 PARAMETER Experiment Name: At_Drought_Soil_Dry_P Parameter: Organism Value: A. thaliana
  misc_feature: MA Experiment 20001555 PARAMETER Experiment Name: At_Drought_Soil_Dry_P Parameter: Plant Line Value: WS
  misc_feature: MA Experiment 20001555 PARAMETER Experiment Name: At_Drought_Soil_Dry_P Parameter: Post Timepoint (hr) Value: None
  misc_feature: MA Experiment 20001555 PARAMETER Experiment Name: At_Drought_Soil_Dry_P Parameter: Post-Treatment Value: None
  misc_feature: MA Experiment 20001555 PARAMETER Experiment Name: At_Drought_Soil_Dry_P Parameter: Timepoint (day) Value: 10
  misc_feature: MA Experiment 20001555 PARAMETER Experiment Name: At_Drought_Soil_Dry_P Parameter: Treatment Value: Drought vs. No Drought
  misc_feature: MA Experiment ID: 20001557 Result: Up-regulated in Transcription
  misc_feature: MA Experiment 20001557 PARAMETER Experiment Name: At_Drought_Soil_Dry_P Parameter: Age (day) Value: 27
  misc_feature: MA Experiment 20001557 PARAMETER Experiment Name: At_Drought_Soil_Dry_P Parameter: Organism Value: A. thaliana
  misc_feature: MA Experiment 20001557 PARAMETER Experiment Name: At_Drought_Soil_Dry_P Parameter: Plant Line Value: WS
  misc_feature: MA Experiment 20001557 PARAMETER Experiment Name: At_Drought_Soil_Dry_P Parameter: Post Timepoint (hr) Value: 3
  misc_feature: MA Experiment 20001557 PARAMETER Experiment Name: At_Drought_Soil_Dry_P Parameter: Post-Treatment Value: Re-Water vs. No Drought
  misc_feature: MA Experiment 20001557 PARAMETER Experiment Name: At_Drought_Soil_Dry_P Parameter: Timepoint (day) Value: 13
  misc_feature: MA Experiment 20001557 PARAMETER Experiment Name: At_Drought_Soil_Dry_P Parameter: Treatment Value: Drought vs. No Drought
  misc_feature: MA Experiment ID: 20001905 Result: Up-regulated in Transcription
  misc_feature: MA Experiment 20001905 PARAMETER Experiment Name: At_Drought_Reproduction_P Parameter: Age (day) Value: 40
  misc_feature: MA Experiment 20001905 PARAMETER Experiment Name: At_Drought_Reproduction_P Parameter: Organism Value: A. thaliana
  misc_feature: MA Experiment 20001905 PARAMETER Experiment Name: At_Drought_Reproduction_P Parameter: Plant Line Value: WS
  misc_feature: MA Experiment 20001905 PARAMETER Experiment Name: At_Drought_Reproduction_P Parameter: Timepoint (day) Value: 10
  misc_feature: MA Experiment 20001905 PARAMETER Experiment Name: At_Drought_Reproduction_P Parameter: Tissue Value: Rosettes
  misc_feature: MA Experiment 20001905 PARAMETER Experiment Name: At_Drought_Reproduction_P Parameter: Treatment Value: Drought vs. No Drought
  misc_feature: MA Experiment ID: 20001911 Result: Down-regulated in Transcription
  misc_feature: MA Experiment 20001911 PARAMETER Experiment Name: At_Drought_Reproduction_P Parameter: Age (day) Value: 40
  misc_feature: MA Experiment 20001911 PARAMETER Experiment Name: At_Drought_Reproduction_P Parameter: Organism Value: A. thaliana
  misc_feature: MA Experiment 20001911 PARAMETER Experiment Name: At_Drought_Reproduction_P Parameter: Plant Line Value: WS
  misc_feature: MA Experiment 20001911 PARAMETER Experiment Name: At_Drought_Reproduction_P Parameter: Timepoint (day) Value: 10
  misc_feature: MA Experiment 20001911 PARAMETER Experiment Name: At_Drought_Reproduction_P Parameter: Tissue Value: Flowers
  misc_feature: MA Experiment 20001911 PARAMETER Experiment Name: At_Drought_Reproduction_P Parameter: Treatment Value: Drought vs. No Drought
atatcaaacttcaaaagcgtcaaacataaagttaggccaagaaacccatttaaaaaaaaagagagagagatggagagtttcccgatcatcaatctcgagaagcttaatggagaagagagagcaatcactatggagaagatcaaagacgcttgtgaaaactggggcttctttgagtgtgtgaaccatgggatttcactcgagcttttggacaaagtggagaagatgaccaaggaacattacaagaagtgcatggaagagagattcaaggaatcgattaagaacagaggtcttgactctcttcgctctgaagtcaacgacgttgactgggaatccactttctacctcaagcaccttcccgtctctaatatctccgatgtccctgatctcgacgacgattacagaacgttaatgaaagacttcgccggaaagatagagaagttgtcggaggagctactggatctgctgtgcgagaatctcggtttagagaagggttatttaaaaaaggtgttttacgggtcgaaaagaccgacttttggaaccaaagtcagcaattatccaccttgtcctaatccggacctagtcaagggtctccgagcccacaccgacgccggcggcatcatcctcctcttccaagacgacaaagtcagtggacttcagcttcttaaagacggcgagtgggtcgatgttcctccggttaagcattcaatcgtcgttaatctcggcgatcaacttgaggtgataaccaatgggaagtacaagagtgtggaacatagagtgctatctcagacagacggagaaggaagaatgtcgatcgcatcattctataatccgggaagcgactctgttatttttccggcgccggagctgatcggaaaagaagcagagaaggagaagaaagagaactatccgagatttgtgtttgaagattacatgaaactctactctgctgtcaagtttcaggccaaggaaccaaggtttgaagccatgaaagctatggagacaactgtggccaacaatgttggaccattggccactgcgtgaatgatatgtaactggttaataaatatatatatatatatatatatagtctttatataatgtcttagaaacttgattattcactatacgaataattttgttcatgttgttgtatgtttaagtggtgaatgtgttttatatatgggaattaatgttttctgttc

SEQ ID NO: 77089 - protein, 346 aa, Arabidopsis thaliana
  peptide (1)..(346): Ceres Seq. ID no. 12561439
  misc_feature (176)..(277): Pfam Name: 2OG-Fe(II) oxygenase superfamily Pfam Description: 2OG-Fe(II) oxygenase superfamily
  misc_feature (24)..(346): Homolog of NCBI NO: 15220386 NR Description: 1-aminocyclopropane-1-carboxylate oxidase; id: At1g05010.1, supported by cDNA: gi_13877784 [Arabidopsis
  misc_feature (24)..(346): Homolog of NCBI NO: 541861 NR Description: ethylene-forming enzyme - Arabidopsis thaliana
  misc_feature (24)..(346): Homolog of NCBI NO: 13877785 NR Description: putative 1-aminocyclopropane-1-carboxylate
  misc_feature (24)..(346): Homolog of NCBI NO: 27447954 NR Description: putative 1-aminocyclopropane-1-carboxylate
  misc_feature (24)..(346): Homolog of NCBI NO: 7576446 NR Description: 1-aminocyclopropane-1-carboxylate oxidase
  misc_feature (24)..(345): Homolog of NCBI NO: 14573463 NR Description: 1-aminocyclopropane-1-carboxylate oxidase
  misc_feature (24)..(345): Homolog of NCBI NO: 398994 NR Description: 1-aminocyclopropane-1-carboxylate oxidase (ACC
  misc_feature (24)..(346): Homolog of NCBI NO: 584711 NR Description: 1-aminocyclopropane-1-carboxylate oxidase 3 (ACC
  misc_feature (24)..(346): Homolog of NCBI NO: 532530 NR Description: 1-aminocyclopropane-1-carboxylate oxidase
  misc_feature (24)..(346): Homolog of NCBI NO: 1085595 NR Description: 1-aminocyclopropane-1-carboxylate oxidase
ISNFKSVKHKVRPRNPFKKKEREMESFPIINLEKLNGEERAITMEKIKDACENWGFFECVNHGISLELLDKVEKMTKEHYKKCMEERFKESIKNRGLDSLRSEVNDVDWESTFYLKHLPVSNISDVPDLDDDYRTLMKDFAGKIEKLSEELLDLLCENLGLEKGYLKKVFYGSKRPTFGTKVSNYPPCPNPDLVKGLRAHTDAGGIILLFQDDKVSGLQLLKDGEWVDVPPVKHSIVVNLGDQLEVITNGKYKSVEHRVLSQTDGEGRMSIASFYNPGSDSVIFPAPELIGKEAEKEKKENYPRFVFEDYMKLYSAVKFQAKEPRFEAMKAMETTVANNVGPLATA

SEQ ID NO: 77090 - protein, 323 aa, Arabidopsis thaliana; identical to SEQ ID NO: 25991
  peptide (1)..(323): Ceres Seq. ID no. 12561440
  misc_feature (153)..(254): Pfam Name: 2OG-Fe(II) oxygenase superfamily Pfam Description: 2OG-Fe(II) oxygenase superfamily
  misc_feature (1)..(323): Homolog of NCBI NO: 15220386 NR Description: 1-aminocyclopropane-1-carboxylate oxidase; id: At1g05010.1, supported by cDNA: gi_13877784 [Arabidopsis
  misc_feature (1)..(323): Homolog of NCBI NO: 541861 NR Description: ethylene-forming enzyme - Arabidopsis thaliana
  misc_feature (1)..(323): Homolog of NCBI NO: 13877785 NR Description: putative 1-aminocyclopropane-1-carboxylate
  misc_feature (1)..(323): Homolog of NCBI NO: 27447954 NR Description: putative 1-aminocyclopropane-1-carboxylate
  misc_feature (1)..(323): Homolog of NCBI NO: 7576446 NR Description: 1-aminocyclopropane-1-carboxylate oxidase
  misc_feature (1)..(322): Homolog of NCBI NO: 14573463 NR Description: 1-aminocyclopropane-1-carboxylate oxidase
  misc_feature (1)..(322): Homolog of NCBI NO: 398994 NR Description: 1-aminocyclopropane-1-carboxylate oxidase (ACC
  misc_feature (1)..(323): Homolog of NCBI NO: 584711 NR Description: 1-aminocyclopropane-1-carboxylate oxidase 3 (ACC
  misc_feature (1)..(323): Homolog of NCBI NO: 532530 NR Description: 1-aminocyclopropane-1-carboxylate oxidase
  misc_feature (1)..(323): Homolog of NCBI NO: 1085595 NR Description: 1-aminocyclopropane-1-carboxylate oxidase

SEQ ID NO: 77091 - protein, 303 aa, Arabidopsis thaliana; identical to SEQ ID NO: 25992
  peptide (1)..(303): Ceres Seq. ID no. 12561441
  misc_feature (133)..(234): Pfam Name: 2OG-Fe(II) oxygenase superfamily Pfam Description: 2OG-Fe(II) oxygenase superfamily
  misc_feature (1)..(303): Homolog of NCBI NO: 15220386 NR Description: 1-aminocyclopropane-1-carboxylate oxidase; id: At1g05010.1, supported by cDNA: gi_13877784 [Arabidopsis
  misc_feature (1)..(303): Homolog of NCBI NO: 541861 NR Description: ethylene-forming enzyme - Arabidopsis thaliana
  misc_feature (1)..(303): Homolog of NCBI NO: 13877785 NR Description: putative 1-aminocyclopropane-1-carboxylate
  misc_feature (1)..(303): Homolog of NCBI NO: 27447954 NR Description: putative 1-aminocyclopropane-1-carboxylate
  misc_feature (1)..(303): Homolog of NCBI NO: 7576446 NR Description: 1-aminocyclopropane-1-carboxylate oxidase
  misc_feature (1)..(302): Homolog of NCBI NO: 14573463 NR Description: 1-aminocyclopropane-1-carboxylate oxidase
  misc_feature (1)..(302): Homolog of NCBI NO: 398994 NR Description: 1-aminocyclopropane-1-carboxylate oxidase (ACC
  misc_feature (1)..(303): Homolog of NCBI NO: 584711 NR Description: 1-aminocyclopropane-1-carboxylate oxidase 3 (ACC
  misc_feature (1)..(303): Homolog of NCBI NO: 532530 NR Description: 1-aminocyclopropane-1-carboxylate oxidase
  misc_feature (1)..(303): Homolog of NCBI NO: 1085595 NR Description: 1-aminocyclopropane-1-carboxylate oxidase

SEQ ID NO: 77092 - DNA, 1102 bp, Arabidopsis thaliana
  misc_feature (1)..(1102): Ceres Seq. ID no. 12561466
  misc_feature: MA Experiment ID: 108501 Result: Up-regulated in Transcription
  misc_feature: MA Experiment 108501 PARAMETER Experiment Name: At_ap2_floral_buds_cDNA_P Parameter: Plant Line Value: ap2 (Ler.)
  misc_feature: MA Experiment 108501 PARAMETER Experiment Name: At_ap2_floral_buds_cDNA_P Parameter: Tissue Value: Closed Flower
  misc_feature: MA Experiment ID: 20000234 Result: Up-regulated in Transcription
  misc_feature: MA Experiment 20000234 PARAMETER Experiment Name: At_Siliques_P Parameter: Age (day) Value: 21
  misc_feature: MA Experiment 20000234 PARAMETER Experiment Name: At_Siliques_P Parameter: Organism Value: A. thaliana
  misc_feature: MA Experiment 20000234 PARAMETER Experiment Name: At_Siliques_P Parameter: Plant Line Value: WS
  misc_feature: MA Experiment 20000234 PARAMETER Experiment Name: At_Siliques_P Parameter: Tissue Value: Less Than 5mm Siliques vs. Whole Plant
  misc_feature: MA Experiment ID: 20000264 Result: Up-regulated in Transcription
  misc_feature: MA Experiment 20000264 PARAMETER Experiment Name: At_Open_Flower_P Parameter: Age (day) Value: 21
  misc_feature: MA Experiment 20000264 PARAMETER Experiment Name: At_Open_Flower_P Parameter: Plant Line Value: WS
  misc_feature: MA Experiment 20000264 PARAMETER Experiment Name: At_Open_Flower_P Parameter: Tissue Value: Open Flower vs. Whole Plant
  misc_feature: MA Experiment ID: 20000265 Result: Up-regulated in Transcription
  misc_feature: MA Experiment 20000265 PARAMETER Experiment Name: At_Open_Flower_P Parameter: Age (day) Value: 21
  misc_feature: MA Experiment 20000265 PARAMETER Experiment Name: At_Open_Flower_P Parameter: Plant Line Value: WS
  misc_feature: MA Experiment 20000265 PARAMETER Experiment Name: At_Open_Flower_P Parameter: Tissue Value: Closed Flower vs. Whole Plant
  misc_feature: MA Experiment ID: 20000286 Result: Up-regulated in Transcription
  misc_feature: MA Experiment 20000286 PARAMETER Experiment Name: At_Open_Flower_P Parameter: Age (day) Value: 21
  misc_feature: MA Experiment 20000286 PARAMETER Experiment Name: At_Open_Flower_P Parameter: Plant Line Value: WS
  misc_feature: MA Experiment 20000286 PARAMETER Experiment Name: At_Open_Flower_P Parameter: Tissue Value: Half Open vs. Whole Plant
  misc_feature: MA Experiment ID: 20001906 Result: Down-regulated in Transcription
  misc_feature: MA Experiment 20001906 PARAMETER Experiment Name: At_Drought_Reproduction_P Parameter: Age (day) Value: 35
  misc_feature: MA Experiment 20001906 PARAMETER Experiment Name: At_Drought_Reproduction_P Parameter: Organism Value: A. thaliana
  misc_feature: MA Experiment 20001906 PARAMETER Experiment Name: At_Drought_Reproduction_P Parameter: Plant Line Value: WS
  misc_feature: MA Experiment 20001906 PARAMETER Experiment Name: At_Drought_Reproduction_P Parameter: Timepoint (day) Value: 5
  misc_feature: MA Experiment 20001906 PARAMETER Experiment Name: At_Drought_Reproduction_P Parameter: Tissue Value: Siliques
  misc_feature: MA Experiment 20001906 PARAMETER Experiment Name: At_Drought_Reproduction_P Parameter: Treatment Value: Drought vs. No Drought
atcattcatcgtacacacacactctctatgacaaagctccccaacatgacgacaacactcaaccatctatttgatctgccggggcagatttgccatgtccagtgtggtttttgcaccactattttgctggtgagtgtaccgtttacaagcttgtcaatggtggtgactgtgagatgtgggcattgcacaagccttctctctgtcaatttgatgaaggcttccttcattcctctccatctccttgcttctctctcccatcttgatgagaccgggaaagaggaggttgcagctacagatggtgtggaagaagaagcatggaaggtgaatcaggagaaggagaacagtccaacgactttggtttcatcttcagacaatgaagatgaagatgtgtctcgtgtttaccaagttgtcaataaaccacctgagaagcgacaaagagctccttcagcttacaattgcttcatcaaggaagagatcaggaggttaaaggctcagaatccaagcatggctcacaaggaagctttcagcttagctgccaaaaattgggcccattttcctccagctcacaacaagagagctgcttcagatcaatgtttttgtgaggaagataacaatgcgatactaccatgcaatgtttttgaggaccatgaagaaagcaataatgggttccgagagagaaaggctcagaggcattccatttggggaaaatctccatttgagtaataacaatttgggatatgaaaatttaacaaaaaaataaataatggcgtatgacatgtgatggtgactcttttcttctagggtttgattatgttggtttagggtttctgttgttggagagagatagagagaagaagaatctgaaacggaagtaggatttgtgtgtgttcgagaagagtccttgggaatgagcgagtttgttcagtaatttcgtagtacttgtcaactttgaacttaatttgaagagacatgcattgactctataaaaaaaattctacttttgcattcatgactactcttattccatgaatgttttaacattccatgaaacagtactttagtaagaatctttggtaacctatcataataaagatccttcttg

SEQ ID NO: 77093 - protein, 240 aa, Arabidopsis thaliana
  peptide (1)..(240): Ceres Seq. ID no. 12561467
  misc_feature (21)..(192): Pfam Name: YABBY protein Pfam Description: YABBY protein
  misc_feature (1)..(240): Homolog of NCBI NO: 8778574 NR Description: F28C11.6 [Arabidopsis thaliana]
  misc_feature (10)..(240): Homolog of NCBI NO: 18395240 NR Description: F28C11.5; protein id: At1g23420.1, supported by gi_6684815 [Arabidopsis thaliana]
  misc_feature (21)..(189): Homolog of NCBI NO: 27804377 NR Description: MADS-box transcription factor CDM51
  misc_feature (116)..(189): Homolog of NCBI NO: 37551421 NR Description: FIL-like protein [Triticum aestivum]
  misc_feature (29)..(77): Homolog of NCBI NO: 37551421 NR Description: FIL-like protein [Triticum aestivum]
  misc_feature (9)..(189): Homolog of NCBI NO: 18406725 NR Description: expressed protein; protein id: At2g45190.1, by cDNA: gi_3822215, supported by cDNA: gi_4322476, supported by gi_4928748 [Arabidopsis thaliana] >gi|11357292|pir||T51587
  misc_feature (29)..(189): Homolog of NCBI NO: 4928751 NR Description: YABBY2 [Arabidopsis thaliana]
  misc_feature (27)..(189): Homolog of NCBI NO: 11280864 NR Description: hypothetical protein 2 [imported] - rice
  misc_feature (136)..(189): Homolog of NCBI NO: 37535908 NR Description: hypothetical protein [Oryza sativa (japonica group)] >gi|22267600|gb|AAM94935.1| putative transcription factor
  misc_feature (29)..(77): Homolog of NCBI NO: 37535908 NR Description: hypothetical protein [Oryza sativa (japonica group)] >gi|22267600|gb|AAM94935.1| putative transcription factor
IIHRTHTLSMTKLPNMTTTLNHLFDLPGQICHVQCGFCTTILLVSVPFTSLSMVVTVRCGHCTSLLSVNLMKASFIPLHLLASLSHLDETGKEEVAATDGVEEEAWKVNQEKENSPTTLVSSSDNEDEDVSRVYQVVNKPPEKRQRAPSAYNCFIKEEIRRLKAQNPSMAHKEAFSLAAKNWAHFPPAHNKRAASDQCFCEEDNNAILPCNVFEDHEESNNGFRERKAQRHSIWGKSPFE

SEQ ID NO: 77094 - protein, 231 aa, Arabidopsis thaliana
  peptide (1)..(231): Ceres Seq. ID no. 12561468
  misc_feature (12)..(183): Pfam Name: YABBY protein Pfam Description: YABBY protein
  misc_feature (1)..(231): Homolog of NCBI NO: 8778574 NR Description: F28C11.6 [Arabidopsis thaliana]
  misc_feature (1)..(231): Homolog of NCBI NO: 18395240 NR Description: F28C11.5; protein id: At1g23420.1, supported by gi_6684815 [Arabidopsis thaliana]
  misc_feature (12)..(180): Homolog of NCBI NO: 27804377 NR Description: MADS-box transcription factor CDM51
  misc_feature (107)..(180): Homolog of NCBI NO: 37551421 NR Description: FIL-like protein [Triticum aestivum]
  misc_feature (20)..(68): Homolog of NCBI NO: 37551421 NR Description: FIL-like protein [Triticum aestivum]
  misc_feature (1)..(180): Homolog of NCBI NO: 18406725 NR Description: expressed protein; protein id: At2g45190.1, by cDNA: gi_3822215, supported by cDNA: gi_4322476, supported by gi_4928748 [Arabidopsis thaliana] >gi|11357292|pir||T51587
  misc_feature (20)..(180): Homolog of NCBI NO: 4928751 NR Description: YABBY2 [Arabidopsis thaliana]
  misc_feature (18)..(180): Homolog of NCBI NO: 11280864 NR Description: hypothetical protein 2 [imported] - rice
  misc_feature (127)..(180): Homolog of NCBI NO: 37535908 NR Description: hypothetical protein [Oryza sativa (japonica group)] >gi|22267600|gb|AAM94935.1| putative transcription factor
  misc_feature (20)..(68): Homolog of NCBI NO: 37535908 NR Description: hypothetical protein [Oryza sativa (japonica group)] >gi|22267600|gb|AAM94935.1| putative transcription factor
MTKLPNMTTTLNHLFDLPGQICHVQCGFCTTILLVSVPFTSLSMVVTVRCGHCTSLLSVNLMKASFIPLHLLASLSHLDETGKEEVAATDGVEEEAWKVNQEKENSPTTLVSSSDNEDEDVSRVYQVVNKPPEKRQRAPSAYNCFIKEEIRRLKAQNPSMAHKEAFSLAAKNWAHFPPAHNKRAASDQCFCEEDNNAILPCNVFEDHEESNNGFRERKAQRHSIWGKSPFE

SEQ ID NO: 77095 - protein, 225 aa, Arabidopsis thaliana
  peptide (1)..(225): Ceres Seq. ID no. 12561469
  misc_feature (6)..(177): Pfam Name: YABBY protein Pfam Description: YABBY protein
  misc_feature (1)..(225): Homolog of NCBI NO: 8778574 NR Description: F28C11.6 [Arabidopsis thaliana]
  misc_feature (1)..(225): Homolog of NCBI NO: 18395240 NR Description: F28C11.5; protein id: At1g23420.1, supported by gi_6684815 [Arabidopsis thaliana]
  misc_feature (6)..(174): Homolog of NCBI NO: 27804377 NR Description: MADS-box transcription factor CDM51
  misc_feature (101)..(174): Homolog of NCBI NO: 37551421 NR Description: FIL-like protein [Triticum aestivum]
  misc_feature (14)..(62): Homolog of NCBI NO: 37551421 NR Description: FIL-like protein [Triticum aestivum]
  misc_feature (1)..(174): Homolog of NCBI NO: 18406725 NR Description: expressed protein; protein id: At2g45190.1, by cDNA: gi_3822215, supported by cDNA: gi_4322476, supported by gi_4928748 [Arabidopsis thaliana] >gi|11357292|pir||T51587
  misc_feature (14)..(174): Homolog of NCBI NO: 4928751 NR Description: YABBY2 [Arabidopsis thaliana]
  misc_feature (12)..(174): Homolog of NCBI NO: 11280864 NR Description: hypothetical protein 2 [imported] - rice
  misc_feature (121)..(174): Homolog of NCBI NO: 37535908 NR Description: hypothetical protein [Oryza sativa (japonica group)] >gi|22267600|gb|AAM94935.1| putative transcription factor
  misc_feature (14)..(62): Homolog of NCBI NO: 37535908 NR Description: hypothetical protein [Oryza sativa (japonica group)] >gi|22267600|gb|AAM94935.1| putative transcription factor
MTTTLNHLFDLPGQICHVQCGFCTTILLVSVPFTSLSMVVTVRCGHCTSLLSVNLMKASFIPLHLLASLSHLDETGKEEVAATDGVEEEAWKVNQEKENSPTTLVSSSDNEDEDVSRVYQVVNKPPEKRQRAPSAYNCFIKEEIRRLKAQNPSMAHKEAFSLAAKNWAHFPPAHNKRAASDQCFCEEDNNAILPCNVFEDHEESNNGFRERKAQRHSIWGKSPFE

SEQ ID NO: 77096 - DNA, 808 bp, Arabidopsis thaliana
  misc_feature (1)..(808): Ceres Seq. ID no. 12561481
  misc_feature: MA Experiment ID: 108434 Result: Up-regulated in Transcription
  misc_feature: MA Experiment 108434 PARAMETER Experiment Name: At_Root_Tips_cDNA_P Parameter: Tissue Value: Root Tips
  misc_feature: MA Experiment ID: 108462 Result: Down-regulated in Transcription
  misc_feature: MA Experiment 108462 PARAMETER Experiment Name: At_Germinating_Seeds_cDNA_P Parameter: Age (day) Value: 2 vs. 0
  misc_feature: MA Experiment 108462 PARAMETER Experiment Name: At_Germinating_Seeds_cDNA_P Parameter: Tissue Value: Germinating Seeds
  misc_feature: MA Experiment ID: 108463 Result: Down-regulated in Transcription
  misc_feature: MA Experiment 108463 PARAMETER Experiment Name: At_Germinating_Seeds_cDNA_P Parameter: Age (day) Value: 3 vs. 0
  misc_feature: MA Experiment 108463 PARAMETER Experiment Name: At_Germinating_Seeds_cDNA_P Parameter: Tissue Value: Germinating Seeds
  misc_feature: MA Experiment ID: 108573 Result: Down-regulated in Transcription
  misc_feature: MA Experiment 108573 PARAMETER Experiment Name: At_Drought_cDNA_P Parameter: Timepoint (hr) Value: 6
  misc_feature: MA Experiment 108573 PARAMETER Experiment Name: At_Drought_cDNA_P Parameter: Tissue Value: Aerial
  misc_feature: MA Experiment 108573 PARAMETER Experiment Name: At_Drought_cDNA_P Parameter: Treatment Value: Drought vs. No Drought
  misc_feature: MA Experiment ID: 20000090 Result: Up-regulated in Transcription
gccgtcgagaaatctccctctagggtttctttgatcaaaccagagagccgtcagggagagcaaaacaaagatcggagaagatgaagacgattctttcttccgaaacgatggacatccccgacagtgttaccatcaaggttcacgctaaagtgatcgaagtcgaaggacctcgcgggaagcttgttcgcgatttcaagcatctcaacctcgatttccagctgatcaaggatccagagactggaaagaagaagcttaagatcgattcgtggtttggaacacgcaaaaccagcgcctccatcagaaccgctcttagccacgtcgataacttgatctccggtgttaccagaggtttccgttacaagatgaggttcgtgtacgcccattttcccatcaacgcctccatcggcggtgacggaaagtctatcgagatccgtaacttccttggcgagaagaaggtgaggaaggtagagatgttggatggtgtaaccattgttcgatctgagaaggtgaaggatgagattgttcttgacggtaacgatatcgagcttgtttcaaggtcgtgcgctctgatcaaccagaaatgtcacgtgaagaagaaggatatcaggaagttccttgacggtatctatgttagcgagaaaagcaagatcgtagaggaagaatgaatactcatattcccctcttagctcatatttcttgtgtttggaatgttgttagttttgttttatggaccaaatccaccggtgatgtaaaccttgccttttttttgttcgagaatttattaacttatgcaacaagttttggagac

SEQ ID NO: 77097 - protein, 194 aa, Arabidopsis thaliana; identical to SEQ ID NO: 36206
  peptide (1)..(194): Ceres Seq. ID no. 12561482
  misc_feature (102)..(181): Pfam Name: Ribosomal protein L6 Pfam Description: Ribosomal protein L6
  misc_feature (1)..(194): Homolog of NCBI NO: 18398753 NR Description: ribosomal protein L9, putative; protein id: supported by cDNA: gi_11908051, supported by cDNA: gi_12642867, by cDNA: gi_13265485, supported by cDNA: gi_18253022 26744.,
  misc_feature (1)..(194): Homolog of NCBI NO: 21554945 NR Description: ribosomal protein L9, putative [Arabidopsis
  misc_feature (1)..(194): Homolog of NCBI NO: 2129720 NR Description: ribosomal protein L9, cytosolic - Arabidopsis >gi|1107489|emb|CAA63024.1| 60S ribosomal protein L9 [Arabidopsis
  misc_feature (1)..(194): Homolog of NCBI NO: 15235114 NR Description: putative ribosomal protein L9, cytosolic; protein At4g10450.1, supported by cDNA: 21228., supported by cDNA: [Arabidopsis thaliana] >gi|7440701|pir||T04180 ribosomal protein
  misc_feature (1)..(194): Homolog of NCBI NO: 266945 NR Description: 60S ribosomal protein L9 (Gibberellin-regulated
  misc_feature (1)..(194): Homolog of NCBI NO: 6015604 NR Description: ribosomal protein L9 [Pisum sativum]
  misc_feature (1)..(193): Homolog of NCBI NO: 33087067 NR Description: ribosomal L9-like protein [Oryza sativa (japonica
  misc_feature (1)..(193): Homolog of NCBI NO: 6174959 NR Description: 60S RIBOSOMAL PROTEIN L9 >gi|7440702|pir||T03761
  misc_feature (33)..(166): Homolog of NCBI NO: 12322579 NR Description: ribosomal protein L9, 5' partial [Arabidopsis
  misc_feature (1)..(194): Homolog of NCBI NO: 37779100 NR Description: ribosomal protein L9 [Pagrus major]

SEQ ID NO: 77098 - protein, 185 aa, Arabidopsis thaliana; identical to SEQ ID NO: 36207
  peptide (1)..(185): Ceres Seq. ID no. 12561483
  misc_feature (93)..(172): Pfam Name: Ribosomal protein L6 Pfam Description: Ribosomal protein L6
  misc_feature (1)..(185): Homolog of NCBI NO: 18398753 NR Description: ribosomal protein L9, putative; protein id: supported by cDNA: gi_11908051, supported by cDNA: gi_12642867, by cDNA: gi_13265485, supported by cDNA: gi_18253022 26744.,
  misc_feature (1)..(185): Homolog of NCBI NO: 21554945 NR Description: ribosomal protein L9, putative [Arabidopsis
  misc_feature (1)..(185): Homolog of NCBI NO: 2129720 NR Description: ribosomal protein L9, cytosolic - Arabidopsis >gi|1107489|emb|CAA63024.1| 60S ribosomal protein L9 [Arabidopsis
  misc_feature (1)..(185): Homolog of NCBI NO: 15235114 NR Description: putative ribosomal protein L9, cytosolic; protein At4g10450.1, supported by cDNA: 21228., supported by cDNA: [Arabidopsis thaliana] >gi|7440701|pir||T04180 ribosomal protein
  misc_feature (1)..(185): Homolog of NCBI NO: 266945 NR Description: 60S ribosomal protein L9 (Gibberellin-regulated
  misc_feature (1)..(185): Homolog of NCBI NO: 6015604 NR Description: ribosomal protein L9 [Pisum sativum]
  misc_feature (1)..(184): Homolog of NCBI NO: 33087067 NR Description: ribosomal L9-like protein [Oryza sativa (japonica
  misc_feature (1)..(184): Homolog of NCBI NO: 6174959 NR Description: 60S RIBOSOMAL PROTEIN L9 >gi|7440702|pir||T03761
  misc_feature (24)..(157): Homolog of NCBI NO: 12322579 NR Description: ribosomal protein L9, 5' partial [Arabidopsis
  misc_feature (1)..(185): Homolog of NCBI NO: 37779100 NR Description: ribosomal protein L9 [Pagrus major]

SEQ ID NO: 77099 - protein, 100 aa, Arabidopsis thaliana; identical to SEQ ID NO: 36208
  peptide (1)..(100): Ceres Seq. ID no. 12561484
  misc_feature (8)..(87): Pfam Name: Ribosomal protein L6 Pfam Description: Ribosomal protein L6
  misc_feature (1)..(100): Homolog of NCBI NO: 18398753 NR Description: ribosomal protein L9, putative; protein id: supported by cDNA: gi_11908051, supported by cDNA: gi_12642867, by cDNA: gi_13265485, supported by cDNA: gi_18253022 26744.,
  misc_feature (1)..(100): Homolog of NCBI NO: 21554945 NR Description: ribosomal protein L9, putative [Arabidopsis
  misc_feature (1)..(100): Homolog of NCBI NO: 2129720 NR Description: ribosomal protein L9, cytosolic - Arabidopsis >gi|1107489|emb|CAA63024.1| 60S ribosomal protein L9 [Arabidopsis
  misc_feature (1)..(100): Homolog of NCBI NO: 15235114 NR Description: putative ribosomal protein L9, cytosolic; protein At4g10450.1, supported by cDNA: 21228., supported by cDNA: [Arabidopsis thaliana] >gi|7440701|pir||T04180 ribosomal protein
  misc_feature (1)..(100): Homolog of NCBI NO: 266945 NR Description: 60S ribosomal protein L9 (Gibberellin-regulated
  misc_feature (1)..(100): Homolog of NCBI NO: 6015604 NR Description: ribosomal protein L9 [Pisum sativum]
  misc_feature (1)..(99): Homolog of NCBI NO: 33087067 NR Description: ribosomal L9-like protein [Oryza sativa (japonica
  misc_feature (1)..(99): Homolog of NCBI NO: 6174959 NR Description: 60S RIBOSOMAL PROTEIN L9 >gi|7440702|pir||T03761
  misc_feature (1)..(72): Homolog of NCBI NO: 12322579 NR Description: ribosomal protein L9, 5' partial [Arabidopsis
  misc_feature (1)..(100): Homolog of NCBI NO: 37779100 NR Description: ribosomal protein L9 [Pagrus major]

SEQ ID NO: 77100 - DNA, 542 bp, Arabidopsis thaliana
  misc_feature (1)..(542): Ceres Seq. ID no. 12561489
  misc_feature: MA Experiment ID: 108434 Result: Down-regulated in Transcription
  misc_feature: MA Experiment 108434 PARAMETER Experiment Name: At_Root_Tips_cDNA_P Parameter: Tissue Value: Root Tips
  misc_feature: MA Experiment ID: 108435 Result: Up-regulated in Transcription
  misc_feature: MA Experiment 108435 PARAMETER Experiment Name: At_stm_Mutants_cDNA_P Parameter: Plant Line Value: wt Landsburg vs stm
  misc_feature: MA Experiment 108435 PARAMETER Experiment Name: At_stm_Mutants_cDNA_P Parameter: Tissue Value: Shoot Apical Meristem Region
  misc_feature: MA Experiment ID: 108461 Result: Down-regulated in Transcription
  misc_feature: MA Experiment 108461 PARAMETER Experiment Name: At_Germinating_Seeds_cDNA_P Parameter: Age (day) Value: 1 vs. 0
  misc_feature: MA Experiment 108461 PARAMETER Experiment Name: At_Germinating_Seeds_cDNA_P Parameter: Tissue Value: Germinating Seeds
  misc_feature: MA Experiment ID: 108473 Result: Up-regulated in Transcription
  misc_feature: MA Experiment 108473 PARAMETER Experiment Name: At_Drought_Flowers_cDNA_P Parameter: Timepoint (hr) Value: 7 d
  misc_feature: MA Experiment 108473 PARAMETER Experiment Name: At_Drought_Flowers_cDNA_P Parameter: Tissue Value: Flower
  misc_feature: MA Experiment 108473 PARAMETER Experiment Name: At_Drought_Flowers_cDNA_P Parameter: Treatment Value: Drought vs. No Drought
  misc_feature: MA Experiment ID: 108561 Result: Up-regulated in Transcription
  misc_feature: MA Experiment 108561 PARAMETER Experiment Name: At_100uM_ABA_cDNA_P Parameter: Timepoint (hr) Value: 6
  misc_feature: MA Experiment 108561 PARAMETER Experiment Name: At_100uM_ABA_cDNA_P Parameter: Tissue Value: Aerial
  misc_feature: MA Experiment 108561 PARAMETER Experiment Name: At_100uM_ABA_cDNA_P Parameter: Treatment Value: 100uM ABA vs. No Treatment
  misc_feature: MA Experiment ID: 108573 Result: Up-regulated in Transcription
  misc_feature: MA Experiment 108573 PARAMETER Experiment Name: At_Drought_cDNA_P Parameter: Timepoint (hr) Value: 6
  misc_feature: MA Experiment 108573 PARAMETER Experiment Name: At_Drought_cDNA_P Parameter: Tissue Value: Aerial
  misc_feature: MA Experiment 108573 PARAMETER Experiment Name: At_Drought_cDNA_P Parameter: Treatment Value: Drought vs. No Drought
  misc_feature: MA Experiment ID: 108594 Result: Down-regulated in Transcription
  misc_feature: MA Experiment 108594 PARAMETER Experiment Name: At_Ler-rhl_Root_cDNA_P Parameter: Plant Line Value: null
  misc_feature: MA Experiment ID: 108595 Result: Up-regulated in Transcription
  misc_feature: MA Experiment 108595 PARAMETER Experiment Name: At_Ler-pi_Ovule_cDNA_P Parameter: Plant Line Value: null
  misc_feature: MA Experiment ID: 108605 Result: Up-regulated in Transcription
  misc_feature: MA Experiment 108605 PARAMETER Experiment Name: At_100uM_ABA_cDNA_P Parameter: Timepoint (hr) Value: 6
  misc_feature: MA Experiment 108605 PARAMETER Experiment Name: At_100uM_ABA_cDNA_P Parameter: Tissue Value: Aerial
  misc_feature: MA Experiment 108605 PARAMETER Experiment Name: At_100uM_ABA_cDNA_P Parameter: Treatment Value: 100uM ABA vs. No Treatment
  misc_feature: MA Experiment ID: 108607 Result: Up-regulated in Transcription
  misc_feature: MA Experiment 108607 PARAMETER Experiment Name: At_100uM_ABA_cDNA_P Parameter: Timepoint (hr) Value: 4
  misc_feature: MA Experiment 108607 PARAMETER Experiment Name: At_100uM_ABA_cDNA_P Parameter: Tissue Value: Aerial
  misc_feature: MA Experiment 108607 PARAMETER Experiment Name: At_100uM_ABA_cDNA_P Parameter: Treatment Value: 100uM ABA vs. No Treatment
  misc_feature: MA Experiment ID: 108609 Result: Up-regulated in Transcription
  misc_feature: MA Experiment 108609 PARAMETER Experiment Name: At_100uM_ABA_cDNA_P Parameter: Timepoint (hr) Value: 24
  misc_feature: MA Experiment 108609 PARAMETER Experiment Name: At_100uM_ABA_cDNA_P Parameter: Tissue Value: Aerial
  misc_feature: MA Experiment 108609 PARAMETER Experiment Name: At_100uM_ABA_cDNA_P Parameter: Treatment Value: 100uM ABA vs. No Treatment
  misc_feature: MA Experiment ID: 20000069 Result: Up-regulated in Transcription
  misc_feature: MA Experiment 20000069 PARAMETER Experiment Name: At_100uM_ABA_Mutants_cDNA_P Parameter: Plant Line Value: CS23
  misc_feature: MA Experiment 20000069 PARAMETER Experiment Name: At_100uM_ABA_Mutants_cDNA_P Parameter: Timepoint (hr) Value: 6
  misc_feature: MA Experiment 20000069 PARAMETER Experiment Name: At_100uM_ABA_Mutants_cDNA_P Parameter: Tissue Value: Aerial
  misc_feature: MA Experiment 20000069 PARAMETER Experiment Name: At_100uM_ABA_Mutants_cDNA_P Parameter: Treatment Value: 100uM ABA vs. No Treatment
  misc_feature: MA Experiment ID: 20000071 Result: Up-regulated in Transcription
  misc_feature: MA Experiment 20000071 PARAMETER Experiment Name: At_100uM_ABA_Mutants_cDNA_P Parameter: Plant Line Value: CS8104
  misc_feature: MA Experiment 20000071 PARAMETER Experiment Name: At_100uM_ABA_Mutants_cDNA_P Parameter: Timepoint (hr) Value: 6
  misc_feature: MA Experiment 20000071 PARAMETER Experiment Name: At_100uM_ABA_Mutants_cDNA_P Parameter: Tissue Value: Aerial
  misc_feature: MA Experiment 20000071 PARAMETER Experiment Name: At_100uM_ABA_Mutants_cDNA_P Parameter: Treatment Value: 100uM ABA vs. No Treatment
  misc_feature: MA Experiment ID: 20000087 Result: Up-regulated in Transcription
  misc_feature: MA Experiment 20000087 PARAMETER Experiment Name: At_100uM_ABA_Mutants_cDNA_P Parameter: Plant Line Value: WS
  misc_feature: MA Experiment 20000087 PARAMETER Experiment Name: At_100uM_ABA_Mutants_cDNA_P Parameter: Timepoint (hr) Value: 6
  misc_feature: MA Experiment 20000087 PARAMETER Experiment Name: At_100uM_ABA_Mutants_cDNA_P Parameter: Tissue Value: Aerial
  misc_feature: MA Experiment 20000087 PARAMETER Experiment Name: At_100uM_ABA_Mutants_cDNA_P Parameter: Treatment Value: 100uM ABA vs. No Treatment
  misc_feature: MA Experiment ID: 20000090 Result: Down-regulated in Transcription
  misc_feature: MA Experiment ID: 20000111 Result: Up-regulated in Transcription
  misc_feature: MA Experiment 20000111 PARAMETER Experiment Name: At_42deg_Heat_cDNA_P Parameter: Temperature (deg C) Value: 42 vs. 22
  misc_feature: MA Experiment 20000111 PARAMETER Experiment Name: At_42deg_Heat_cDNA_P Parameter: Timepoint (hr) Value: 6
  misc_feature: MA Experiment 20000111 PARAMETER Experiment Name: At_42deg_Heat_cDNA_P Parameter: Tissue Value: Aerial
  misc_feature: MA Experiment ID: 20000117 Result: Up-regulated in Transcription
  misc_feature: MA Experiment 20000117 PARAMETER Experiment Name: At_100uM_ABA_Mutants_cDNA_P Parameter: Plant Line Value: Columbia
  misc_feature: MA Experiment 20000117 PARAMETER Experiment Name: At_100uM_ABA_Mutants_cDNA_P Parameter: Timepoint (hr) Value: 6
  misc_feature: MA Experiment 20000117 PARAMETER Experiment Name: At_100uM_ABA_Mutants_cDNA_P Parameter: Tissue Value: Aerial
  misc_feature: MA Experiment 20000117 PARAMETER Experiment Name: At_100uM_ABA_Mutants_cDNA_P Parameter: Treatment Value: 100uM ABA vs. No Treatment
  misc_feature: MA Experiment ID: 20000169 Result: Up-regulated in Transcription
  misc_feature: MA Experiment 20000169 PARAMETER Experiment Name: At_100uM_ABA_P Parameter: Age (day) Value: 14
  misc_feature: MA Experiment 20000169 PARAMETER Experiment Name: At_100uM_ABA_P Parameter: Organism Value: A. thaliana
  misc_feature: MA Experiment 20000169 PARAMETER Experiment Name: At_100uM_ABA_P Parameter: Plant Line Value: WS
  misc_feature: MA Experiment 20000169 PARAMETER Experiment Name: At_100uM_ABA_P Parameter: Timepoint (hr) Value: 6
  misc_feature: MA Experiment 20000169 PARAMETER Experiment Name: At_100uM_ABA_P Parameter: Tissue Value: Aerial
  misc_feature: MA Experiment 20000169 PARAMETER Experiment Name: At_100uM_ABA_P Parameter: Treatment Value: 100uM ABA vs. No Treatment
  misc_feature: MA Experiment ID: 20000179 Result: Down-regulated in Transcription
  misc_feature: MA Experiment 20000179 PARAMETER Experiment Name: At_Germinating_Seeds_P Parameter: Age (hr) Value: 6 vs. 0
  misc_feature: MA Experiment 20000179 PARAMETER Experiment Name: At_Germinating_Seeds_P Parameter: Tissue Value: Germinating Seeds
  misc_feature: MA Experiment ID: 20000180 Result: Down-regulated in Transcription
  misc_feature: MA Experiment 20000180 PARAMETER Experiment Name: At_Germinating_Seeds_P Parameter: Age (hr) Value: 24 vs. 0
  misc_feature: MA Experiment 20000180 PARAMETER Experiment Name: At_Germinating_Seeds_P Parameter: Tissue Value: Germinating Seeds
  misc_feature: MA Experiment ID: 20000227 Result: Down-regulated in Transcription
  misc_feature: MA Experiment 20000227 PARAMETER Experiment Name: At_Root-Tips-vs-Tops_P Parameter: Tissue Value: Root Tips vs. Root Tops
  misc_feature: MA Experiment ID: 20000234 Result: Up-regulated in Transcription
  misc_feature: MA Experiment 20000234 PARAMETER Experiment Name: At_Siliques_P Parameter: Age (day) Value: 21
  misc_feature: MA Experiment 20000234 PARAMETER Experiment Name: At_Siliques_P Parameter: Organism Value: A. thaliana
  misc_feature: MA Experiment 20000234 PARAMETER Experiment Name: At_Siliques_P Parameter: Plant Line Value: WS
  misc_feature: MA Experiment 20000234 PARAMETER Experiment Name: At_Siliques_P Parameter: Tissue Value: Less Than 5mm Siliques vs. Whole Plant
  misc_feature: MA Experiment ID: 20000264 Result: Up-regulated in Transcription
  misc_feature: MA Experiment 20000264 PARAMETER Experiment Name: At_Open_Flower_P Parameter: Age (day) Value: 21
  misc_feature: MA Experiment 20000264 PARAMETER Experiment Name: At_Open_Flower_P Parameter: Plant Line Value: WS
  misc_feature: MA Experiment 20000264 PARAMETER Experiment Name: At_Open_Flower_P Parameter: Tissue Value: Open Flower vs. Whole Plant
  misc_feature: MA Experiment ID: 20000265 Result: Up-regulated in Transcription
  misc_feature: MA Experiment 20000265 PARAMETER Experiment Name: At_Open_Flower_P Parameter: Age (day) Value: 21
  misc_feature: MA Experiment 20000265 PARAMETER Experiment Name: At_Open_Flower_P Parameter: Plant Line Value: WS
  misc_feature: MA Experiment 20000265 PARAMETER Experiment Name: At_Open_Flower_P Parameter: Tissue Value: Closed Flower vs. Whole Plant
  misc_feature: MA Experiment ID: 20000269 Result: Down-regulated in Transcription
  misc_feature: MA Experiment 20000269 PARAMETER Experiment Name: At_1mM_KNO3_L-vs-H_Roots_P Parameter: Age (day) Value: 7,10,12
  misc_feature: MA Experiment 20000269 PARAMETER Experiment Name: At_1mM_KNO3_L-vs-H_Roots_P Parameter: Organism Value: A. thaliana
  misc_feature: MA Experiment 20000269 PARAMETER Experiment Name: At_1mM_KNO3_L-vs-H_Roots_P Parameter: Plant Line Value: WS
  misc_feature: MA Experiment 20000269 PARAMETER Experiment Name: At_1mM_KNO3_L-vs-H_Roots_P Parameter: Timepoint (day) Value: 7,10,12
  misc_feature: MA Experiment 20000269 PARAMETER Experiment Name: At_1mM_KNO3_L-vs-H_Roots_P Parameter: Tissue Value: Roots
  misc_feature: MA Experiment 20000269 PARAMETER Experiment Name: At_1mM_KNO3_L-vs-H_Roots_P Parameter: Treatment Value: 1mM KNO3 vs. 50mM KNO3
  misc_feature: MA Experiment ID: 20000286 Result: Up-regulated in Transcription
  misc_feature: MA Experiment 20000286 PARAMETER Experiment Name: At_Open_Flower_P Parameter: Age (day) Value: 21
  misc_feature: MA Experiment 20000286 PARAMETER Experiment Name: At_Open_Flower_P Parameter: Plant Line Value: WS
  misc_feature: MA Experiment 20000286 PARAMETER Experiment Name: At_Open_Flower_P Parameter: Tissue Value: Half Open vs. Whole Plant
  misc_feature: MA Experiment ID: 20000436 Result: Up-regulated in Transcription
  misc_feature: MA Experiment 20000436 PARAMETER Experiment Name: At_Drought_P Parameter: Age (day) Value: 7
  misc_feature: MA Experiment 20000436 PARAMETER Experiment Name: At_Drought_P Parameter: Organism Value: A. thaliana
  misc_feature: MA Experiment 20000436 PARAMETER Experiment Name: At_Drought_P Parameter: Plant Line Value: WS
  misc_feature: MA Experiment 20000436 PARAMETER Experiment Name: At_Drought_P Parameter: Timepoint (hr) Value: 12
  misc_feature: MA Experiment 20000436 PARAMETER Experiment Name: At_Drought_P Parameter: Tissue Value: Whole Plant
  misc_feature: MA Experiment 20000436 PARAMETER Experiment Name: At_Drought_P Parameter: Treatment Value: Drought vs. No Drought
  misc_feature: MA Experiment ID: 20000438 Result: Down-regulated in Transcription
  misc_feature: MA Experiment 20000438 PARAMETER Experiment Name: At_Shoots__P Parameter: Age (day) Value: 14
  misc_feature: MA Experiment 20000438 PARAMETER Experiment Name: At_Shoots__P Parameter: Tissue Value: Shoots vs. Whole Plant
  misc_feature: MA Experiment ID: 20000453 Result: Up-regulated in Transcription
  misc_feature: MA Experiment 20000453 PARAMETER Experiment Name: At_100uM_ABA_P Parameter: Age (day) Value: 15
  misc_feature: MA Experiment 20000453 PARAMETER Experiment Name: At_100uM_ABA_P Parameter: Organism Value: A. thaliana
  misc_feature: MA Experiment 20000453 PARAMETER Experiment Name: At_100uM_ABA_P Parameter: Plant Line Value: WS
  misc_feature: MA Experiment 20000453 PARAMETER Experiment Name: At_100uM_ABA_P Parameter: Timepoint (hr) Value: 24
  misc_feature: MA Experiment 20000453 PARAMETER Experiment Name: At_100uM_ABA_P Parameter: Tissue Value: Aerial
  misc_feature: MA Experiment 20000453 PARAMETER Experiment Name: At_100uM_ABA_P Parameter: Treatment Value: 100uM ABA vs. No Treatment
  misc_feature: MA Experiment ID: 20000455 Result: Up-regulated in Transcription
  misc_feature: MA Experiment 20000455 PARAMETER Experiment Name: At_100uM_ABA_P Parameter: Age (day) Value: 16
  misc_feature: MA Experiment 20000455 PARAMETER Experiment Name: At_100uM_ABA_P Parameter: Organism Value: A. thaliana
  misc_feature: MA Experiment 20000455 PARAMETER Experiment Name: At_100uM_ABA_P Parameter: Plant Line Value: WS
  misc_feature: MA Experiment 20000455 PARAMETER Experiment Name: At_100uM_ABA_P Parameter: Timepoint (hr) Value: 48
  misc_feature: MA Experiment 20000455 PARAMETER Experiment Name: At_100uM_ABA_P Parameter: Tissue Value: Aerial
  misc_feature: MA Experiment 20000455 PARAMETER Experiment Name: At_100uM_ABA_P Parameter: Treatment Value: 100uM ABA vs. No Treatment
  misc_feature: MA Experiment ID: 20000794 Result: Up-regulated in Transcription
  misc_feature: MA Experiment 20000794 PARAMETER Experiment Name: At_Petals_P Parameter: Age (day) Value: 23-25 days
  misc_feature: MA Experiment 20000794 PARAMETER Experiment Name: At_Petals_P Parameter: Plant Line Value: WS
  misc_feature: MA Experiment 20000794 PARAMETER Experiment Name: At_Petals_P Parameter: Tissue Value: Petals vs. Whole plant
  misc_feature: MA Experiment ID: 20001248 Result: Down-regulated in Transcription
  misc_feature: MA Experiment 20001248 PARAMETER Experiment Name: At_Far-red-induction_P Parameter: Age (day) Value: 7
  misc_feature: MA Experiment 20001248 PARAMETER Experiment Name: At_Far-red-induction_P Parameter: Light Value: Far-red vs. White
  misc_feature: MA Experiment 20001248 PARAMETER Experiment Name: At_Far-red-induction_P Parameter: Organism Value: A. thaliana
  misc_feature: MA Experiment 20001248 PARAMETER Experiment Name: At_Far-red-induction_P Parameter: Plant Line Value: Columbia
  misc_feature: MA Experiment 20001248 PARAMETER Experiment Name: At_Far-red-induction_P Parameter: Timepoint (hr) Value: 4
  misc_feature: MA Experiment 20001248 PARAMETER Experiment Name: At_Far-red-induction_P Parameter: Tissue Value: Whole Plant
  misc_feature: MA Experiment ID: 20001554 Result: Up-regulated in Transcription
  misc_feature: MA Experiment 20001554 PARAMETER Experiment Name: At_Drought_Soil_Dry_P Parameter: Age (day) Value: 21
  misc_feature: MA Experiment 20001554 PARAMETER Experiment Name: At_Drought_Soil_Dry_P Parameter: Organism Value: A. thaliana
  misc_feature: MA Experiment 20001554 PARAMETER Experiment Name: At_Drought_Soil_Dry_P Parameter: Plant Line Value: WS
  misc_feature: MA Experiment 20001554 PARAMETER Experiment Name: At_Drought_Soil_Dry_P Parameter: Post Timepoint (hr) Value: None
  misc_feature: MA Experiment 20001554 PARAMETER Experiment Name: At_Drought_Soil_Dry_P Parameter: Post-Treatment Value: None
  misc_feature: MA Experiment 20001554 PARAMETER Experiment Name: At_Drought_Soil_Dry_P Parameter: Timepoint (day) Value: 7
  misc_feature: MA Experiment 20001554 PARAMETER Experiment Name: At_Drought_Soil_Dry_P Parameter: Treatment Value: Drought vs. No Drought
  misc_feature: MA Experiment ID: 20001555 Result: Up-regulated in Transcription
  misc_feature: MA Experiment 20001555 PARAMETER Experiment Name: At_Drought_Soil_Dry_P Parameter: Age (day) Value: 24
  misc_feature: MA Experiment 20001555 PARAMETER Experiment Name: At_Drought_Soil_Dry_P Parameter: Organism Value: A. thaliana
  misc_feature: MA Experiment 20001555 PARAMETER Experiment Name: At_Drought_Soil_Dry_P Parameter: Plant Line Value: WS
  misc_feature: MA Experiment 20001555 PARAMETER Experiment Name: At_Drought_Soil_Dry_P Parameter: Post Timepoint (hr) Value: None
  misc_feature: MA Experiment 20001555 PARAMETER Experiment Name: At_Drought_Soil_Dry_P Parameter: Post-Treatment Value: None
  misc_feature: MA Experiment 20001555 PARAMETER Experiment Name: At_Drought_Soil_Dry_P Parameter: Timepoint (day) Value: 10
  misc_feature: MA Experiment 20001555 PARAMETER Experiment Name: At_Drought_Soil_Dry_P Parameter: Treatment Value: Drought vs. No Drought
  misc_feature: MA Experiment ID: 20001556 Result: Up-regulated in Transcription
  misc_feature: MA Experiment 20001556 PARAMETER Experiment Name: At_Drought_Soil_Dry_P Parameter: Age (day) Value: 26
  misc_feature: MA Experiment 20001556 PARAMETER Experiment Name: At_Drought_Soil_Dry_P Parameter: Organism Value: A. thaliana
  misc_feature: MA Experiment 20001556 PARAMETER Experiment Name: At_Drought_Soil_Dry_P Parameter: Plant Line Value: WS
  misc_feature: MA Experiment 20001556 PARAMETER Experiment Name: At_Drought_Soil_Dry_P Parameter: Post Timepoint (hr) Value: None
  misc_feature: MA Experiment 20001556 PARAMETER Experiment Name: At_Drought_Soil_Dry_P Parameter: Post-Treatment Value: None
  misc_feature: MA Experiment 20001556 PARAMETER Experiment Name: At_Drought_Soil_Dry_P Parameter: Timepoint (day) Value: 12
  misc_feature: MA Experiment 20001556 PARAMETER Experiment Name: At_Drought_Soil_Dry_P Parameter: Treatment Value: Drought vs. No Drought
  misc_feature: MA Experiment ID: 20001559 Result: Up-regulated in Transcription
  misc_feature: MA Experiment 20001559 PARAMETER Experiment Name: At_Drought_Soil_Dry_P Parameter: Age (day) Value: 28
  misc_feature: MA Experiment 20001559 PARAMETER Experiment Name: At_Drought_Soil_Dry_P Parameter: Organism Value: A. thaliana
  misc_feature: MA Experiment 20001559 PARAMETER Experiment Name: At_Drought_Soil_Dry_P Parameter: Plant Line Value: WS
  misc_feature: MA Experiment 20001559 PARAMETER Experiment Name: At_Drought_Soil_Dry_P Parameter: Post Timepoint (hr) Value: 29
  misc_feature: MA Experiment 20001559 PARAMETER Experiment Name: At_Drought_Soil_Dry_P Parameter: Post-Treatment Value: Re-Water vs. No Drought
  misc_feature: MA Experiment 20001559 PARAMETER Experiment Name: At_Drought_Soil_Dry_P Parameter: Timepoint (day) Value: 14
  misc_feature: MA Experiment 20001559 PARAMETER Experiment Name: At_Drought_Soil_Dry_P Parameter: Treatment Value: Drought vs. No Drought
  misc_feature: MA Experiment ID: 20001757 Result: Up-regulated in Transcription
  misc_feature: MA Experiment 20001757 PARAMETER Experiment Name: At_50mM_NH4NO3_L-to-H_P Parameter: Timepoint (hr) Value: 6
  misc_feature: MA Experiment 20001757 PARAMETER Experiment Name: At_50mM_NH4NO3_L-to-H_P Parameter: Tissue Value: Leaf
  misc_feature: MA Experiment 20001757 PARAMETER Experiment Name: At_50mM_NH4NO3_L-to-H_P Parameter: Treatment Value: 50mM NH4NO3 vs 100mM Mannitol
  misc_feature: MA Experiment ID: 20001773 Result: Up-regulated in Transcription
  misc_feature: MA Experiment 20001773 PARAMETER Experiment Name: At_Far-red-enriched-adult_P Parameter: Age (day) Value: 30
  misc_feature: MA Experiment 20001773 PARAMETER Experiment Name: At_Far-red-enriched-adult_P Parameter: Light Value: Far-red enriched vs. White
  misc_feature: MA Experiment 20001773 PARAMETER Experiment Name: At_Far-red-enriched-adult_P Parameter: Organism Value: A. thaliana
  misc_feature: MA Experiment 20001773 PARAMETER Experiment Name: At_Far-red-enriched-adult_P Parameter: Plant Line Value: Columbia
  misc_feature: MA Experiment 20001773 PARAMETER Experiment Name: At_Far-red-enriched-adult_P Parameter: Timepoint (hr) Value: 48
  misc_feature: MA Experiment 20001773 PARAMETER Experiment Name: At_Far-red-enriched-adult_P Parameter: Tissue Value: Aerial
  misc_feature: MA Experiment ID: 20001774 Result: Up-regulated in Transcription
  misc_feature: MA Experiment 20001774 PARAMETER Experiment Name: At_Far-red-enriched-adult_P Parameter: Age (day) Value: 31
  misc_feature: MA Experiment 20001774 PARAMETER Experiment Name: At_Far-red-enriched-adult_P Parameter: Light Value: Far-red enriched vs. White
  misc_feature: MA Experiment 20001774 PARAMETER Experiment Name: At_Far-red-enriched-adult_P Parameter: Organism Value: A. thaliana
  misc_feature: MA Experiment 20001774 PARAMETER Experiment Name: At_Far-red-enriched-adult_P Parameter: Plant Line Value: Columbia
  misc_feature: MA Experiment 20001774 PARAMETER Experiment Name: At_Far-red-enriched-adult_P Parameter: Timepoint (hr) Value: 72
  misc_feature: MA Experiment 20001774 PARAMETER Experiment Name: At_Far-red-enriched-adult_P Parameter: Tissue Value: Aerial
actgaaaacagaacaaacacaaacacaaacagagaatcaacgaagaagaaaaatggtgaaggtgatgtgggtttccgttttagctctggcggcggcgattctccttttgacggtcccggtggcagaaggggtgacgtgctcgcctatgcagctggcttcatgtgcggcggcgatgacgtcatcgtcgccgccatcggaggcgtgttgcacaaagctgagagagcagcagccatgcctttgtgggtacatgaggaaccctaccctccgccaatacgttagctcccctaacgcaaggaaagtctccaacagttgcaagattccttccccaagctgttaaggaaatgttaatcatgattaattagtgacaagtttcgctgattatagtggttaatgctggtcttatcttcgtcactactatttagaataataaatgaagtgatgatgattgatgattgatgattgatgattatcatcatcatgcttgaatgttatgttttctatcttataaaatatgaaatatactttagaaatatgtttcgtcg

SEQ ID NO: 77101 - protein, 111 aa, Arabidopsis thaliana
  peptide (1)..(111): Ceres Seq. ID no. 12561490
  misc_feature (46)..(111): Pfam Name: Protease inhibitor/seed storage/LTP family Pfam Description: Protease inhibitor/seed storage/LTP family
  misc_feature (18)..(111): Homolog of NCBI NO: 18402345 NR Description: lipid transfer protein, putative; protein id: supported by cDNA: gi_15028044, supported by cDNA: gi_20258874 thaliana] >gi|15028045|gb|AAK76553.1| putative lipid putative
  misc_feature (18)..(111): Homolog of NCBI NO: 12597812 NR Description: lipid transfer protein, putative [Arabidopsis
  misc_feature (18)..(111): Homolog of NCBI NO: 15229614 NR Description: lipid transfer protein, putative; protein id: supported by cDNA: gi_14532557 [Arabidopsis thaliana] lipid transfer protein [Arabidopsis thaliana]
  misc_feature (30)..(111): Homolog of NCBI NO: 543565 NR Description: hypothetical 10.0K protein - Zinnia elegans TED4 [Zinnia elegans] >gi|641903|gb|AAB06586.1| putative
  misc_feature (30)..(111): Homolog of NCBI NO: 543650 NR Description: P48h-10 protein precursor - Zinnia elegans (cv.
  misc_feature (17)..(111): Homolog of NCBI NO: 3183088 NR Description: Probable nonspecific lipid-transfer protein AKCS9
  misc_feature (17)..(111): Homolog of NCBI NO: 7489428 NR Description: probable lipid transfer protein - barley
  misc_feature (25)..(111): Homolog of NCBI NO: 498036 NR Description: lipid transfer protein
  misc_feature (25)..(111): Homolog of NCBI NO: 24745959 NR Description: putative lipid transfer protein [Solanum
  misc_feature (44)..(111): Homolog of NCBI NO: 14423789 NR Description: NONSPECIFIC LIPID-TRANSFER PROTEIN 2 (LTP 2)
LKTEQTQTQTENQRRRKMVKVMWVSVLALAAAILLLTVPVAEGVTCSPMQLASCAAAMTSSSPPSEACCTKLREQQPCLCGYMRNPTLRQYVSSPNARKVSNSCKIPSPSC

SEQ ID NO: 77102 - protein, 94 aa, Arabidopsis thaliana; identical to SEQ ID NO: 37678
  peptide (1)..(94): Ceres Seq. ID no. 12561491
  misc_feature (29)..(94): Pfam Name: Protease inhibitor/seed storage/LTP family Pfam Description: Protease inhibitor/seed storage/LTP family
  misc_feature (1)..(94): Homolog of NCBI NO: 18402345 NR Description: lipid transfer protein, putative; protein id: supported by cDNA: gi_15028044, supported by cDNA: gi_20258874 thaliana] >gi|15028045|gb|AAK76553.1| putative lipid putative
  misc_feature (1)..(94): Homolog of NCBI NO: 12597812 NR Description: lipid transfer protein, putative [Arabidopsis
  misc_feature (1)..(94): Homolog of NCBI NO: 15229614 NR Description: lipid transfer protein, putative; protein id: supported by cDNA: gi_14532557 [Arabidopsis thaliana] lipid transfer protein [Arabidopsis thaliana]
  misc_feature (13)..(94): Homolog of NCBI NO: 543565 NR Description: hypothetical 10.0K protein - Zinnia elegans TED4 [Zinnia elegans] >gi|641903|gb|AAB06586.1| putative
  misc_feature (13)..(94): Homolog of NCBI NO: 543650 NR Description: P48h-10 protein precursor - Zinnia elegans (cv.
  misc_feature (1)..(94): Homolog of NCBI NO: 3183088 NR Description: Probable nonspecific lipid-transfer protein AKCS9
  misc_feature (1)..(94): Homolog of NCBI NO: 7489428 NR Description: probable lipid transfer protein - barley
  misc_feature (8)..(94): Homolog of NCBI NO: 498036 NR Description: lipid transfer protein
  misc_feature (8)..(94): Homolog of NCBI NO: 24745959 NR Description: putative lipid transfer protein [Solanum
  misc_feature (27)..(94): Homolog of NCBI NO: 14423789 NR Description: NONSPECIFIC LIPID-TRANSFER PROTEIN 2 (LTP 2)

SEQ ID NO: 77103 - protein, 92 aa, Arabidopsis thaliana
  peptide (1)..(92): Ceres Seq. ID no. 12561492
TENRTNTNTNRESTKKKNGEGDVGFRFSSGGGDSPFDGPGGRRGDVLAYAAGFMCGGDDVIVAAIGGVLHKAERAAAMPLWVHEEPYPPPIR

SEQ ID NO: 77104 - DNA, 1372 bp, Arabidopsis thaliana
  misc_feature (1)..(1372): Ceres Seq. ID no. 12561497
  misc_feature: MA Experiment ID: 108572 Result: Up-regulated in Transcription
  misc_feature: MA Experiment 108572 PARAMETER Experiment Name: At_Drought_cDNA_P Parameter: Timepoint (hr) Value: 1
  misc_feature: MA Experiment 108572 PARAMETER Experiment Name: At_Drought_cDNA_P Parameter: Tissue Value: Aerial
  misc_feature: MA Experiment 108572 PARAMETER Experiment Name: At_Drought_cDNA_P Parameter: Treatment Value: Drought vs. No Drought
  misc_feature: MA Experiment ID: 108573 Result: Up-regulated in Transcription
  misc_feature: MA Experiment 108573 PARAMETER Experiment Name: At_Drought_cDNA_P Parameter: Timepoint (hr) Value: 6
  misc_feature: MA Experiment 108573 PARAMETER Experiment Name: At_Drought_cDNA_P Parameter: Tissue Value: Aerial
  misc_feature: MA Experiment 108573 PARAMETER Experiment Name: At_Drought_cDNA_P Parameter: Treatment Value: Drought vs. No Drought
  misc_feature: MA Experiment ID: 108577 Result: Up-regulated in Transcription
  misc_feature: MA Experiment 108577 PARAMETER Experiment Name: At_42deg_Heat_cDNA_P Parameter: Temperature (deg C) Value: 42 vs. 22
  misc_feature: MA Experiment 108577 PARAMETER Experiment Name: At_42deg_Heat_cDNA_P Parameter: Timepoint (hr) Value: 6
  misc_feature: MA Experiment 108577 PARAMETER Experiment Name: At_42deg_Heat_cDNA_P Parameter: Tissue Value: Aerial
  misc_feature: MA Experiment ID: 20000069 Result: Up-regulated in Transcription
  misc_feature: MA Experiment 20000069 PARAMETER Experiment Name: At_100uM_ABA_Mutants_cDNA_P Parameter: Plant Line Value: CS23
  misc_feature: MA Experiment 20000069 PARAMETER Experiment Name: At_100uM_ABA_Mutants_cDNA_P Parameter: Timepoint (hr) Value: 6
  misc_feature: MA Experiment 20000069 PARAMETER Experiment Name: At_100uM_ABA_Mutants_cDNA_P Parameter: Tissue Value: Aerial
  misc_feature: MA Experiment 20000069 PARAMETER Experiment Name: At_100uM_ABA_Mutants_cDNA_P Parameter: Treatment Value: 100uM ABA vs. No Treatment
  misc_feature: MA Experiment ID: 20000070 Result: Up-regulated in Transcription
  misc_feature: MA Experiment 20000070 PARAMETER Experiment Name: At_100uM_ABA_Mutants_cDNA_P Parameter: Plant Line Value: CS24
  misc_feature: MA Experiment 20000070 PARAMETER Experiment Name: At_100uM_ABA_Mutants_cDNA_P Parameter: Timepoint (hr) Value: 6
  misc_feature: MA Experiment 20000070 PARAMETER Experiment Name: At_100uM_ABA_Mutants_cDNA_P Parameter: Tissue Value: Aerial
  misc_feature: MA Experiment 20000070 PARAMETER Experiment Name: At_100uM_ABA_Mutants_cDNA_P Parameter: Treatment Value: 100uM ABA vs. No Treatment
  misc_feature: MA Experiment ID: 20000071 Result: Up-regulated in Transcription
  misc_feature: MA Experiment 20000071 PARAMETER Experiment Name: At_100uM_ABA_Mutants_cDNA_P Parameter: Plant Line Value: CS8104
  misc_feature: MA Experiment 20000071 PARAMETER Experiment Name: At_100uM_ABA_Mutants_cDNA_P Parameter: Timepoint (hr) Value: 6
  misc_feature: MA Experiment 20000071 PARAMETER Experiment Name: At_100uM_ABA_Mutants_cDNA_P Parameter: Tissue Value: Aerial
  misc_feature: MA Experiment 20000071 PARAMETER Experiment Name: At_100uM_ABA_Mutants_cDNA_P Parameter: Treatment Value: 100uM ABA vs. No Treatment
  misc_feature: MA Experiment ID: 20000072 Result: Up-regulated in Transcription
  misc_feature: MA Experiment 20000072 PARAMETER Experiment Name: At_100uM_ABA_Mutants_cDNA_P Parameter: Plant Line Value: CS8105
  misc_feature: MA Experiment 20000072 PARAMETER Experiment Name: At_100uM_ABA_Mutants_cDNA_P Parameter: Timepoint (hr) Value: 6
  misc_feature: MA Experiment 20000072 PARAMETER Experiment Name: At_100uM_ABA_Mutants_cDNA_P Parameter: Tissue Value: Aerial
  misc_feature: MA Experiment 20000072 PARAMETER Experiment Name: At_100uM_ABA_Mutants_cDNA_P Parameter: Treatment Value: 100uM ABA vs. No Treatment
  misc_feature: MA Experiment ID: 20000086 Result: Up-regulated in Transcription
  misc_feature: MA Experiment 20000086 PARAMETER Experiment Name: At_100uM_ABA_Mutants_cDNA_P Parameter: Plant Line Value: CS22
  misc_feature: MA Experiment 20000086 PARAMETER Experiment Name: At_100uM_ABA_Mutants_cDNA_P Parameter: Timepoint (hr) Value: 6
  misc_feature: MA Experiment 20000086 PARAMETER Experiment Name: At_100uM_ABA_Mutants_cDNA_P Parameter: Tissue Value: Aerial
  misc_feature: MA Experiment 20000086 PARAMETER Experiment Name: At_100uM_ABA_Mutants_cDNA_P Parameter: Treatment Value: 100uM ABA vs. No Treatment
  misc_feature: MA Experiment ID: 20000087 Result: Up-regulated in Transcription
  misc_feature: MA Experiment 20000087 PARAMETER Experiment Name: At_100uM_ABA_Mutants_cDNA_P Parameter: Plant Line Value: WS
  misc_feature: MA Experiment 20000087 PARAMETER Experiment Name: At_100uM_ABA_Mutants_cDNA_P Parameter: Timepoint (hr) Value: 6
  misc_feature: MA Experiment 20000087 PARAMETER Experiment Name: At_100uM_ABA_Mutants_cDNA_P Parameter: Tissue Value: Aerial
  misc_feature: MA Experiment 20000087 PARAMETER Experiment Name: At_100uM_ABA_Mutants_cDNA_P Parameter: Treatment Value: 100uM ABA vs. No Treatment
  misc_feature: MA Experiment ID: 20000088 Result: Up-regulated in Transcription
  misc_feature: MA Experiment 20000088 PARAMETER Experiment Name: At_100uM_ABA_Mutants_cDNA_P Parameter: Plant Line Value: Landsberg
  misc_feature: MA Experiment 20000088 PARAMETER Experiment Name: At_100uM_ABA_Mutants_cDNA_P Parameter: Timepoint (hr) Value: 6
  misc_feature: MA Experiment 20000088 PARAMETER Experiment Name: At_100uM_ABA_Mutants_cDNA_P Parameter: Tissue Value: Aerial
  misc_feature: MA Experiment 20000088 PARAMETER Experiment Name: At_100uM_ABA_Mutants_cDNA_P Parameter: Treatment Value: 100uM ABA vs. No Treatment
  misc_feature: MA Experiment ID: 20000089 Result: Up-regulated in Transcription
  misc_feature: MA Experiment ID: 20000111 Result: Up-regulated in Transcription
  misc_feature: MA Experiment 20000111 PARAMETER Experiment Name: At_42deg_Heat_cDNA_P Parameter: Temperature (deg C) Value: 42 vs. 22
  misc_feature: MA Experiment 20000111 PARAMETER Experiment Name: At_42deg_Heat_cDNA_P Parameter: Timepoint (hr) Value: 6
  misc_feature: MA Experiment 20000111 PARAMETER Experiment Name: At_42deg_Heat_cDNA_P Parameter: Tissue Value: Aerial
  misc_feature: MA Experiment ID: 20000112 Result: Up-regulated in Transcription
  misc_feature: MA Experiment 20000112 PARAMETER Experiment Name: At_42deg_Heat_cDNA_P Parameter: Temperature (deg C) Value: 42 vs. 22
  misc_feature: MA Experiment 20000112 PARAMETER Experiment Name: At_42deg_Heat_cDNA_P Parameter: Timepoint (hr) Value: 2
  misc_feature: MA Experiment 20000112 PARAMETER Experiment Name: At_42deg_Heat_cDNA_P Parameter: Tissue Value: Aerial
  misc_feature: MA Experiment ID: 20000113 Result: Up-regulated in Transcription
  misc_feature: MA Experiment 20000113 PARAMETER Experiment Name: At_42deg_Heat_cDNA_P Parameter: Temperature (deg C) Value: 42 vs. 22
  misc_feature: MA Experiment 20000113 PARAMETER Experiment Name: At_42deg_Heat_cDNA_P Parameter: Timepoint (hr) Value: 8
  misc_feature: MA Experiment 20000113 PARAMETER Experiment Name: At_42deg_Heat_cDNA_P Parameter: Tissue Value: Aerial
  misc_feature: MA Experiment ID: 20000117 Result: Up-regulated in Transcription
  misc_feature: MA Experiment 20000117 PARAMETER Experiment Name: At_100uM_ABA_Mutants_cDNA_P Parameter: Plant Line Value: Columbia
  misc_feature: MA Experiment 20000117 PARAMETER Experiment Name: At_100uM_ABA_Mutants_cDNA_P Parameter: Timepoint (hr) Value: 6
  misc_feature: MA Experiment 20000117 PARAMETER Experiment Name: At_100uM_ABA_Mutants_cDNA_P Parameter: Tissue Value: Aerial
  misc_feature: MA Experiment 20000117 PARAMETER Experiment Name: At_100uM_ABA_Mutants_cDNA_P Parameter: Treatment Value: 100uM ABA vs. No Treatment
  misc_feature: MA Experiment ID: 20000144 Result: Up-regulated in Transcription
  misc_feature: MA Experiment 20000144 PARAMETER Experiment Name: At_42deg_Heat_cDNA_P Parameter: Temperature (deg C) Value: 42 vs. 22
  misc_feature: MA Experiment 20000144 PARAMETER Experiment Name: At_42deg_Heat_cDNA_P Parameter: Timepoint (hr) Value: 1
  misc_feature: MA Experiment 20000144 PARAMETER Experiment Name: At_42deg_Heat_cDNA_P Parameter: Tissue Value: Aerial
  misc_feature: MA Experiment ID: 20000173 Result: Up-regulated in Transcription
  misc_feature: MA Experiment 20000173 PARAMETER Experiment Name: At_42deg_Heat_P Parameter: Age (day) Value: 14
  misc_feature: MA Experiment 20000173 PARAMETER Experiment Name: At_42deg_Heat_P Parameter: Organism Value: A. thaliana
  misc_feature: MA Experiment 20000173 PARAMETER Experiment Name: At_42deg_Heat_P Parameter: Plant Line Value: WS
  misc_feature: MA Experiment 20000173 PARAMETER Experiment Name: At_42deg_Heat_P Parameter: Temperature (deg C) Value: 42 vs. 22
  misc_feature: MA Experiment 20000173 PARAMETER Experiment Name: At_42deg_Heat_P Parameter: Timepoint (hr) Value: 6
  misc_feature: MA Experiment 20000173 PARAMETER Experiment Name: At_42deg_Heat_P Parameter: Tissue Value: Aerial
  misc_feature: MA Experiment ID: 20000184 Result: Down-regulated in Transcription
  misc_feature: MA Experiment 20000184 PARAMETER Experiment Name: At_Shoots__P Parameter: Age (day) Value: 7
  misc_feature: MA Experiment 20000184 PARAMETER Experiment Name: At_Shoots__P Parameter: Tissue Value: Shoots vs. Whole Plant
  misc_feature: MA Experiment ID: 20000224 Result: Up-regulated in Transcription
  misc_feature: MA Experiment ID: 20000234 Result: Down-regulated in Transcription
  misc_feature: MA Experiment 20000234 PARAMETER Experiment Name: At_Siliques_P Parameter: Age (day) Value: 21
  misc_feature: MA Experiment 20000234 PARAMETER Experiment Name: At_Siliques_P Parameter: Organism Value: A. thaliana
  misc_feature: MA Experiment 20000234 PARAMETER Experiment Name: At_Siliques_P Parameter: Plant Line Value: WS
  misc_feature: MA Experiment 20000234 PARAMETER Experiment Name: At_Siliques_P Parameter: Tissue Value: Less Than 5mm Siliques vs. Whole Plant
  misc_feature: MA Experiment ID: 20000437 Result: Up-regulated in Transcription
  misc_feature: MA Experiment 20000437 PARAMETER Experiment Name: At_Drought_P Parameter: Age (day) Value: 8
  misc_feature: MA Experiment 20000437 PARAMETER Experiment Name: At_Drought_P Parameter: Organism Value: A. thaliana
  misc_feature: MA Experiment 20000437 PARAMETER Experiment Name: At_Drought_P Parameter: Plant Line Value: WS
  misc_feature: MA Experiment 20000437 PARAMETER Experiment Name: At_Drought_P Parameter: Timepoint (hr) Value: 24
  misc_feature: MA Experiment 20000437 PARAMETER Experiment Name: At_Drought_P Parameter: Tissue Value: Whole Plant
  misc_feature: MA Experiment 20000437 PARAMETER Experiment Name: At_Drought_P Parameter: Treatment Value: Drought vs. No Drought
  misc_feature: MA Experiment ID: 20000438 Result: Down-regulated in Transcription
  misc_feature: MA Experiment 20000438 PARAMETER Experiment Name: At_Shoots__P Parameter: Age (day) Value: 14
  misc_feature: MA Experiment 20000438 PARAMETER Experiment Name: At_Shoots__P Parameter: Tissue Value: Shoots vs. Whole Plant
  misc_feature: MA Experiment ID: 20001248 Result: Up-regulated in Transcription
  misc_feature: MA Experiment 20001248 PARAMETER Experiment Name: At_Far-red-induction_P Parameter: Age (day) Value: 7
  misc_feature: MA Experiment 20001248 PARAMETER Experiment Name: At_Far-red-induction_P Parameter: Light Value: Far-red vs. White
  misc_feature: MA Experiment 20001248 PARAMETER Experiment Name: At_Far-red-induction_P Parameter: Organism Value: A. thaliana
  misc_feature: MA Experiment 20001248 PARAMETER Experiment Name: At_Far-red-induction_P Parameter: Plant Line Value: Columbia
  misc_feature: MA Experiment 20001248 PARAMETER Experiment Name: At_Far-red-induction_P Parameter: Timepoint (hr) Value: 4
  misc_feature: MA Experiment 20001248 PARAMETER Experiment Name: At_Far-red-induction_P Parameter: Tissue Value: Whole Plant
  misc_feature: MA Experiment ID: 20001560 Result: Down-regulated in Transcription
  misc_feature: MA Experiment 20001560 PARAMETER Experiment Name: At_Drought_Soil_Dry_P Parameter: Age (day) Value: 28
  misc_feature: MA Experiment 20001560 PARAMETER Experiment Name: At_Drought_Soil_Dry_P Parameter: Organism Value: A. thaliana
  misc_feature: MA Experiment 20001560 PARAMETER Experiment Name: At_Drought_Soil_Dry_P Parameter: Plant Line Value: WS
  misc_feature: MA Experiment 20001560 PARAMETER Experiment Name: At_Drought_Soil_Dry_P Parameter: Post Timepoint (hr) Value: None
  misc_feature: MA Experiment 20001560 PARAMETER Experiment Name: At_Drought_Soil_Dry_P Parameter: Post-Treatment Value: None
  misc_feature: MA Experiment 20001560 PARAMETER Experiment Name: At_Drought_Soil_Dry_P Parameter: Timepoint (day) Value: 14
  misc_feature: MA Experiment 20001560 PARAMETER Experiment Name: At_Drought_Soil_Dry_P Parameter: Treatment Value: Drought vs. No Drought
atccctttctctctcttcccctcttctctctatttccagatcgaaacatctctcttcacaaaatgcctttgtcacggtccctcctttcgcggaggatctcgaactcttttaggtttcatcagggagagacaacgacggcaccggaatccgaatcgattcctccgccgtcgaatatggccggttcttcgtcatggtcggcgatgctccctgaattattaggcgagatcattcgtcgcgtggaggagactgaggaccgttggcctcaacgtcgtgatgtagttacttgcgcttgcgtttctaagaaatggagagaaatcactcacgatttcgctagatcctctcttaactctggcaaaattactttcccttcttgcctcaaattgccaggtcctagagacttttctaatcagtgcttgataaagaggaacaagaagacatcaacgttttacttgtatcttgctctaacaccatcattcactgataagggaaagtttcttctggcggcgcggaggtttaggaccggtgcttacactgagtacatcatatcacttgatgctgatgatttctctcaaggaagtaatgcctacgtcggaaaattaagatcagattttcttgggaccaactttacagtatacgatagccaaccaccacacaacggagcaaaaccttcaaatggcaaagccagtcgcagatttgcatcaaagcagataagccctcaagttccagcaggcaactttgaagtcggtcatgtttcttataaattcaaccttttgaaatcaagaggtccaagaagaatggtaagcacactccgatgcccatcaccatcaccttcatcatcatccgctggactctcgtctgaccaaaagccatgtgatgtaaccaagataatgaaaaaacccaacaaggatggttccagcttgacaatactaaagaacaaagctcctagatggcacgagcacttgcagtgctggtgtctgaacttccatggacgagttactgttgcttcggtcaagaactttcagctggttgcgaccgttgaccaaagtcaaccgagcggtaaaggcgatgaagaaacagttcttctacagtttggtaaagtgggagatgacactttcactatggattatagacagcctctctctgcatttcaggcttttgctatctgtctcacaagtttcggcactaaacttgcctgcgagtgaaacccaacaaaaggcaacagaaaagaaaaagtgaactggctttgcaaaaatgtaatgttttgatgtaatcatgtgtaagtgtaaacacaaaggtatgtggaaaggagaagcacataagtattattatgtaagaaacattatttaaaacccataatcataatgtatctctt

SEQ ID NO: 77105 - protein, 399 aa, Arabidopsis thaliana
  peptide (1)..(399): Ceres Seq. ID no. 12561498
  misc_feature (128)..(201): Pfam Name: Tub family Pfam Description: Tub family
  misc_feature (189)..(399): Homolog of NCBI NO: 7769867 NR Description: F12M16.22 [Arabidopsis thaliana]
  misc_feature (3)..(201): Homolog of NCBI NO: 7769867 NR Description: F12M16.22 [Arabidopsis thaliana]
  misc_feature (21)..(399): Homolog of NCBI NO: 18404413 NR Description: F-box containing tubby family protein; protein At1g53320.1, supported by cDNA: gi_13877766, supported by cDNA: [Arabidopsis thaliana] >gi|13877767|gb|AAK43961.1|AF370146_1
  misc_feature (127)..(399): Homolog of NCBI NO: 34911070 NR Description: putative tubby-like protein [Oryza sativa
  misc_feature (64)..(126): Homolog of NCBI NO: 34911070 NR Description: putative tubby-like protein [Oryza sativa
  misc_feature (37)..(265): Homolog of NCBI NO: 30690823 NR Description: F-box containing tubby family protein thaliana] >gi|18377640|gb|AAL66970.1| putative tubby protein thaliana] >gi|20465543|gb|AAM20254.1| putative tubby protein
  misc_feature (301)..(399): Homolog of NCBI NO: 30690823 NR Description: F-box containing tubby family protein thaliana] >gi|18377640|gb|AAL66970.1| putative tubby protein thaliana] >gi|20465543|gb|AAM20254.1| putative tubby protein
  misc_feature (59)..(397): Homolog of NCBI NO: 34909710 NR Description: putative Tub family protein [Oryza sativa
  misc_feature (37)..(265): Homolog of NCBI NO: 25409071 NR Description: probable Tub family protein [imported] - thaliana >gi|3738302|gb|AAC63644.1| putative tubby protein thaliana] >gi|20197552|gb|AAM15124.1| putative tubby protein
  misc_feature (301)..(399): Homolog of NCBI NO: 25409071 NR Description: probable Tub family protein [imported] - thaliana >gi|3738302|gb|AAC63644.1| putative tubby protein thaliana] >gi|20197552|gb|AAM15124.1| putative tubby protein
PFLSLPLFSLFPDRNISLHKMPLSRSLLSRRISNSFRFHQGETTTAPESESIPPPSNMAGSSSWSAMLPELLGEIIRRVEETEDRWPQRRDVVTCACVSKKWREITHDFARSSLNSGKITFPSCLKLPGPRDFSNQCLIKRNKKTSTFYLYLALTPSFTDKGKFLLAARRFRTGAYTEYIISLDADDFSQGSNAYVGKLRSDFLGTNFTVYDSQPPHNGAKPSNGKASRRFASKQISPQVPAGNFEVGHVSYKFNLLKSRGPRRMVSTLRCPSPSPSSSSAGLSSDQKPCDVTKIMKKPNKDGSSLTILKNKAPRWHEHLQCWCLNFHGRVTVASVKNFQLVATVDQSQPSGKGDEETVLLQFGKVGDDTFTMDYRQPLSAFQAFAICLTSFGTKLACE

SEQ ID NO: 77106 - protein, 379 aa, Arabidopsis thaliana; identical to SEQ ID NO: 22139
  peptide (1)..(379): Ceres Seq. ID no. 12561499
  misc_feature (108)..(181): Pfam Name: Tub family Pfam Description: Tub family
  misc_feature (169)..(379): Homolog of NCBI NO: 7769867 NR Description: F12M16.22 [Arabidopsis thaliana]
  misc_feature (1)..(181): Homolog of NCBI NO: 7769867 NR Description: F12M16.22 [Arabidopsis thaliana]
  misc_feature (1)..(379): Homolog of NCBI NO: 18404413 NR Description: F-box containing tubby family protein; protein At1g53320.1, supported by cDNA: gi_13877766, supported by cDNA: [Arabidopsis thaliana] >gi|13877767|gb|AAK43961.1|AF370146_1
  misc_feature (107)..(379): Homolog of NCBI NO: 34911070 NR Description: putative tubby-like protein [Oryza sativa
  misc_feature (44)..(106): Homolog of NCBI NO: 34911070 NR Description: putative tubby-like protein [Oryza sativa
  misc_feature (17)..(245): Homolog of NCBI NO: 30690823 NR Description: F-box containing tubby family protein thaliana] >gi|18377640|gb|AAL66970.1| putative tubby protein thaliana] >gi|20465543|gb|AAM20254.1| putative tubby protein
  misc_feature (281)..(379): Homolog of NCBI NO: 30690823 NR Description: F-box containing tubby family protein thaliana] >gi|18377640|gb|AAL66970.1| putative tubby protein thaliana] >gi|20465543|gb|AAM20254.1| putative tubby protein
  misc_feature (39)..(377): Homolog of NCBI NO: 34909710 NR Description: putative Tub family protein [Oryza sativa
  misc_feature (17)..(245): Homolog of NCBI NO: 25409071 NR Description: probable Tub family protein [imported] - thaliana >gi|3738302|gb|AAC63644.1| putative tubby protein thaliana] >gi|20197552|gb|AAM15124.1| putative tubby protein
  misc_feature (281)..(379): Homolog of NCBI NO: 25409071 NR Description: probable Tub family protein [imported] - thaliana >gi|3738302|gb|AAC63644.1| putative tubby protein thaliana] >gi|20197552|gb|AAM15124.1| putative tubby protein

SEQ ID NO: 77107 - protein, 342 aa, Arabidopsis thaliana; identical to SEQ ID NO: 22140
  peptide (1)..(342): Ceres Seq. ID no. 12561500
  misc_feature (71)..(144): Pfam Name: Tub family Pfam Description: Tub family
  misc_feature (132)..(342): Homolog of NCBI NO: 7769867 NR Description: F12M16.22 [Arabidopsis thaliana]
  misc_feature (1)..(144): Homolog of NCBI NO: 7769867 NR Description: F12M16.22 [Arabidopsis thaliana]
  misc_feature (1)..(342): Homolog of NCBI NO: 18404413 NR Description: F-box containing tubby family protein; protein At1g53320.1, supported by cDNA: gi_13877766, supported by cDNA: [Arabidopsis thaliana] >gi|13877767|gb|AAK43961.1|AF370146_1
  misc_feature (70)..(342): Homolog of NCBI NO: 34911070 NR Description: putative tubby-like protein [Oryza sativa
  misc_feature (7)..(69): Homolog of NCBI NO: 34911070 NR Description: putative tubby-like protein [Oryza sativa
  misc_feature (1)..(208): Homolog of NCBI NO: 30690823 NR Description: F-box containing tubby family protein thaliana] >gi|18377640|gb|AAL66970.1| putative tubby protein thaliana] >gi|20465543|gb|AAM20254.1| putative tubby protein
  misc_feature (244)..(342): Homolog of NCBI NO: 30690823 NR Description: F-box containing tubby family protein thaliana] >gi|18377640|gb|AAL66970.1| putative tubby protein thaliana] >gi|20465543|gb|AAM20254.1| putative tubby protein
  misc_feature (2)..(340): Homolog of NCBI NO: 34909710 NR Description: putative Tub family protein [Oryza sativa
  misc_feature (1)..(208): Homolog of NCBI NO: 25409071 NR Description: probable Tub family protein [imported] - thaliana >gi|3738302|gb|AAC63644.1| putative tubby protein thaliana] >gi|20197552|gb|AAM15124.1| putative tubby protein
  misc_feature (244)..(342): Homolog of NCBI NO: 25409071 NR Description: probable Tub family protein [imported] - thaliana >gi|3738302|gb|AAC63644.1| putative tubby protein thaliana] >gi|20197552|gb|AAM15124.1| putative tubby protein

SEQ ID NO: 77108 - DNA, 1522 bp, Arabidopsis thaliana
  misc_feature (1)..(1522): Ceres Seq. ID no. 12561525
  misc_feature: MA Experiment ID: 108461 Result: Up-regulated in Transcription
  misc_feature: MA Experiment 108461 PARAMETER Experiment Name: At_Germinating_Seeds_cDNA_P Parameter: Age (day) Value: 1 vs. 0
  misc_feature: MA Experiment 108461 PARAMETER Experiment Name: At_Germinating_Seeds_cDNA_P Parameter: Tissue Value: Germinating Seeds
  misc_feature: MA Experiment ID: 108462 Result: Up-regulated in Transcription
  misc_feature: MA Experiment 108462 PARAMETER Experiment Name: At_Germinating_Seeds_cDNA_P Parameter: Age (day) Value: 2 vs. 0
  misc_feature: MA Experiment 108462 PARAMETER Experiment Name: At_Germinating_Seeds_cDNA_P Parameter: Tissue Value: Germinating Seeds
  misc_feature: MA Experiment ID: 108463 Result: Up-regulated in Transcription
  misc_feature: MA Experiment 108463 PARAMETER Experiment Name: At_Germinating_Seeds_cDNA_P Parameter: Age (day) Value: 3 vs. 0
  misc_feature: MA Experiment 108463 PARAMETER Experiment Name: At_Germinating_Seeds_cDNA_P Parameter: Tissue Value: Germinating Seeds
  misc_feature: MA Experiment ID: 108464 Result: Up-regulated in Transcription
  misc_feature: MA Experiment 108464 PARAMETER Experiment Name: At_Germinating_Seeds_cDNA_P Parameter: Age (day) Value: 4 vs. 0
  misc_feature: MA Experiment 108464 PARAMETER Experiment Name: At_Germinating_Seeds_cDNA_P Parameter: Tissue Value: Germinating Seeds
  misc_feature: MA Experiment ID: 108488 Result: Up-regulated in Transcription
  misc_feature: MA Experiment ID: 108585 Result: Down-regulated in Transcription
  misc_feature: MA Experiment 108585 PARAMETER Experiment Name: At_5mM_NaNP_cDNA_P Parameter: Timepoint (hr) Value: 6
  misc_feature: MA Experiment 108585 PARAMETER Experiment Name: At_5mM_NaNP_cDNA_P Parameter: Tissue Value: Aerial
  misc_feature: MA Experiment 108585 PARAMETER Experiment Name: At_5mM_NaNP_cDNA_P Parameter: Treatment Value: null
  misc_feature: MA Experiment ID: 108595 Result: Down-regulated in Transcription
  misc_feature: MA Experiment 108595 PARAMETER Experiment Name: At_Ler-pi_Ovule_cDNA_P Parameter: Plant Line Value: null
  misc_feature: MA Experiment ID: 20000089 Result: Down-regulated in Transcription
  misc_feature: MA Experiment ID: 20000090 Result: Down-regulated in Transcription
  misc_feature: MA Experiment ID: 20000111 Result: Down-regulated in Transcription
  misc_feature: MA Experiment 20000111 PARAMETER Experiment Name: At_42deg_Heat_cDNA_P Parameter: Temperature (deg C) Value: 42 vs. 22
  misc_feature: MA Experiment 20000111 PARAMETER Experiment Name: At_42deg_Heat_cDNA_P Parameter: Timepoint (hr) Value: 6
  misc_feature: MA Experiment 20000111 PARAMETER Experiment Name: At_42deg_Heat_cDNA_P Parameter: Tissue Value: Aerial
  misc_feature: MA Experiment ID: 20000113 Result: Down-regulated in Transcription
  misc_feature: MA Experiment 20000113 PARAMETER Experiment Name: At_42deg_Heat_cDNA_P Parameter: Temperature (deg C) Value: 42 vs. 22
  misc_feature: MA Experiment 20000113 PARAMETER Experiment Name: At_42deg_Heat_cDNA_P Parameter: Timepoint (hr) Value: 8
  misc_feature: MA Experiment 20000113 PARAMETER Experiment Name: At_42deg_Heat_cDNA_P Parameter: Tissue Value: Aerial
  misc_feature: MA Experiment ID: 20001248 Result: Down-regulated in Transcription
  misc_feature: MA Experiment 20001248 PARAMETER Experiment Name: At_Far-red-induction_P Parameter: Age (day) Value: 7
  misc_feature: MA Experiment 20001248 PARAMETER Experiment Name: At_Far-red-induction_P Parameter: Light Value: Far-red vs. White
  misc_feature: MA Experiment 20001248 PARAMETER Experiment Name: At_Far-red-induction_P Parameter: Organism Value: A. thaliana
  misc_feature: MA Experiment 20001248 PARAMETER Experiment Name: At_Far-red-induction_P Parameter: Plant Line Value: Columbia
  misc_feature: MA Experiment 20001248 PARAMETER Experiment Name: At_Far-red-induction_P Parameter: Timepoint (hr) Value: 4
  misc_feature: MA Experiment 20001248 PARAMETER Experiment Name: At_Far-red-induction_P Parameter: Tissue Value: Whole Plant
  misc_feature: MA Experiment ID: 20001905 Result: Down-regulated in Transcription
  misc_feature: MA Experiment 20001905 PARAMETER Experiment Name: At_Drought_Reproduction_P Parameter: Age (day) Value: 40
  misc_feature: MA Experiment 20001905 PARAMETER Experiment Name: At_Drought_Reproduction_P Parameter: Organism Value: A. thaliana
  misc_feature: MA Experiment 20001905 PARAMETER Experiment Name: At_Drought_Reproduction_P Parameter: Plant Line Value: WS
  misc_feature: MA Experiment 20001905 PARAMETER Experiment Name: At_Drought_Reproduction_P Parameter: Timepoint (day) Value: 10
  misc_feature: MA Experiment 20001905 PARAMETER Experiment Name: At_Drought_Reproduction_P Parameter: Tissue Value: Rosettes
  misc_feature: MA Experiment 20001905 PARAMETER Experiment Name: At_Drought_Reproduction_P Parameter: Treatment Value: Drought vs. No Drought
  misc_feature: MA Experiment ID: 20001906 Result: Down-regulated in Transcription
  misc_feature: MA Experiment 20001906 PARAMETER Experiment Name: At_Drought_Reproduction_P Parameter: Age (day) Value: 35
  misc_feature: MA Experiment 20001906 PARAMETER Experiment Name: At_Drought_Reproduction_P Parameter: Organism Value: A. thaliana
  misc_feature: MA Experiment 20001906 PARAMETER Experiment Name: At_Drought_Reproduction_P Parameter: Plant Line Value: WS
  misc_feature: MA Experiment 20001906 PARAMETER Experiment Name: At_Drought_Reproduction_P Parameter: Timepoint (day) Value: 5
  misc_feature: MA Experiment 20001906 PARAMETER Experiment Name: At_Drought_Reproduction_P Parameter: Tissue Value: Siliques
  misc_feature: MA Experiment 20001906 PARAMETER Experiment Name: At_Drought_Reproduction_P Parameter: Treatment Value: Drought vs. No Drought
acgaaagccaaaataaaagagagaaaaagaagataagttgttctatgttcctgaaatgggattaaacgagcaacaaaatgttccaagtcagaggaagatcatagtttttatagtcttagcttttataccaatagctctgtttcgactctgttttaataatccattctcctccattaaagacacctctcttcaagactctgcagctaacgttgtgatcactagcttctcttcatcttctcaagaagaagaaagccaagagagttttgatcatatacaagatgaacctttatgcgattatacgcaagggaactgggtcagagacgagattggtccactctacaatggttcaacatgtggaacaatcaaggatggtcagaattgtttccgccatggtagacctgattccggttatctttactggaaatggaaaccaaacgaatgcgatataccgagattcgactcgaaccggtttcttgatcttatgagagataagcatctagcttttatcggtgattccatggctagaaatcagcttgagtctcttttatgcttgctctctaccgtctctagccctgatctcgtctatagaaacggagaagacaataaattcagaagatggcgtttcgagtcacacaacgtcactgtctcggtttactggtccccgtttttggtggccggtttagagaaatcgggaaacttggaccacaatgtattgcacatagaccgcgtggatgagagatggggcaatgatttagaacgttttgatacggtcgtagtctctgtgggacattggtttctgcatccagcggtttactacgagtctggttcggttttgggatgtcattcttgtgaaacaagtaactgtaccgaggtagggttttatgatgtatttagaaaagcgataagaacaacgttgagagcggttgctggaagtggtcgtgaggtgatcttgacgacattttcgccatcacattttgaaggacggccttgggacagtctcggcgcatgtaacatgaccaagccgtacgaagggaaggttttagaaggtctggacttggacatgcgcaaaatagaaattgaggaatatacggcggctgcggctgaggtgaggttagaggtgttggacgtgacggctatgtcggtactgagaccagacggacatcctggtccgtacatgtacgcggacccgttcaagaacggtgtaccggagagaattcctaatgattgtttgcattggtgtctacctggtcctgtcgacacgtggaacgagatcatgatcgagatgttgcggcgatggaaggtttaaatgatgaacattgattgttgaagatcctatgatatcattcatttacacgcatatgacaaaagaacaaaatgtgtaataattttttgggatttcaaaaagtagctaggtagtttattttcttggattagatacgaaaaaaacagacatggatgatactcttttttgttggttatttcttccgttcttcaaaccatggaggagtacaaaaaatagttg

SEQ ID NO: 77109 - protein, 416 aa, Arabidopsis thaliana; identical to SEQ ID NO: 24155
  peptide (1)..(416): Ceres Seq. ID no. 12561526
  misc_feature (247)..(411): Pfam Name: Arabidopsis proteins of unknown function Pfam Description: Arabidopsis proteins of unknown function
  misc_feature (1)..(416): Homolog of NCBI NO: 15223079 NR Description: unknown protein; protein id: At1g70230.1, by cDNA: gi_19310588 [Arabidopsis thaliana]
  misc_feature (1)..(411): Homolog of NCBI NO: 30678135 NR Description: expressed protein [Arabidopsis thaliana] unknown protein [Arabidopsis thaliana]
  misc_feature (79)..(311): Homolog of NCBI NO: 34900856 NR Description: P0458G06.13 [Oryza sativa (japonica
  misc_feature (279)..(413): Homolog of NCBI NO: 34900856 NR Description: P0458G06.13 [Oryza sativa (japonica
  misc_feature (4)..(411): Homolog of NCBI NO: 15237044 NR Description: putative protein; protein id: At4g11090.1
  misc_feature (89)..(411): Homolog of NCBI NO: 25518737 NR Description: hypothetical protein F6F3.23 [imported] - thaliana >gi|9665154|gb|AAF97338.1|AC023628_19 Unknown protein
  misc_feature (44)..(409): Homolog of NCBI NO: 28393189 NR Description: unknown protein [Arabidopsis thaliana]
  misc_feature (79)..(409): Homolog of NCBI NO: 15234058 NR Description: hypothetical protein; protein id: At4g01080.1
  misc_feature (14)..(411): Homolog of NCBI NO: 7486743 NR Description: hypothetical protein F9D16.260 - Arabidopsis >gi|4454048|emb|CAA23045.1| putative protein [Arabidopsis >gi|7269228|emb|CAB81297.1| putative protein [Arabidopsis
  misc_feature (14)..(411): Homolog of NCBI NO: 30686312 NR Description: expressed protein [Arabidopsis thaliana]

SEQ ID NO: 77110 - protein, 274 aa, Arabidopsis thaliana; identical to SEQ ID NO: 24156
  peptide (1)..(274): Ceres Seq. ID no. 12561527
  misc_feature (105)..(269): Pfam Name: Arabidopsis proteins of unknown function Pfam Description: Arabidopsis proteins of unknown function
  misc_feature (1)..(274): Homolog of NCBI NO: 15223079 NR Description: unknown protein; protein id: At1g70230.1, by cDNA: gi_19310588 [Arabidopsis thaliana]
  misc_feature (1)..(269): Homolog of NCBI NO: 30678135 NR Description: expressed protein [Arabidopsis thaliana] unknown protein [Arabidopsis thaliana]
  misc_feature (1)..(169): Homolog of NCBI NO: 34900856 NR Description: P0458G06.13 [Oryza sativa (japonica
  misc_feature (137)..(271): Homolog of NCBI NO: 34900856 NR Description: P0458G06.13 [Oryza sativa (japonica
  misc_feature (1)..(269): Homolog of NCBI NO: 15237044 NR Description: putative protein; protein id: At4g11090.1
  misc_feature (1)..(269): Homolog of NCBI NO: 25518737 NR Description: hypothetical protein F6F3.23 [imported] - thaliana >gi|9665154|gb|AAF97338.1|AC023628_19 Unknown protein
  misc_feature (1)..(267): Homolog of NCBI NO: 28393189 NR Description: unknown protein [Arabidopsis thaliana]
  misc_feature (1)..(267): Homolog of NCBI NO: 15234058 NR Description: hypothetical protein; protein id: At4g01080.1
  misc_feature (1)..(269): Homolog of NCBI NO: 7486743 NR Description: hypothetical protein F9D16.260 - Arabidopsis >gi|4454048|emb|CAA23045.1| putative protein [Arabidopsis >gi|7269228|emb|CAB81297.1| putative protein [Arabidopsis
  misc_feature (1)..(269): Homolog of NCBI NO: 30686312 NR Description: expressed protein [Arabidopsis thaliana]

SEQ ID NO: 77111 - protein, 262 aa, Arabidopsis thaliana; identical to SEQ ID NO: 24157
  peptide (1)..(262): Ceres Seq. ID no. 12561528
  misc_feature (93)..(257): Pfam Name: Arabidopsis proteins of unknown function Pfam Description: Arabidopsis proteins of unknown function
  misc_feature (1)..(262): Homolog of NCBI NO: 15223079 NR Description: unknown protein; protein id: At1g70230.1, by cDNA: gi_19310588 [Arabidopsis thaliana]
  misc_feature (1)..(257): Homolog of NCBI NO: 30678135 NR Description: expressed protein [Arabidopsis thaliana] unknown protein [Arabidopsis thaliana]
  misc_feature (1)..(157): Homolog of NCBI NO: 34900856 NR Description: P0458G06.13 [Oryza sativa (japonica
  misc_feature (125)..(259): Homolog of NCBI NO: 34900856 NR Description: P0458G06.13 [Oryza sativa (japonica
  misc_feature (1)..(257): Homolog of NCBI NO: 15237044 NR Description: putative protein; protein id: At4g11090.1
  misc_feature (1)..(257): Homolog of NCBI NO: 25518737 NR Description: hypothetical protein F6F3.23 [imported] - thaliana >gi|9665154|gb|AAF97338.1|AC023628_19 Unknown protein
  misc_feature (1)..(255): Homolog of NCBI NO: 28393189 NR Description: unknown protein [Arabidopsis thaliana]
  misc_feature (1)..(255): Homolog of NCBI NO: 15234058 NR Description: hypothetical protein; protein id: At4g01080.1
  misc_feature (1)..(257): Homolog of NCBI NO: 7486743 NR Description: hypothetical protein F9D16.260 - Arabidopsis >gi|4454048|emb|CAA23045.1| putative protein [Arabidopsis >gi|7269228|emb|CAB81297.1| putative protein [Arabidopsis
  misc_feature (1)..(257): Homolog of NCBI NO: 30686312 NR Description: expressed protein [Arabidopsis thaliana]

SEQ ID NO: 77112 - DNA, 1094 bp, Arabidopsis thaliana
  misc_feature (1)..(1094): Ceres Seq. ID no. 12561529
  misc_feature: MA Experiment ID: 108579 Result: Down-regulated in Transcription
  misc_feature: MA Experiment 108579 PARAMETER Experiment Name: At_4deg_Cold_cDNA_P Parameter: Temperature (deg C) Value: 4 vs. 22
  misc_feature: MA Experiment 108579 PARAMETER Experiment Name: At_4deg_Cold_cDNA_P Parameter: Timepoint (hr) Value: 6
  misc_feature: MA Experiment 108579 PARAMETER Experiment Name: At_4deg_Cold_cDNA_P Parameter: Tissue Value: Aerial
  misc_feature: MA Experiment ID: 20000180 Result: Up-regulated in Transcription
  misc_feature: MA Experiment 20000180 PARAMETER Experiment Name: At_Germinating_Seeds_P Parameter: Age (hr) Value: 24 vs. 0
  misc_feature: MA Experiment 20000180 PARAMETER Experiment Name: At_Germinating_Seeds_P Parameter: Tissue Value: Germinating Seeds
  misc_feature: MA Experiment ID: 20000437 Result: Down-regulated in Transcription
  misc_feature: MA Experiment 20000437 PARAMETER Experiment Name: At_Drought_P Parameter: Age (day) Value: 8
  misc_feature: MA Experiment 20000437 PARAMETER Experiment Name: At_Drought_P Parameter: Organism Value: A. thaliana
  misc_feature: MA Experiment 20000437 PARAMETER Experiment Name: At_Drought_P Parameter: Plant Line Value: WS
  misc_feature: MA Experiment 20000437 PARAMETER Experiment Name: At_Drought_P Parameter: Timepoint (hr) Value: 24
  misc_feature: MA Experiment 20000437 PARAMETER Experiment Name: At_Drought_P Parameter: Tissue Value: Whole Plant
  misc_feature: MA Experiment 20000437 PARAMETER Experiment Name: At_Drought_P Parameter: Treatment Value: Drought vs. No Drought
atgttctaccaatcgtcgtcgtctctcacgcaaattcttcattcgttctgtggaaacacagaaatggagactccatatccgaaactcatcgatccttcaaagactcgaataggatggattggcatcgggataatgggatcggccatggtttctcatattatcgccgcaggctattctgtcacagtttacgctcgcgacctccggaaaacaaaagatctgcaaaccaaaggagctcgcatagccaatagccccaaagagttagcggagatgagcgacgttgtgttcacgattgttggaaacttcaacgatgtccgatcattgcttctcggtgacgatggtgtactctctggtcttacgcccggtggagtaacagtggacatgactagtagcaaaccaggattggcgcgtgaaatacacgcagaagcgaggcgtaggaattgttgggcggtggatgcgccggtatcaggtggagacgctggagcacgagaggggacgttagggattttcgccggcggagattcagagattgtggagtggttgtccccggtgatgaagaatatagggactgttacttatatgggagaagcagggagtgggcaaagctgcaagatagggaatcagattgctggtgcgagcaacctggttggacttgctgaagggatagtgttcgctgagaaagcgggtttagatacagtgaaatggctcgaggcggtgaaggatggtgcagctggatcggcggttatgcggctgtttggggagatgattgtgaagagggattatagggcgactggctttgcggagtatatggtgaaagatttgggaatggctgcagaggcggcgatgcctggtgctgctctgagcaagcagttgttcactggaatggtggctaatggagatggcaagttaggtattcaaggcgtcgtctctgttattagaagacttaacggcatatcctgaaaacacttgtgttgtaaaacagagtgttccaatgatttcacgatcaactaggcaaacttgtcttcgatttggtttaagttgataataagaagaacatcgagtctcaccaatctcaataagaaacaaagggcatttat

SEQ ID NO: 77113 - protein, 318 aa, Arabidopsis thaliana
  peptide (1)..(318): Ceres Seq. ID no. 12561530
  misc_feature (34)..(195): Pfam Name: NAD binding domain of 6-phosphogluconate dehydrogenase Pfam Description: NAD binding domain of 6-phosphogluconate
  misc_feature (1)..(318): Homolog of NCBI NO: 18409781 NR Description: putative dehydrogenase; protein id: At1g71180.1, by cDNA: gi_15293142, supported by cDNA: gi_21281067 [Arabidopsis >gi|15293143|gb|AAK93682.1| putative dehydrogenase dehydrogenase
  misc_feature (22)..(318): Homolog of NCBI NO: 25283629 NR Description: probable dehydrogenase F23N20.17 [imported] -
  misc_feature (22)..(318): Homolog of NCBI NO: 30698779 NR Description: dehydrogenase -related [Arabidopsis thaliana]
  misc_feature (29)..(318): Homolog of NCBI NO: 15233455 NR Description: putative protein; protein id: At4g29120.1, by cDNA: gi_13877868, supported by cDNA: gi_17065607 [Arabidopsis
  misc_feature (30)..(315): Homolog of NCBI NO: 34909392 NR Description: putative dehydrogenase [Oryza sativa (japonica group)] >gi|20521418|dbj|BAB91928.1| putative dehydrogenase
  misc_feature (35)..(307): Homolog of NCBI NO: 15896585 NR Description: Dehydrogenase related to 3-hydroxyisobutyrate YKWC B.subtilis ortholog [Clostridium acetobutylicum]
  misc_feature (37)..(305): Homolog of NCBI NO: 30022129 NR Description: 3-hydroxyisobutyrate dehydrogenase [Bacillus
  misc_feature (36)..(312): Homolog of NCBI NO: 16803045 NR Description: similar to 3-hydroxyisobutyrate dehydrogenase (B.
  misc_feature (34)..(307): Homolog of NCBI NO: 16078460 NR Description: similar to 3-hydroxyisobutyrate dehydrogenase subtilis] >gi|3183454|sp|O34948|YKWC_BACSU Hypothetical
  misc_feature (36)..(314): Homolog of NCBI NO: 15898379 NR Description: Oxidoreductase [Sulfolobus solfataricus]
MFYQSSSSLTQILHSFCGNTEMETPYPKLIDPSKTRIGWIGIGIMGSAMVSHIIAAGYSVTVYARDLRKTKDLQTKGARIANSPKELAEMSDVVFTIVGNFNDVRSLLLGDDGVLSGLTPGGVTVDMTSSKPGLAREIHAEARRRNCWAVDAPVSGGDAGAREGTLGIFAGGDSEIVEWLSPVMKNIGTVTYMGEAGSGQSCKIGNQIAGASNLVGLAEGIVFAEKAGLDTVKWLEAVKDGAAGSAVMRLFGEMIVKRDYRATGFAEYMVKDLGMAAEAAMPGAALSKQLFTGMVANGDGKLGIQGVVSVIRRLNGIS

SEQ ID NO: 77114 - protein, 297 aa, Arabidopsis thaliana
  peptide (1)..(297): Ceres Seq. ID no. 12561531
  misc_feature (13)..(174): Pfam Name: NAD binding domain of 6-phosphogluconate dehydrogenase Pfam Description: NAD binding domain of 6-phosphogluconate
  misc_feature (1)..(297): Homolog of NCBI NO: 18409781 NR Description: putative dehydrogenase; protein id: At1g71180.1, by cDNA: gi_15293142, supported by cDNA: gi_21281067 [Arabidopsis >gi|15293143|gb|AAK93682.1| putative dehydrogenase dehydrogenase
  misc_feature (1)..(297): Homolog of NCBI NO: 25283629 NR Description: probable dehydrogenase F23N20.17 [imported] -
  misc_feature (1)..(297): Homolog of NCBI NO: 30698779 NR Description: dehydrogenase -related [Arabidopsis thaliana]
  misc_feature (8)..(297): Homolog of NCBI NO: 15233455 NR Description: putative protein; protein id: At4g29120.1, by cDNA: gi_13877868, supported by cDNA: gi_17065607 [Arabidopsis
  misc_feature (9)..(294): Homolog of NCBI NO: 34909392 NR Description: putative dehydrogenase [Oryza sativa (japonica group)] >gi|20521418|dbj|BAB91928.1| putative dehydrogenase
  misc_feature (14)..(286): Homolog of NCBI NO: 15896585 NR Description: Dehydrogenase related to 3-hydroxyisobutyrate YKWC B.subtilis ortholog [Clostridium acetobutylicum]
  misc_feature (16)..(284): Homolog of NCBI NO: 30022129 NR Description: 3-hydroxyisobutyrate dehydrogenase [Bacillus
  misc_feature (15)..(291): Homolog of NCBI NO: 16803045 NR Description: similar to 3-hydroxyisobutyrate dehydrogenase (B.
  misc_feature (13)..(286): Homolog of NCBI NO: 16078460 NR Description: similar to 3-hydroxyisobutyrate dehydrogenase subtilis] >gi|3183454|sp|O34948|YKWC_BACSU Hypothetical
  misc_feature (15)..(293): Homolog of NCBI NO: 15898379 NR Description: Oxidoreductase [Sulfolobus solfataricus]
METPYPKLIDPSKTRIGWIGIGIMGSAMVSHIIAAGYSVTVYARDLRKTKDLQTKGARIANSPKELAEMSDVVFTIVGNFNDVRSLLLGDDGVLSGLTPGGVTVDMTSSKPGLAREIHAEARRRNCWAVDAPVSGGDAGAREGTLGIFAGGDSEIVEWLSPVMKNIGTVTYMGEAGSGQSCKIGNQIAGASNLVGLAEGIVFAEKAGLDTVKWLEAVKDGAAGSAVMRLFGEMIVKRDYRATGFAEYMVKDLGMAAEAAMPGAALSKQLFTGMVANGDGKLGIQGVVSVIRRLNGIS

SEQ ID NO: 77115 - protein, 274 aa, Arabidopsis thaliana
  peptide (1)..(274): Ceres Seq. ID no. 12561532
  misc_feature (1)..(151): Pfam Name: NAD binding domain of 6-phosphogluconate dehydrogenase Pfam Description: NAD binding domain of 6-phosphogluconate
  misc_feature (1)..(274): Homolog of NCBI NO: 18409781 NR Description: putative dehydrogenase; protein id: At1g71180.1, by cDNA: gi_15293142, supported by cDNA: gi_21281067 [Arabidopsis >gi|15293143|gb|AAK93682.1| putative dehydrogenase dehydrogenase
  misc_feature (1)..(274): Homolog of NCBI NO: 25283629 NR Description: probable dehydrogenase F23N20.17 [imported] -
  misc_feature (1)..(274): Homolog of NCBI NO: 30698779 NR Description: dehydrogenase -related [Arabidopsis thaliana]
  misc_feature (1)..(274): Homolog of NCBI NO: 15233455 NR Description: putative protein; protein id: At4g29120.1, by cDNA: gi_13877868, supported by cDNA: gi_17065607 [Arabidopsis
  misc_feature (1)..(271): Homolog of NCBI NO: 34909392 NR Description: putative dehydrogenase [Oryza sativa (japonica group)] >gi|20521418|dbj|BAB91928.1| putative dehydrogenase
  misc_feature (1)..(263): Homolog of NCBI NO: 15896585 NR Description: Dehydrogenase related to 3-hydroxyisobutyrate YKWC B.subtilis ortholog [Clostridium acetobutylicum]
  misc_feature (1)..(261): Homolog of NCBI NO: 30022129 NR Description: 3-hydroxyisobutyrate dehydrogenase [Bacillus
  misc_feature (1)..(268): Homolog of NCBI NO: 16803045 NR Description: similar to 3-hydroxyisobutyrate dehydrogenase (B.
  misc_feature (1)..(263): Homolog of NCBI NO: 16078460 NR Description: similar to 3-hydroxyisobutyrate dehydrogenase subtilis] >gi|3183454|sp|O34948|YKWC_BACSU Hypothetical
  misc_feature (1)..(270): Homolog of NCBI NO: 15898379 NR Description: Oxidoreductase [Sulfolobus solfataricus]
MGSAMVSHIIAAGYSVTVYARDLRKTKDLQTKGARIANSPKELAEMSDVVFTIVGNFNDVRSLLLGDDGVLSGLTPGGVTVDMTSSKPGLAREIHAEARRRNCWAVDAPVSGGDAGAREGTLGIFAGGDSEIVEWLSPVMKNIGTVTYMGEAGSGQSCKIGNQIAGASNLVGLAEGIVFAEKAGLDTVKWLEAVKDGAAGSAVMRLFGEMIVKRDYRATGFAEYMVKDLGMAAEAAMPGAALSKQLFTGMVANGDGKLGIQGVVSVIRRLNGIS

SEQ ID NO: 77116 - DNA, 740 bp, Arabidopsis thaliana
  misc_feature (1)..(740): Ceres Seq. ID no. 12561533
  misc_feature: MA Experiment ID: 108435 Result: Down-regulated in Transcription
  misc_feature: MA Experiment 108435 PARAMETER Experiment Name: At_stm_Mutants_cDNA_P Parameter: Plant Line Value: wt Landsburg vs stm
  misc_feature: MA Experiment 108435 PARAMETER Experiment Name: At_stm_Mutants_cDNA_P Parameter: Tissue Value: Shoot Apical Meristem Region
  misc_feature: MA Experiment ID: 108461 Result: Up-regulated in Transcription
  misc_feature: MA Experiment 108461 PARAMETER Experiment Name: At_Germinating_Seeds_cDNA_P Parameter: Age (day) Value: 1 vs. 0
  misc_feature: MA Experiment 108461 PARAMETER Experiment Name: At_Germinating_Seeds_cDNA_P Parameter: Tissue Value: Germinating Seeds
  misc_feature: MA Experiment ID: 108462 Result: Up-regulated in Transcription
  misc_feature: MA Experiment 108462 PARAMETER Experiment Name: At_Germinating_Seeds_cDNA_P Parameter: Age (day) Value: 2 vs. 0
  misc_feature: MA Experiment 108462 PARAMETER Experiment Name: At_Germinating_Seeds_cDNA_P Parameter: Tissue Value: Germinating Seeds
  misc_feature: MA Experiment ID: 108463 Result: Up-regulated in Transcription
  misc_feature: MA Experiment 108463 PARAMETER Experiment Name: At_Germinating_Seeds_cDNA_P Parameter: Age (day) Value: 3 vs. 0
  misc_feature: MA Experiment 108463 PARAMETER Experiment Name: At_Germinating_Seeds_cDNA_P Parameter: Tissue Value: Germinating Seeds
  misc_feature: MA Experiment ID: 108464 Result: Up-regulated in Transcription
  misc_feature: MA Experiment 108464 PARAMETER Experiment Name: At_Germinating_Seeds_cDNA_P Parameter: Age (day) Value: 4 vs. 0
  misc_feature: MA Experiment 108464 PARAMETER Experiment Name: At_Germinating_Seeds_cDNA_P Parameter: Tissue Value: Germinating Seeds
  misc_feature: MA Experiment ID: 108489 Result: Down-regulated in Transcription
  misc_feature: MA Experiment ID: 108573 Result: Down-regulated in Transcription
  misc_feature: MA Experiment 108573 PARAMETER Experiment Name: At_Drought_cDNA_P Parameter: Timepoint (hr) Value: 6
  misc_feature: MA Experiment 108573 PARAMETER Experiment Name: At_Drought_cDNA_P Parameter: Tissue Value: Aerial
  misc_feature: MA Experiment 108573 PARAMETER Experiment Name: At_Drought_cDNA_P Parameter: Treatment Value: Drought vs. No Drought
  misc_feature: MA Experiment ID: 108585 Result: Down-regulated in Transcription
  misc_feature: MA Experiment 108585 PARAMETER Experiment Name: At_5mM_NaNP_cDNA_P Parameter: Timepoint (hr) Value: 6
  misc_feature: MA Experiment 108585 PARAMETER Experiment Name: At_5mM_NaNP_cDNA_P Parameter: Tissue Value: Aerial
  misc_feature: MA Experiment 108585 PARAMETER Experiment Name: At_5mM_NaNP_cDNA_P Parameter: Treatment Value: null
  misc_feature: MA Experiment ID: 108595 Result: Down-regulated in Transcription
  misc_feature: MA Experiment 108595 PARAMETER Experiment Name: At_Ler-pi_Ovule_cDNA_P Parameter: Plant Line Value: null
  misc_feature: MA Experiment ID: 20000030 Result: Down-regulated in Transcription
  misc_feature: MA Experiment 20000030 PARAMETER Experiment Name: At_CS6630_Roots_cDNA_P Parameter: Plant Line Value: CS6630 vs. WS
  misc_feature: MA Experiment 20000030 PARAMETER Experiment Name: At_CS6630_Roots_cDNA_P Parameter: Tissue Value: Roots
  misc_feature: MA Experiment ID: 20000069 Result: Down-regulated in Transcription
  misc_feature: MA Experiment 20000069 PARAMETER Experiment Name: At_100uM_ABA_Mutants_cDNA_P Parameter: Plant Line Value: CS23
  misc_feature: MA Experiment 20000069 PARAMETER Experiment Name: At_100uM_ABA_Mutants_cDNA_P Parameter: Timepoint (hr) Value: 6
  misc_feature: MA Experiment 20000069 PARAMETER Experiment Name: At_100uM_ABA_Mutants_cDNA_P Parameter: Tissue Value: Aerial
  misc_feature: MA Experiment 20000069 PARAMETER Experiment Name: At_100uM_ABA_Mutants_cDNA_P Parameter: Treatment Value: 100uM ABA vs. No Treatment
  misc_feature: MA Experiment ID: 20000070 Result: Down-regulated in Transcription
  misc_feature: MA Experiment 20000070 PARAMETER Experiment Name: At_100uM_ABA_Mutants_cDNA_P Parameter: Plant Line Value: CS24
  misc_feature: MA Experiment 20000070 PARAMETER Experiment Name: At_100uM_ABA_Mutants_cDNA_P Parameter: Timepoint (hr) Value: 6
  misc_feature: MA Experiment 20000070 PARAMETER Experiment Name: At_100uM_ABA_Mutants_cDNA_P Parameter: Tissue Value: Aerial
  misc_feature: MA Experiment 20000070 PARAMETER Experiment Name: At_100uM_ABA_Mutants_cDNA_P Parameter: Treatment Value: 100uM ABA vs. No Treatment
  misc_feature: MA Experiment ID: 20000071 Result: Down-regulated in Transcription
  misc_feature: MA Experiment 20000071 PARAMETER Experiment Name: At_100uM_ABA_Mutants_cDNA_P Parameter: Plant Line Value: CS8104
  misc_feature: MA Experiment 20000071 PARAMETER Experiment Name: At_100uM_ABA_Mutants_cDNA_P Parameter: Timepoint (hr) Value: 6
  misc_feature: MA Experiment 20000071 PARAMETER Experiment Name: At_100uM_ABA_Mutants_cDNA_P Parameter: Tissue Value: Aerial
  misc_feature: MA Experiment 20000071 PARAMETER Experiment Name: At_100uM_ABA_Mutants_cDNA_P Parameter: Treatment Value: 100uM ABA vs. No Treatment
  misc_feature: MA Experiment ID: 20000072 Result: Down-regulated in Transcription
  misc_feature: MA Experiment 20000072 PARAMETER Experiment Name: At_100uM_ABA_Mutants_cDNA_P Parameter: Plant Line Value: CS8105
  misc_feature: MA Experiment 20000072 PARAMETER Experiment Name: At_100uM_ABA_Mutants_cDNA_P Parameter: Timepoint (hr) Value: 6
  misc_feature: MA Experiment 20000072 PARAMETER Experiment Name: At_100uM_ABA_Mutants_cDNA_P Parameter: Tissue Value: Aerial
  misc_feature: MA Experiment 20000072 PARAMETER Experiment Name: At_100uM_ABA_Mutants_cDNA_P Parameter: Treatment Value: 100uM ABA vs. No Treatment
  misc_feature: MA Experiment ID: 20000086 Result: Down-regulated in Transcription
  misc_feature: MA Experiment 20000086 PARAMETER Experiment Name: At_100uM_ABA_Mutants_cDNA_P Parameter: Plant Line Value: CS22
  misc_feature: MA Experiment 20000086 PARAMETER Experiment Name: At_100uM_ABA_Mutants_cDNA_P Parameter: Timepoint (hr) Value: 6
  misc_feature: MA Experiment 20000086 PARAMETER Experiment Name: At_100uM_ABA_Mutants_cDNA_P Parameter: Tissue Value: Aerial
  misc_feature: MA Experiment 20000086 PARAMETER Experiment Name: At_100uM_ABA_Mutants_cDNA_P Parameter: Treatment Value: 100uM ABA vs. No Treatment
  misc_feature: MA Experiment ID: 20000087 Result: Down-regulated in Transcription
  misc_feature: MA Experiment 20000087 PARAMETER Experiment Name: At_100uM_ABA_Mutants_cDNA_P Parameter: Plant Line Value: WS
  misc_feature: MA Experiment 20000087 PARAMETER Experiment Name: At_100uM_ABA_Mutants_cDNA_P Parameter: Timepoint (hr) Value: 6
  misc_feature: MA Experiment 20000087 PARAMETER Experiment Name: At_100uM_ABA_Mutants_cDNA_P Parameter: Tissue Value: Aerial
  misc_feature: MA Experiment 20000087 PARAMETER Experiment Name: At_100uM_ABA_Mutants_cDNA_P Parameter: Treatment Value: 100uM ABA vs. No Treatment
  misc_feature: MA Experiment ID: 20000088 Result: Down-regulated in Transcription
  misc_feature: MA Experiment 20000088 PARAMETER Experiment Name: At_100uM_ABA_Mutants_cDNA_P Parameter: Plant Line Value: Landsberg
  misc_feature: MA Experiment 20000088 PARAMETER Experiment Name: At_100uM_ABA_Mutants_cDNA_P Parameter: Timepoint (hr) Value: 6
  misc_feature: MA Experiment 20000088 PARAMETER Experiment Name: At_100uM_ABA_Mutants_cDNA_P Parameter: Tissue Value: Aerial
  misc_feature: MA Experiment 20000088 PARAMETER Experiment Name: At_100uM_ABA_Mutants_cDNA_P Parameter: Treatment Value: 100uM ABA vs. No Treatment
  misc_feature: MA Experiment ID: 20000090 Result: Down-regulated in Transcription
  misc_feature: MA Experiment ID: 20000117 Result: Down-regulated in Transcription
  misc_feature: MA Experiment 20000117 PARAMETER Experiment Name: At_100uM_ABA_Mutants_cDNA_P Parameter: Plant Line Value: Columbia
  misc_feature: MA Experiment 20000117 PARAMETER Experiment Name: At_100uM_ABA_Mutants_cDNA_P Parameter: Timepoint (hr) Value: 6
  misc_feature: MA Experiment 20000117 PARAMETER Experiment Name: At_100uM_ABA_Mutants_cDNA_P Parameter: Tissue Value: Aerial
  misc_feature: MA Experiment 20000117 PARAMETER Experiment Name: At_100uM_ABA_Mutants_cDNA_P Parameter: Treatment Value: 100uM ABA vs. No Treatment
  misc_feature: MA Experiment ID: 20000180 Result: Up-regulated in Transcription
  misc_feature: MA Experiment 20000180 PARAMETER Experiment Name: At_Germinating_Seeds_P Parameter: Age (hr) Value: 24 vs. 0
  misc_feature: MA Experiment 20000180 PARAMETER Experiment Name: At_Germinating_Seeds_P Parameter: Tissue Value: Germinating Seeds
  misc_feature: MA Experiment ID: 20000185 Result: Down-regulated in Transcription
  misc_feature: MA Experiment 20000185 PARAMETER Experiment Name: At_Roots__P Parameter: Age (day) Value: 7 vs. 21
  misc_feature: MA Experiment 20000185 PARAMETER Experiment Name: At_Roots__P Parameter: Organism Value: A. thaliana
  misc_feature: MA Experiment 20000185 PARAMETER Experiment Name: At_Roots__P Parameter: Tissue Value: Roots vs. Whole Plant
  misc_feature: MA Experiment ID: 20000224 Result: Up-regulated in Transcription
  misc_feature: MA Experiment ID: 20000264 Result: Down-regulated in Transcription
  misc_feature: MA Experiment 20000264 PARAMETER Experiment Name: At_Open_Flower_P Parameter: Age (day) Value: 21
  misc_feature: MA Experiment 20000264 PARAMETER Experiment Name: At_Open_Flower_P Parameter: Plant Line Value: WS
  misc_feature: MA Experiment 20000264 PARAMETER Experiment Name: At_Open_Flower_P Parameter: Tissue Value: Open Flower vs. Whole Plant
  misc_feature: MA Experiment ID: 20000438 Result: Up-regulated in Transcription
  misc_feature: MA Experiment 20000438 PARAMETER Experiment Name: At_Shoots__P Parameter: Age (day) Value: 14
  misc_feature: MA Experiment 20000438 PARAMETER Experiment Name: At_Shoots__P Parameter: Tissue Value: Shoots vs. Whole Plant
  misc_feature: MA Experiment ID: 20000439 Result: Down-regulated in Transcription
  misc_feature: MA Experiment 20000439 PARAMETER Experiment Name: At_Roots__P Parameter: Age (day) Value: 14 vs. 21
  misc_feature: MA Experiment 20000439 PARAMETER Experiment Name: At_Roots__P Parameter: Organism Value: A. thaliana
  misc_feature: MA Experiment 20000439 PARAMETER Experiment Name: At_Roots__P Parameter: Tissue Value: Roots vs. Whole Plant
  misc_feature: MA Experiment ID: 20000794 Result: Down-regulated in Transcription
  misc_feature: MA Experiment 20000794 PARAMETER Experiment Name: At_Petals_P Parameter: Age (day) Value: 23-25 days
  misc_feature: MA Experiment 20000794 PARAMETER Experiment Name: At_Petals_P Parameter: Plant Line Value: WS
  misc_feature: MA Experiment 20000794 PARAMETER Experiment Name: At_Petals_P Parameter: Tissue Value: Petals vs. Whole plant
  misc_feature: MA Experiment ID: 20001248 Result: Down-regulated in Transcription
  misc_feature: MA Experiment 20001248 PARAMETER Experiment Name: At_Far-red-induction_P Parameter: Age (day) Value: 7
  misc_feature: MA Experiment 20001248 PARAMETER Experiment Name: At_Far-red-induction_P Parameter: Light Value: Far-red vs. White
  misc_feature: MA Experiment 20001248 PARAMETER Experiment Name: At_Far-red-induction_P Parameter: Organism Value: A. thaliana
  misc_feature: MA Experiment 20001248 PARAMETER Experiment Name: At_Far-red-induction_P Parameter: Plant Line Value: Columbia
  misc_feature: MA Experiment 20001248 PARAMETER Experiment Name: At_Far-red-induction_P Parameter: Timepoint (hr) Value: 4
  misc_feature: MA Experiment 20001248 PARAMETER Experiment Name: At_Far-red-induction_P Parameter: Tissue Value: Whole Plant
  misc_feature: MA Experiment ID: 20001557 Result: Down-regulated in Transcription
  misc_feature: MA Experiment 20001557 PARAMETER Experiment Name: At_Drought_Soil_Dry_P Parameter: Age (day) Value: 27
  misc_feature: MA Experiment 20001557 PARAMETER Experiment Name: At_Drought_Soil_Dry_P Parameter: Organism Value: A. thaliana
  misc_feature: MA Experiment 20001557 PARAMETER Experiment Name: At_Drought_Soil_Dry_P Parameter: Plant Line Value: WS
  misc_feature: MA Experiment 20001557 PARAMETER Experiment Name: At_Drought_Soil_Dry_P Parameter: Post Timepoint (hr) Value: 3
  misc_feature: MA Experiment 20001557 PARAMETER Experiment Name: At_Drought_Soil_Dry_P Parameter: Post-Treatment Value: Re-Water vs. No Drought
  misc_feature: MA Experiment 20001557 PARAMETER Experiment Name: At_Drought_Soil_Dry_P Parameter: Timepoint (day) Value: 13
  misc_feature: MA Experiment 20001557 PARAMETER Experiment Name: At_Drought_Soil_Dry_P Parameter: Treatment Value: Drought vs. No Drought
  misc_feature: MA Experiment ID: 20001904 Result: Down-regulated in Transcription
  misc_feature: MA Experiment 20001904 PARAMETER Experiment Name: At_Drought_Reproduction_P Parameter: Age (day) Value: 37
  misc_feature: MA Experiment 20001904 PARAMETER Experiment Name: At_Drought_Reproduction_P Parameter: Organism Value: A. thaliana
  misc_feature: MA Experiment 20001904 PARAMETER Experiment Name: At_Drought_Reproduction_P Parameter: Plant Line Value: WS
  misc_feature: MA Experiment 20001904 PARAMETER Experiment Name: At_Drought_Reproduction_P Parameter: Timepoint (day) Value: 7
  misc_feature: MA Experiment 20001904 PARAMETER Experiment Name: At_Drought_Reproduction_P Parameter: Tissue Value: Rosettes
  misc_feature: MA Experiment 20001904 PARAMETER Experiment Name: At_Drought_Reproduction_P Parameter: Treatment Value: Drought vs. No Drought
  misc_feature: MA Experiment ID: 20001906 Result: Down-regulated in Transcription
  misc_feature: MA Experiment 20001906 PARAMETER Experiment Name: At_Drought_Reproduction_P Parameter: Age (day) Value: 35
  misc_feature: MA Experiment 20001906 PARAMETER Experiment Name: At_Drought_Reproduction_P Parameter: Organism Value: A. thaliana
  misc_feature: MA Experiment 20001906 PARAMETER Experiment Name: At_Drought_Reproduction_P Parameter: Plant Line Value: WS
  misc_feature: MA Experiment 20001906 PARAMETER Experiment Name: At_Drought_Reproduction_P Parameter: Timepoint (day) Value: 5
  misc_feature: MA Experiment 20001906 PARAMETER Experiment Name: At_Drought_Reproduction_P Parameter: Tissue Value: Siliques
  misc_feature: MA Experiment 20001906 PARAMETER Experiment Name: At_Drought_Reproduction_P Parameter: Treatment Value: Drought vs. No Drought
  misc_feature: MA Experiment ID: 20001908 Result: Down-regulated in Transcription
  misc_feature: MA Experiment 20001908 PARAMETER Experiment Name: At_Drought_Reproduction_P Parameter: Age (day) Value: 40
  misc_feature: MA Experiment 20001908 PARAMETER Experiment Name: At_Drought_Reproduction_P Parameter: Organism Value: A. thaliana
  misc_feature: MA Experiment 20001908 PARAMETER Experiment Name: At_Drought_Reproduction_P Parameter: Plant Line Value: WS
  misc_feature: MA Experiment 20001908 PARAMETER Experiment Name: At_Drought_Reproduction_P Parameter: Timepoint (day) Value: 10
  misc_feature: MA Experiment 20001908 PARAMETER Experiment Name: At_Drought_Reproduction_P Parameter: Tissue Value: Siliques
  misc_feature: MA Experiment 20001908 PARAMETER Experiment Name: At_Drought_Reproduction_P Parameter: Treatment Value: Drought vs. No Drought
gcggtcttatcccgaaactccaagaacacataattttttttcttggtggtctctccaatggctttctctgcgactgtgtctcagctttcttctctttcaaccatctcctcttcattaccaatttcttctagaagactccctcatcgatctcttcctcaattcacagtcaaagcagaagcagagaaagagaaacagagcacacagggcaagtctgatggggaagcatcaccagctgcaaccaaaacccctaaaaccctccccaagaaaccggtttactcgatgaagaagggccaaatcgttcgtgtggaaaaagagaagtacctcaacagcatcaattacttatcagttggacatcctcctttctacaaaggacttgattacatatacgaagatcgcggcgaggtcttggaccttcgtgtctttgagacaggagagtatgcacttgttggatgggttggtatccccaccgcaccagcttggctcccaacagatatgctcatcaagtgtgagaaacttgtttacgagcgaatgtagagtcaagaaggttccaagaagaatcctttggaatgcaactgatataccaaggattgtgttaagctgagatgaacgataacaatggcgcaccatcatgatcatgtgttcaagagtttgacaaagtatcaacgttacaattagttacaaaaactgttgtggagtgtggaatatgtcatcagactcctataataagaatgcagcttcag

SEQ ID NO: 77117 - protein, 158 aa, Arabidopsis thaliana
  peptide (1)..(158): Ceres Seq. ID no. 12561534
  misc_feature (1)..(158): Homolog of NCBI NO: 18410719 NR Description: expressed protein; protein id: At1g74880.1, by cDNA: gi_12744982, supported by cDNA: gi_15294195 [Arabidopsis
  misc_feature (15)..(147): Homolog of NCBI NO: 34905786 NR Description: P0401G10.19 [Oryza sativa (japonica
MAFSATVSQLSSLSTISSSLPISSRRLPHRSLPQFTVKAEAEKEKQSTQGKSDGEASPAATKTPKTLPKKPVYSMKKGQIVRVEKEKYLNSINYLSVGHPPFYKGLDYIYEDRGEVLDLRVFETGEYALVGWVGIPTAPAWLPTDMLIKCEKLVYERM

SEQ ID NO: 77118 - protein, 93 aa, Arabidopsis thaliana
  peptide (1)..(93): Ceres Seq. ID no. 12561535
RSYPETPRTHNFFSWWSLQWLSLRLCLSFLLFQPSPLHYQFLLEDSLIDLFLNSQSKQKQRKRNRAHRASLMGKHHQLQPKPLKPSPRNRFTR

SEQ ID NO: 77119 - protein, 84 aa, Arabidopsis thaliana
  peptide (1)..(84): Ceres Seq. ID no. 12561536
  misc_feature (1)..(84): Homolog of NCBI NO: 18410719 NR Description: expressed protein; protein id: At1g74880.1, by cDNA: gi_12744982, supported by cDNA: gi_15294195 [Arabidopsis
  misc_feature (1)..(73): Homolog of NCBI NO: 34905786 NR Description: P0401G10.19 [Oryza sativa (japonica
MKKGQIVRVEKEKYLNSINYLSVGHPPFYKGLDYIYEDRGEVLDLRVFETGEYALVGWVGIPTAPAWLPTDMLIKCEKLVYERM

SEQ ID NO: 77120 - DNA, 1536 bp, Arabidopsis thaliana
  misc_feature (1)..(1536): Ceres Seq. ID no. 12561544
  misc_feature: MA Experiment ID: 20000180 Result: Down-regulated in Transcription
  misc_feature: MA Experiment 20000180 PARAMETER Experiment Name: At_Germinating_Seeds_P Parameter: Age (hr) Value: 24 vs. 0
  misc_feature: MA Experiment 20000180 PARAMETER Experiment Name: At_Germinating_Seeds_P Parameter: Tissue Value: Germinating Seeds
  misc_feature: MA Experiment ID: 20000214 Result: Down-regulated in Transcription
  misc_feature: MA Experiment 20000214 PARAMETER Experiment Name: At_4deg_Cold_P Parameter: Timepoint (hr) Value: 6
  misc_feature: MA Experiment ID: 20000307 Result: Down-regulated in Transcription
  misc_feature: MA Experiment 20000307 PARAMETER Experiment Name: At_Germinating_Seeds_Sub_P Parameter: Age (hr) Value: 24 vs. 0
  misc_feature: MA Experiment 20000307 PARAMETER Experiment Name: At_Germinating_Seeds_Sub_P Parameter: Organism Value: A. thaliana
  misc_feature: MA Experiment 20000307 PARAMETER Experiment Name: At_Germinating_Seeds_Sub_P Parameter: Plant Line Value: WS
  misc_feature: MA Experiment 20000307 PARAMETER Experiment Name: At_Germinating_Seeds_Sub_P Parameter: Tissue Value: Germinating Seeds
  misc_feature: MA Experiment ID: 20000328 Result: Up-regulated in Transcription
  misc_feature: MA Experiment 20000328 PARAMETER Experiment Name: At_42deg_Heat_Sub_P Parameter: Age (day) Value: 14
  misc_feature: MA Experiment 20000328 PARAMETER Experiment Name: At_42deg_Heat_Sub_P Parameter: Organism Value: A. thaliana
  misc_feature: MA Experiment 20000328 PARAMETER Experiment Name: At_42deg_Heat_Sub_P Parameter: Plant Line Value: WS
  misc_feature: MA Experiment 20000328 PARAMETER Experiment Name: At_42deg_Heat_Sub_P Parameter: Temperature (deg C) Value: 42 vs. 22
  misc_feature: MA Experiment 20000328 PARAMETER Experiment Name: At_42deg_Heat_Sub_P Parameter: Timepoint (hr) Value: 6
  misc_feature: MA Experiment 20000328 PARAMETER Experiment Name: At_42deg_Heat_Sub_P Parameter: Tissue Value: Aerial
  misc_feature: MA Experiment ID: 20001450 Result: Up-regulated in Transcription
  misc_feature: MA Experiment 20001450 PARAMETER Experiment Name: At_Far-red-induction_P Parameter: Age (day) Value: 7
  misc_feature: MA Experiment 20001450 PARAMETER Experiment Name: At_Far-red-induction_P Parameter: Light Value: Far-red vs. White
  misc_feature: MA Experiment 20001450 PARAMETER Experiment Name: At_Far-red-induction_P Parameter: Organism Value: A. thaliana
  misc_feature: MA Experiment 20001450 PARAMETER Experiment Name: At_Far-red-induction_P Parameter: Plant Line Value: Columbia
  misc_feature: MA Experiment 20001450 PARAMETER Experiment Name: At_Far-red-induction_P Parameter: Timepoint (hr) Value: 8
  misc_feature: MA Experiment 20001450 PARAMETER Experiment Name: At_Far-red-induction_P Parameter: Tissue Value: Whole Plant
  misc_feature: MA Experiment ID: 20001451 Result: Up-regulated in Transcription
  misc_feature: MA Experiment 20001451 PARAMETER Experiment Name: At_Far-red-induction_P Parameter: Age (day) Value: 7
  misc_feature: MA Experiment 20001451 PARAMETER Experiment Name: At_Far-red-induction_P Parameter: Light Value: Far-red vs. White
  misc_feature: MA Experiment 20001451 PARAMETER Experiment Name: At_Far-red-induction_P Parameter: Organism Value: A. thaliana
  misc_feature: MA Experiment 20001451 PARAMETER Experiment Name: At_Far-red-induction_P Parameter: Plant Line Value: Columbia
  misc_feature: MA Experiment 20001451 PARAMETER Experiment Name: At_Far-red-induction_P Parameter: Timepoint (hr) Value: 24
  misc_feature: MA Experiment 20001451 PARAMETER Experiment Name: At_Far-red-induction_P Parameter: Tissue Value: Whole Plant
aaattgcggaggctgagagatctcaaatcgacgaccaacaggaagaatgagcagtcgttcgagtagaaccgtgtacgtcggaaaccttcctggcgatatccgtgagagagaggtcgaagatttgttcagtaagtatggacctgttgttcaaattgatttgaaggttcctccaaggcctcctggttatgcattcgttgagtttgatgatgctcgggatgctgaagatgctattcatggtcgtgatggctatgactttgatgggcatcgtttgagggtggaattggcgcatggtgggaggcgttcatcagatgatactcggggtagtttcaatggtggtggccgtggtggtggtcgcggccgtggtgatggtggtagtcgtgggccatctaggagatcagagtttcgtgttctagtcacaggcttgccttcatctgcttcttggcaagatctcaaggatcacatgcgtaaaggaggcgatgtctgtttctcgcaagtgtaccgtgatgctagagggacaactggagttgttgattacacctgctatgaggacatgaagtatgcgctgaaaaagctcgacgacacagagtttcgaaatgcgttttcgaatggatatgtccgggttagagaatatgattcaaggaaggattctaggagtcctagccggggaagatcctattctaagagccgcagccgcagccgtggacgaagcgtgagccgaagcaggagcagaagcaggagcaggagcagaagtcccaaggcaaagtcttcacgtaggtcccctgcaaaatctacatcaagatctcctggcccccgctcgaagtcaaggtcaccgtctccaagaagatggataacagtggagacattggatcacttggatcacaatattatatcgggatttctgtaaaactatattggctcgatggattgacaatatggaatctgggttctcttgggacgtccgtggctcatttggcaacacaagtttttttggccacatggcttataaaacctctgtcctatcacctatgttttaactaagtagcagaatagtttggtttatgtttctttttttttatttgttgcaacttcttaatctctgtgagatagaaggagaggctccaggaccttgctgaacagtataaaacacaacatgtttggatttttgaatctgagtttcttttcttggacttttgcagatcgcgttcaagatcaagatctcctctaccttctgttcagaaggaaggaagcaagagccctagcaagccaagtccagccaagagtcctatccacactaggagtccatcgaggtaaaatgggagatatccaggtgaaaagagaagagagaagcatcttcttgctactcaaaacaaattctactttcttgaagtggattatatctgaacgcttattgactgtagaagatgcgacaagtttgatttgcactatcattttgtaatattcttgccattcttcgtcttctggatccctttacttttgagaatgatgtttttttttgaagatatcgtttcttttccc

SEQ ID NO: 77121 - protein, 285 aa, Arabidopsis thaliana
  peptide (1)..(285): Ceres Seq. ID no. 12561545
  misc_feature (9)..(77): Pfam Name: RNA recognition motif. (a.k.a. RRM, RBD, or RNP domain) Pfam Description: RNA recognition motif. (a.k.a. RRM, RBD, or RNP
  misc_feature (1)..(266): Homolog of NCBI NO: 30678391 NR Description: pre-mRNA splicing factor SF2 (SR1 protein)
  misc_feature (1)..(266): Homolog of NCBI NO: 5815235 NR Description: splicing factor SR1 [Arabidopsis thaliana]
  misc_feature (1)..(266): Homolog of NCBI NO: 2129717 NR Description: splicing factor SF-2 homolog - Arabidopsis
  misc_feature (1)..(285): Homolog of NCBI NO: 5815236 NR Description: splicing factor SR1B [Arabidopsis thaliana]
  misc_feature (1)..(267): Homolog of NCBI NO: 2443473 NR Description: ASF/SF2 homolog [Arabidopsis thaliana]
  misc_feature (1)..(267): Homolog of NCBI NO: 5815237 NR Description: splicing factor SR1C [Arabidopsis thaliana]
  misc_feature (1)..(266): Homolog of NCBI NO: 5815239 NR Description: splicing factor SR1E [Arabidopsis thaliana]
  misc_feature (1)..(207): Homolog of NCBI NO: 5815238 NR Description: splicing factor SR1D [Arabidopsis thaliana]
  misc_feature (1)..(264): Homolog of NCBI NO: 33146854 NR Description: putative pre-mRNA splicing factor SF2 [Oryza
  misc_feature (1)..(264): Homolog of NCBI NO: 22331714 NR Description: arginine/serine-rich splicing factor (atSRp34),
MSSRSSRTVYVGNLPGDIREREVEDLFSKYGPVVQIDLKVPPRPPGYAFVEFDDARDAEDAIHGRDGYDFDGHRLRVELAHGGRRSSDDTRGSFNGGGRGGGRGRGDGGSRGPSRRSEFRVLVTGLPSSASWQDLKDHMRKGGDVCFSQVYRDARGTTGVVDYTCYEDMKYALKKLDDTEFRNAFSNGYVRVREYDSRKDSRSPSRGRSYSKSRSRSRGRSVSRSRSRSRSRSRSPKAKSSRRSPAKSTSRSPGPRSKSRSPSPRRWITVETLDHLDHNIISGFL

SEQ ID NO: 77122 - protein, 147 aa, Arabidopsis thaliana
  peptide (1)..(147): Ceres Seq. ID no. 12561546
  misc_feature (1)..(128): Homolog of NCBI NO: 30678391 NR Description: pre-mRNA splicing factor SF2 (SR1 protein)
  misc_feature (1)..(128): Homolog of NCBI NO: 5815235 NR Description: splicing factor SR1 [Arabidopsis thaliana]
  misc_feature (1)..(128): Homolog of NCBI NO: 2129717 NR Description: splicing factor SF-2 homolog - Arabidopsis
  misc_feature (1)..(147): Homolog of NCBI NO: 5815236 NR Description: splicing factor SR1B [Arabidopsis thaliana]
  misc_feature (1)..(129): Homolog of NCBI NO: 2443473 NR Description: ASF/SF2 homolog [Arabidopsis thaliana]
  misc_feature (1)..(129): Homolog of NCBI NO: 5815237 NR Description: splicing factor SR1C [Arabidopsis thaliana]
  misc_feature (1)..(128): Homolog of NCBI NO: 5815239 NR Description: splicing factor SR1E [Arabidopsis thaliana]
  misc_feature (1)..(69): Homolog of NCBI NO: 5815238 NR Description: splicing factor SR1D [Arabidopsis thaliana]
  misc_feature (1)..(126): Homolog of NCBI NO: 33146854 NR Description: putative pre-mRNA splicing factor SF2 [Oryza
  misc_feature (1)..(126): Homolog of NCBI NO: 22331714 NR Description: arginine/serine-rich splicing factor (atSRp34),
MRKGGDVCFSQVYRDARGTTGVVDYTCYEDMKYALKKLDDTEFRNAFSNGYVRVREYDSRKDSRSPSRGRSYSKSRSRSRGRSVSRSRSRSRSRSRSPKAKSSRRSPAKSTSRSPGPRSKSRSPSPRRWITVETLDHLDHNIISGFL

SEQ ID NO: 77123 - DNA, 1050 bp, Arabidopsis thaliana
  misc_feature (1)..(1050): Ceres Seq. ID no. 12561563
  misc_feature: MA Experiment ID: 108434 Result: Up-regulated in Transcription
  misc_feature: MA Experiment 108434 PARAMETER Experiment Name: At_Root_Tips_cDNA_P Parameter: Tissue Value: Root Tips
  misc_feature: MA Experiment ID: 108462 Result: Down-regulated in Transcription
  misc_feature: MA Experiment 108462 PARAMETER Experiment Name: At_Germinating_Seeds_cDNA_P Parameter: Age (day) Value: 2 vs. 0
  misc_feature: MA Experiment 108462 PARAMETER Experiment Name: At_Germinating_Seeds_cDNA_P Parameter: Tissue Value: Germinating Seeds
  misc_feature: MA Experiment ID: 108463 Result: Down-regulated in Transcription
  misc_feature: MA Experiment 108463 PARAMETER Experiment Name: At_Germinating_Seeds_cDNA_P Parameter: Age (day) Value: 3 vs. 0
  misc_feature: MA Experiment 108463 PARAMETER Experiment Name: At_Germinating_Seeds_cDNA_P Parameter: Tissue Value: Germinating Seeds
  misc_feature: MA Experiment ID: 108464 Result: Down-regulated in Transcription
  misc_feature: MA Experiment 108464 PARAMETER Experiment Name: At_Germinating_Seeds_cDNA_P Parameter: Age (day) Value: 4 vs. 0
  misc_feature: MA Experiment 108464 PARAMETER Experiment Name: At_Germinating_Seeds_cDNA_P Parameter: Tissue Value: Germinating Seeds
  misc_feature: MA Experiment ID: 108585 Result: Up-regulated in Transcription
  misc_feature: MA Experiment 108585 PARAMETER Experiment Name: At_5mM_NaNP_cDNA_P Parameter: Timepoint (hr) Value: 6
  misc_feature: MA Experiment 108585 PARAMETER Experiment Name: At_5mM_NaNP_cDNA_P Parameter: Tissue Value: Aerial
  misc_feature: MA Experiment 108585 PARAMETER Experiment Name: At_5mM_NaNP_cDNA_P Parameter: Treatment Value: null
  misc_feature: MA Experiment ID: 20000068 Result: Down-regulated in Transcription
  misc_feature: MA Experiment ID: 20000180 Result: Down-regulated in Transcription
  misc_feature: MA Experiment 20000180 PARAMETER Experiment Name: At_Germinating_Seeds_P Parameter: Age (hr) Value: 24 vs. 0
  misc_feature: MA Experiment 20000180 PARAMETER Experiment Name: At_Germinating_Seeds_P Parameter: Tissue Value: Germinating Seeds
  misc_feature: MA Experiment ID: 20000224 Result: Down-regulated in Transcription
  misc_feature: MA Experiment ID: 20001560 Result: Up-regulated in Transcription
  misc_feature: MA Experiment 20001560 PARAMETER Experiment Name: At_Drought_Soil_Dry_P Parameter: Age (day) Value: 28
  misc_feature: MA Experiment 20001560 PARAMETER Experiment Name: At_Drought_Soil_Dry_P Parameter: Organism Value: A. thaliana
  misc_feature: MA Experiment 20001560 PARAMETER Experiment Name: At_Drought_Soil_Dry_P Parameter: Plant Line Value: WS
  misc_feature: MA Experiment 20001560 PARAMETER Experiment Name: At_Drought_Soil_Dry_P Parameter: Post Timepoint (hr) Value: None
  misc_feature: MA Experiment 20001560 PARAMETER Experiment Name: At_Drought_Soil_Dry_P Parameter: Post-Treatment Value: None
  misc_feature: MA Experiment 20001560 PARAMETER Experiment Name: At_Drought_Soil_Dry_P Parameter: Timepoint (day) Value: 14
  misc_feature: MA Experiment 20001560 PARAMETER Experiment Name: At_Drought_Soil_Dry_P Parameter: Treatment Value: Drought vs. No Drought
aaacgaaaagcttttgaagaacagaggaacaagaagaagaaagatgttcaggaaccagtacgacacagatgtgacaacatggagtcccacaggtcgactattccaagtcgaatacgccatggaagctgtgaaacaaggctccgcagcaataggactcagatctcgctctcatgtcgtcctcgcttgtgtcaacaaagcacaatcagagctctcttctcatcaaaggaagatctttaaagtcgatgatcatattggtgttgctattgctggtctcactgctgatggtcgtgttctctctcgatatatgagatctgagtctattaatcactcttttacttatgagtctcctcttcctgttggtcgtcttgttgttcatcttgctgataaagctcaggtatgtacccaacgatcatggaaacggccttatggtgtgggtttgctggtaggtggattggacgagtcaggagctcacctctactacaactgccctagcggaaactactttgaatatcaagcattcgctatcgggtctcgttcacaagctgcgaaaacctatctggagcgcaaattcgagagcttccaagaatcatcaaaagaagatctgataaaagatgctattatggccataagggaaactttgcaaggggaaacactgaagagctcgctctgcactgtttctgttctaggagtcgatgaaccattccatttcttggaccaggaaagcattcaaaaggtgattgatacgtttgagaaggttcctgaggaagaggaagatgctggtgagggtgaggccgaacccgaagctgctcctggtgctgctggaactggtgaacaaggtggttcaggtgatcaagatgttgcaccaatggaaatttgagcaagagggaatgagttcaaagttggattttctaaccaattttcttgtgtgtagctctttgatatgttccaacttccaagtacaattgtggtttttattcggctttgtttatttaacagcttggaacaaggagttattgagtgccactagcttatgtttagtcctacttaagt

SEQ ID NO: 77124 - protein, 291 aa, Arabidopsis thaliana
  peptide (1)..(291): Ceres Seq. ID no. 12561564
  misc_feature (43)..(228): Pfam Name: Proteasome A-type and B-type Pfam Description: Proteasome A-type and B-type
  misc_feature (15)..(291): Homolog of NCBI NO: 15220151 NR Description: 20S proteasome alpha subunit F2 (PAF2); protein At1g47250.1, supported by cDNA: gi_16323090, supported by cDNA: [Arabidopsis thaliana] >gi|12229892|sp|O23712|PS12_ARATH complex
  misc_feature (25)..(291): Homolog of NCBI NO: 2511586 NR Description: multicatalytic endopeptidase [Arabidopsis
  misc_feature (15)..(291): Homolog of NCBI NO: 25290066 NR Description: C 3.4.25.1 proteasome endopeptidase complex ()
  misc_feature (15)..(291): Homolog of NCBI NO: 21537234 NR Description: 20S proteasome subunit PAF1 [Arabidopsis thaliana]
  misc_feature (15)..(291): Homolog of NCBI NO: 15239061 NR Description: 20S proteasome alpha subunit F1 (PAF1); protein At5g42790.1, supported by cDNA: 12455., supported by cDNA: supported by cDNA: gi_16648703 [Arabidopsis thaliana] (20S
  misc_feature (15)..(291): Homolog of NCBI NO: 22947842 NR Description: 20S proteasome alpha 6 subunit [Nicotiana
  misc_feature (15)..(264): Homolog of NCBI NO: 1709758 NR Description: Proteasome subunit alpha type 1 (20S proteasome
  misc_feature (20)..(176): Homolog of NCBI NO: 14594923 NR Description: putative alpha6 proteasome subunit [Nicotiana
  misc_feature (15)..(250): Homolog of NCBI NO: 12229911 NR Description: Proteasome subunit alpha type 1 (Proteasome
  misc_feature (15)..(266): Homolog of NCBI NO: 30584967 NR Description: Homo sapiens proteasome (prosome, macropain)
NEKLLKNRGTRRRKMFRNQYDTDVTTWSPTGRLFQVEYAMEAVKQGSAAIGLRSRSHVVLACVNKAQSELSSHQRKIFKVDDHIGVAIAGLTADGRVLSRYMRSESINHSFTYESPLPVGRLVVHLADKAQVCTQRSWKRPYGVGLLVGGLDESGAHLYYNCPSGNYFEYQAFAIGSRSQAAKTYLERKFESFQESSKEDLIKDAIMAIRETLQGETLKSSLCTVSVLGVDEPFHFLDQESIQKVIDTFEKVPEEEEDAGEGEAEPEAAPGAAGTGEQGGSGDQDVAPMEI

SEQ ID NO: 77125 - protein, 277 aa, Arabidopsis thaliana; identical to SEQ ID NO: 35615
  peptide (1)..(277): Ceres Seq. ID no. 12561565
  misc_feature (29)..(214): Pfam Name: Proteasome A-type and B-type Pfam Description: Proteasome A-type and B-type
  misc_feature (1)..(277): Homolog of NCBI NO: 15220151 NR Description: 20S proteasome alpha subunit F2 (PAF2); protein At1g47250.1, supported by cDNA: gi_16323090, supported by cDNA: [Arabidopsis thaliana] >gi|12229892|sp|O23712|PS12_ARATH complex
  misc_feature (11)..(277): Homolog of NCBI NO: 2511586 NR Description: multicatalytic endopeptidase [Arabidopsis
  misc_feature (1)..(277): Homolog of NCBI NO: 25290066 NR Description: C 3.4.25.1 proteasome endopeptidase complex ()
  misc_feature (1)..(277): Homolog of NCBI NO: 21537234 NR Description: 20S proteasome subunit PAF1 [Arabidopsis thaliana]
  misc_feature (1)..(277): Homolog of NCBI NO: 15239061 NR Description: 20S proteasome alpha subunit F1 (PAF1); protein At5g42790.1, supported by cDNA: 12455., supported by cDNA: supported by cDNA: gi_16648703 [Arabidopsis thaliana] (20S
  misc_feature (1)..(277): Homolog of NCBI NO: 22947842 NR Description: 20S proteasome alpha 6 subunit [Nicotiana
  misc_feature (1)..(250): Homolog of NCBI NO: 1709758 NR Description: Proteasome subunit alpha type 1 (20S proteasome
  misc_feature (6)..(162): Homolog of NCBI NO: 14594923 NR Description: putative alpha6 proteasome subunit [Nicotiana
  misc_feature (1)..(236): Homolog of NCBI NO: 12229911 NR Description: Proteasome subunit alpha type 1 (Proteasome
  misc_feature (1)..(252): Homolog of NCBI NO: 30584967 NR Description: Homo sapiens proteasome (prosome, macropain)

SEQ ID NO: 77126 - protein, 252 aa, Arabidopsis thaliana; identical to SEQ ID NO: 35616
  peptide (1)..(252): Ceres Seq. ID no. 12561566
  misc_feature (4)..(189): Pfam Name: Proteasome A-type and B-type Pfam Description: Proteasome A-type and B-type
  misc_feature (1)..(252): Homolog of NCBI NO: 15220151 NR Description: 20S proteasome alpha subunit F2 (PAF2); protein At1g47250.1, supported by cDNA: gi_16323090, supported by cDNA: [Arabidopsis thaliana] >gi|12229892|sp|O23712|PS12_ARATH complex
  misc_feature (1)..(252): Homolog of NCBI NO: 2511586 NR Description: multicatalytic endopeptidase [Arabidopsis
  misc_feature (1)..(252): Homolog of NCBI NO: 25290066 NR Description: C 3.4.25.1 proteasome endopeptidase complex ()
  misc_feature (1)..(252): Homolog of NCBI NO: 21537234 NR Description: 20S proteasome subunit PAF1 [Arabidopsis thaliana]
  misc_feature (1)..(252): Homolog of NCBI NO: 15239061 NR Description: 20S proteasome alpha subunit F1 (PAF1); protein At5g42790.1, supported by cDNA: 12455., supported by cDNA: supported by cDNA: gi_16648703 [Arabidopsis thaliana] (20S
  misc_feature (1)..(252): Homolog of NCBI NO: 22947842 NR Description: 20S proteasome alpha 6 subunit [Nicotiana
  misc_feature (1)..(225): Homolog of NCBI NO: 1709758 NR Description: Proteasome subunit alpha type 1 (20S proteasome
  misc_feature (1)..(137): Homolog of NCBI NO: 14594923 NR Description: putative alpha6 proteasome subunit [Nicotiana
  misc_feature (1)..(211): Homolog of NCBI NO: 12229911 NR Description: Proteasome subunit alpha type 1 (Proteasome
  misc_feature (1)..(227): Homolog of NCBI NO: 30584967 NR Description: Homo sapiens proteasome (prosome, macropain)

SEQ ID NO: 77127 - DNA, 1734 bp, Arabidopsis thaliana
  misc_feature (1)..(1734): Ceres Seq. ID no. 12561581
  misc_feature: MA Experiment ID: 20000179 Result: Up-regulated in Transcription
  misc_feature: MA Experiment 20000179 PARAMETER Experiment Name: At_Germinating_Seeds_P Parameter: Age (hr) Value: 6 vs. 0
  misc_feature: MA Experiment 20000179 PARAMETER Experiment Name: At_Germinating_Seeds_P Parameter: Tissue Value: Germinating Seeds
  misc_feature: MA Experiment ID: 20000180 Result: Up-regulated in Transcription
  misc_feature: MA Experiment 20000180 PARAMETER Experiment Name: At_Germinating_Seeds_P Parameter: Age (hr) Value: 24 vs. 0
  misc_feature: MA Experiment 20000180 PARAMETER Experiment Name: At_Germinating_Seeds_P Parameter: Tissue Value: Germinating Seeds
  misc_feature: MA Experiment ID: 20000184 Result: Up-regulated in Transcription
  misc_feature: MA Experiment 20000184 PARAMETER Experiment Name: At_Shoots__P Parameter: Age (day) Value: 7
  misc_feature: MA Experiment 20000184 PARAMETER Experiment Name: At_Shoots__P Parameter: Tissue Value: Shoots vs. Whole Plant
  misc_feature: MA Experiment ID: 20000185 Result: Up-regulated in Transcription
  misc_feature: MA Experiment 20000185 PARAMETER Experiment Name: At_Roots__P Parameter: Age (day) Value: 7 vs. 21
  misc_feature: MA Experiment 20000185 PARAMETER Experiment Name: At_Roots__P Parameter: Organism Value: A. thaliana
  misc_feature: MA Experiment 20000185 PARAMETER Experiment Name: At_Roots__P Parameter: Tissue Value: Roots vs. Whole Plant
  misc_feature: MA Experiment ID: 20000438 Result: Up-regulated in Transcription
  misc_feature: MA Experiment 20000438 PARAMETER Experiment Name: At_Shoots__P Parameter: Age (day) Value: 14
  misc_feature: MA Experiment 20000438 PARAMETER Experiment Name: At_Shoots__P Parameter: Tissue Value: Shoots vs. Whole Plant
  misc_feature: MA Experiment ID: 20000439 Result: Up-regulated in Transcription
  misc_feature: MA Experiment 20000439 PARAMETER Experiment Name: At_Roots__P Parameter: Age (day) Value: 14 vs. 21
  misc_feature: MA Experiment 20000439 PARAMETER Experiment Name: At_Roots__P Parameter: Organism Value: A. thaliana
  misc_feature: MA Experiment 20000439 PARAMETER Experiment Name: At_Roots__P Parameter: Tissue Value: Roots vs. Whole Plant
  misc_feature: MA Experiment ID: 20000451 Result: Up-regulated in Transcription
  misc_feature: MA Experiment 20000451 PARAMETER Experiment Name: At_CS6879_Shoots-Roots_P Parameter: Age (day) Value: 14
  misc_feature: MA Experiment 20000451 PARAMETER Experiment Name: At_CS6879_Shoots-Roots_P Parameter: Organism Value: A. thaliana
  misc_feature: MA Experiment 20000451 PARAMETER Experiment Name: At_CS6879_Shoots-Roots_P Parameter: Plant Line Value: CS6879 vs. WS
  misc_feature: MA Experiment 20000451 PARAMETER Experiment Name: At_CS6879_Shoots-Roots_P Parameter: Tissue Value: Roots
  misc_feature: MA Experiment ID: 20001450 Result: Down-regulated in Transcription
  misc_feature: MA Experiment 20001450 PARAMETER Experiment Name: At_Far-red-induction_P Parameter: Age (day) Value: 7
  misc_feature: MA Experiment 20001450 PARAMETER Experiment Name: At_Far-red-induction_P Parameter: Light Value: Far-red vs. White
  misc_feature: MA Experiment 20001450 PARAMETER Experiment Name: At_Far-red-induction_P Parameter: Organism Value: A. thaliana
  misc_feature: MA Experiment 20001450 PARAMETER Experiment Name: At_Far-red-induction_P Parameter: Plant Line Value: Columbia
  misc_feature: MA Experiment 20001450 PARAMETER Experiment Name: At_Far-red-induction_P Parameter: Timepoint (hr) Value: 8
  misc_feature: MA Experiment 20001450 PARAMETER Experiment Name: At_Far-red-induction_P Parameter: Tissue Value: Whole Plant
  misc_feature: MA Experiment ID: 20001768 Result: Down-regulated in Transcription
  misc_feature: MA Experiment 20001768 PARAMETER Experiment Name: At_Far-red-enriched-adult_P Parameter: Age (day) Value: 28
  misc_feature: MA Experiment 20001768 PARAMETER Experiment Name: At_Far-red-enriched-adult_P Parameter: Light Value: Far-red enriched vs. White
  misc_feature: MA Experiment 20001768 PARAMETER Experiment Name: At_Far-red-enriched-adult_P Parameter: Organism Value: A. thaliana
  misc_feature: MA Experiment 20001768 PARAMETER Experiment Name: At_Far-red-enriched-adult_P Parameter: Plant Line Value: Columbia
  misc_feature: MA Experiment 20001768 PARAMETER Experiment Name: At_Far-red-enriched-adult_P Parameter: Timepoint (hr) Value: 1
  misc_feature: MA Experiment 20001768 PARAMETER Experiment Name: At_Far-red-enriched-adult_P Parameter: Tissue Value: Aerial
atcataaacttgttctcttccagaagaaactaaaaacaaaaatggcattgcaaaagtttcctctcatggggctgcttttgctcctaaccatcctcgtctctgtgacaacagcggttgatgatcctgtttgcccggcgacttccaagctaagccgagcaagtttccctaatgggtttttgtttggcacggctactgctgcgtttcaggtcgaaggtgcaattaatgaaacttgtcgtggaccggctctatgggatatctactgtagaagaaatccagagagatgtagtggcgaccacgccgatgtggccgttgatttcttccatcgttataaggaagatattcagctaatgaagaatctaaacacagatgcattcagactctcaatcgcatggtcaagaatatttcctcatgggagaaaggagaagggagtgagtcaagctggtgtgcaattctaccacgagctcatcgatgaactccttaaaaatggtatagttccgtttgtgactgttttccattgggacactccacaagatttggaagacgaatatggcggtttcttaagccaaaacattgtgaaagattttcgagaatatgcagattatgttttcactgaatacggtggaaaagtgaaaaactggatcactttcaacgagccatgggtctttgctcacgcaggttacgacttaggaaagaaagcaccaggacgttgttctcgctacgttccaggttgcgaagaccgagagggacaatctggtaaagaggcttatctagtcagtcacaatctcctcaacgctcacgcagaagctgttgaagttttccgccaaaaggttaaaggtgggaaaatcggaatcgcacatagtccggcttggttcgaaccacatgatcttaaagattcaaatgacgctccaactgttagccgtgtacttgactttatgttgggatggcatctggagccaactacttcgggagattatccacaaatcatgaaagaccttcttggttacagattgcctcaatttactgctgcacaaaaagcaaaattgaaagattcgaccgatttcgtagggcttaactactatacttcgacattttcaaattataatgagaagccagatccgtctaaaccaagttggaagcaagattctcttgtttcctgggaacctaagaatgtagatcacagcgccattggtagcatgcctcttactgctgcattgcccgtctacgctaaaggatttagaaagcttttaaagtacatcaaggacaaatacgcaaacccggagattatgataatggaaaatggatatggagataaacttgggaccacagattcggttgacgttggtactgctgatcataacaggaaatattatcttcagaggcatcttctggctatgaacgaggctatttgcatcgataaggtgagagttacgggatactttgtatggtcattgttggataacttcgaatggcaagatggttacaaaaacagattcggactctattacgtcgatttcaaaaataacctcacacgttatgagaaagaatcagccaagtattacaaagatttcctcgctcaaggtgttcgtccatccgcactcaagagggatgagctttaagttatattttgaggatttcgttttctattcgatgtttttcctatgttttagtttgtgattgaccacgcacgattcatgagtcgtggttaataataataaaagtgtttcgttttccttc

SEQ ID NO: 77128 - protein, 537 aa, Arabidopsis thaliana
  peptide (1)..(537): Ceres Seq. ID no. 12561582
  misc_feature (14)..(537): Homolog of NCBI NO: 15219605 NR Description: glycosyl hydrolase family 1, beta-glucosidase; id: At1g66270.1, supported by cDNA: gi_15010793 [Arabidopsis
  misc_feature (14)..(537): Homolog of NCBI NO: 2286069 NR Description: beta-glucosidase [Arabidopsis thaliana]
  misc_feature (14)..(537): Homolog of NCBI NO: 30697327 NR Description: glycosyl hydrolase family 1, beta-glucosidase
  misc_feature (14)..(537): Homolog of NCBI NO: 15219623 NR Description: glycosyl hydrolase family 1; protein id: supported by cDNA: gi_18389261 [Arabidopsis thaliana]
  misc_feature (14)..(537): Homolog of NCBI NO: 15232626 NR Description: glycosyl hydrolase family 1; protein id: supported by cDNA: gi_14423459, supported by cDNA: gi_1732569 thaliana] >gi|6478919|gb|AAF14024.1|AC011436_8 thioglucosidase 3D
  misc_feature (14)..(537): Homolog of NCBI NO: 1363489 NR Description: thioglucosidase (EC 3.2.1.147) 3D precursor - thaliana >gi|984052|emb|CAA61592.1| thioglucoside glucohydrolase thaliana] >gi|5524767|emb|CAB50792.1| thioglucoside
  misc_feature (14)..(537): Homolog of NCBI NO: 1732570 NR Description: beta-glucosidase [Arabidopsis thaliana]
  misc_feature (14)..(537): Homolog of NCBI NO: 15241841 NR Description: glycosyl hydrolase family 1; protein id:
  misc_feature (103)..(537): Homolog of NCBI NO: 1732572 NR Description: beta-glucosidase [Brassica nigra]
  misc_feature (18)..(530): Homolog of NCBI NO: 22331243 NR Description: glycosyl hydrolase family 1; protein id: supported by cDNA: gi_16604492, supported by cDNA: gi_17381179,
HKLVLFQKKLKTKMALQKFPLMGLLLLLTILVSVTTAVDDPVCPATSKLSRASFPNGFLFGTATAAFQVEGAINETCRGPALWDIYCRRNPERCSGDHADVAVDFFHRYKEDIQLMKNLNTDAFRLSIAWSRIFPHGRKEKGVSQAGVQFYHELIDELLKNGIVPFVTVFHWDTPQDLEDEYGGFLSQNIVKDFREYADYVFTEYGGKVKNWITFNEPWVFAHAGYDLGKKAPGRCSRYVPGCEDREGQSGKEAYLVSHNLLNAHAEAVEVFRQKVKGGKIGIAHSPAWFEPHDLKDSNDAPTVSRVLDFMLGWHLEPTTSGDYPQIMKDLLGYRLPQFTAAQKAKLKDSTDFVGLNYYTSTFSNYNEKPDPSKPSWKQDSLVSWEPKNVDHSAIGSMPLTAALPVYAKGFRKLLKYIKDKYANPEIMIMENGYGDKLGTTDSVDVGTADHNRKYYLQRHLLAMNEAICIDKVRVTGYFVWSLLDNFEWQDGYKNRFGLYYVDFKNNLTRYEKESAKYYKDFLAQGVRPSALKRDEL

SEQ ID NO: 77129 - protein, 524 aa, Arabidopsis thaliana
  peptide (1)..(524): Ceres Seq. ID no. 12561583
  misc_feature (1)..(524): Homolog of NCBI NO: 15219605 NR Description: glycosyl hydrolase family 1, beta-glucosidase; id: At1g66270.1, supported by cDNA: gi_15010793 [Arabidopsis
  misc_feature (1)..(524): Homolog of NCBI NO: 2286069 NR Description: beta-glucosidase [Arabidopsis thaliana]
  misc_feature (1)..(524): Homolog of NCBI NO: 30697327 NR Description: glycosyl hydrolase family 1, beta-glucosidase
  misc_feature (1)..(524): Homolog of NCBI NO: 15219623 NR Description: glycosyl hydrolase family 1; protein id: supported by cDNA: gi_18389261 [Arabidopsis thaliana]
  misc_feature (1)..(524): Homolog of NCBI NO: 15232626 NR Description: glycosyl hydrolase family 1; protein id: supported by cDNA: gi_14423459, supported by cDNA: gi_1732569 thaliana] >gi|6478919|gb|AAF14024.1|AC011436_8 thioglucosidase 3D
  misc_feature (1)..(524): Homolog of NCBI NO: 1363489 NR Description: thioglucosidase (EC 3.2.1.147) 3D precursor - thaliana >gi|984052|emb|CAA61592.1| thioglucoside glucohydrolase thaliana] >gi|5524767|emb|CAB50792.1| thioglucoside
  misc_feature (1)..(524): Homolog of NCBI NO: 1732570 NR Description: beta-glucosidase [Arabidopsis thaliana]
  misc_feature (1)..(524): Homolog of NCBI NO: 15241841 NR Description: glycosyl hydrolase family 1; protein id:
  misc_feature (90)..(524): Homolog of NCBI NO: 1732572 NR Description: beta-glucosidase [Brassica nigra]
  misc_feature (5)..(517): Homolog of NCBI NO: 22331243 NR Description: glycosyl hydrolase family 1; protein id: supported by cDNA: gi_16604492, supported by cDNA: gi_17381179,
MALQKFPLMGLLLLLTILVSVTTAVDDPVCPATSKLSRASFPNGFLFGTATAAFQVEGAINETCRGPALWDIYCRRNPERCSGDHADVAVDFFHRYKEDIQLMKNLNTDAFRLSIAWSRIFPHGRKEKGVSQAGVQFYHELIDELLKNGIVPFVTVFHWDTPQDLEDEYGGFLSQNIVKDFREYADYVFTEYGGKVKNWITFNEPWVFAHAGYDLGKKAPGRCSRYVPGCEDREGQSGKEAYLVSHNLLNAHAEAVEVFRQKVKGGKIGIAHSPAWFEPHDLKDSNDAPTVSRVLDFMLGWHLEPTTSGDYPQIMKDLLGYRLPQFTAAQKAKLKDSTDFVGLNYYTSTFSNYNEKPDPSKPSWKQDSLVSWEPKNVDHSAIGSMPLTAALPVYAKGFRKLLKYIKDKYANPEIMIMENGYGDKLGTTDSVDVGTADHNRKYYLQRHLLAMNEAICIDKVRVTGYFVWSLLDNFEWQDGYKNRFGLYYVDFKNNLTRYEKESAKYYKDFLAQGVRPSALKRDEL

SEQ ID NO: 77130 - protein, 516 aa, Arabidopsis thaliana
  peptide (1)..(516): Ceres Seq. ID no. 12561584
  misc_feature (1)..(516): Homolog of NCBI NO: 15219605 NR Description: glycosyl hydrolase family 1, beta-glucosidase; id: At1g66270.1, supported by cDNA: gi_15010793 [Arabidopsis
  misc_feature (1)..(516): Homolog of NCBI NO: 2286069 NR Description: beta-glucosidase [Arabidopsis thaliana]
  misc_feature (1)..(516): Homolog of NCBI NO: 30697327 NR Description: glycosyl hydrolase family 1, beta-glucosidase
  misc_feature (1)..(516): Homolog of NCBI NO: 15219623 NR Description: glycosyl hydrolase family 1; protein id: supported by cDNA: gi_18389261 [Arabidopsis thaliana]
  misc_feature (1)..(516): Homolog of NCBI NO: 15232626 NR Description: glycosyl hydrolase family 1; protein id: supported by cDNA: gi_14423459, supported by cDNA: gi_1732569 thaliana] >gi|6478919|gb|AAF14024.1|AC011436_8 thioglucosidase 3D
  misc_feature (1)..(516): Homolog of NCBI NO: 1363489 NR Description: thioglucosidase (EC 3.2.1.147) 3D precursor - thaliana >gi|984052|emb|CAA61592.1| thioglucoside glucohydrolase thaliana] >gi|5524767|emb|CAB50792.1| thioglucoside
  misc_feature (1)..(516): Homolog of NCBI NO: 1732570 NR Description: beta-glucosidase [Arabidopsis thaliana]
  misc_feature (1)..(516): Homolog of NCBI NO: 15241841 NR Description: glycosyl hydrolase family 1; protein id:
  misc_feature (82)..(516): Homolog of NCBI NO: 1732572 NR Description: beta-glucosidase [Brassica nigra]
  misc_feature (1)..(509): Homolog of NCBI NO: 22331243 NR Description: glycosyl hydrolase family 1; protein id: supported by cDNA: gi_16604492, supported by cDNA: gi_17381179,
MGLLLLLTILVSVTTAVDDPVCPATSKLSRASFPNGFLFGTATAAFQVEGAINETCRGPALWDIYCRRNPERCSGDHADVAVDFFHRYKEDIQLMKNLNTDAFRLSIAWSRIFPHGRKEKGVSQAGVQFYHELIDELLKNGIVPFVTVFHWDTPQDLEDEYGGFLSQNIVKDFREYADYVFTEYGGKVKNWITFNEPWVFAHAGYDLGKKAPGRCSRYVPGCEDREGQSGKEAYLVSHNLLNAHAEAVEVFRQKVKGGKIGIAHSPAWFEPHDLKDSNDAPTVSRVLDFMLGWHLEPTTSGDYPQIMKDLLGYRLPQFTAAQKAKLKDSTDFVGLNYYTSTFSNYNEKPDPSKPSWKQDSLVSWEPKNVDHSAIGSMPLTAALPVYAKGFRKLLKYIKDKYANPEIMIMENGYGDKLGTTDSVDVGTADHNRKYYLQRHLLAMNEAICIDKVRVTGYFVWSLLDNFEWQDGYKNRFGLYYVDFKNNLTRYEKESAKYYKDFLAQGVRPSALKRDEL

SEQ ID NO: 77131 - DNA, 1962 bp, Arabidopsis thaliana
  misc_feature (1)..(1962): Ceres Seq. ID no. 12561604
  misc_feature: MA Experiment ID: 108434 Result: Down-regulated in Transcription
  misc_feature: MA Experiment 108434 PARAMETER Experiment Name: At_Root_Tips_cDNA_P Parameter: Tissue Value: Root Tips
  misc_feature: MA Experiment ID: 108461 Result: Up-regulated in Transcription
  misc_feature: MA Experiment 108461 PARAMETER Experiment Name: At_Germinating_Seeds_cDNA_P Parameter: Age (day) Value: 1 vs. 0
  misc_feature: MA Experiment 108461 PARAMETER Experiment Name: At_Germinating_Seeds_cDNA_P Parameter: Tissue Value: Germinating Seeds
  misc_feature: MA Experiment ID: 108462 Result: Up-regulated in Transcription
  misc_feature: MA Experiment 108462 PARAMETER Experiment Name: At_Germinating_Seeds_cDNA_P Parameter: Age (day) Value: 2 vs. 0
  misc_feature: MA Experiment 108462 PARAMETER Experiment Name: At_Germinating_Seeds_cDNA_P Parameter: Tissue Value: Germinating Seeds
  misc_feature: MA Experiment ID: 108463 Result: Up-regulated in Transcription
  misc_feature: MA Experiment 108463 PARAMETER Experiment Name: At_Germinating_Seeds_cDNA_P Parameter: Age (day) Value: 3 vs. 0
  misc_feature: MA Experiment 108463 PARAMETER Experiment Name: At_Germinating_Seeds_cDNA_P Parameter: Tissue Value: Germinating Seeds
  misc_feature: MA Experiment ID: 108464 Result: Up-regulated in Transcription
  misc_feature: MA Experiment 108464 PARAMETER Experiment Name: At_Germinating_Seeds_cDNA_P Parameter: Age (day) Value: 4 vs. 0
  misc_feature: MA Experiment 108464 PARAMETER Experiment Name: At_Germinating_Seeds_cDNA_P Parameter: Tissue Value: Germinating Seeds
  misc_feature: MA Experiment ID: 108488 Result: Up-regulated in Transcription
  misc_feature: MA Experiment ID: 108569 Result: Up-regulated in Transcription
  misc_feature: MA Experiment 108569 PARAMETER Experiment Name: At_0.001%_MeJA__cDNA_P Parameter: Timepoint (hr) Value: 6
  misc_feature: MA Experiment 108569 PARAMETER Experiment Name: At_0.001%_MeJA__cDNA_P Parameter: Tissue Value: Aerial
  misc_feature: MA Experiment 108569 PARAMETER Experiment Name: At_0.001%_MeJA__cDNA_P Parameter: Treatment Value: 0.001% MeJA vs. No Treatment
  misc_feature: MA Experiment ID: 20000069 Result: Down-regulated in Transcription
  misc_feature: MA Experiment 20000069 PARAMETER Experiment Name: At_100uM_ABA_Mutants_cDNA_P Parameter: Plant Line Value: CS23
  misc_feature: MA Experiment 20000069 PARAMETER Experiment Name: At_100uM_ABA_Mutants_cDNA_P Parameter: Timepoint (hr) Value: 6
  misc_feature: MA Experiment 20000069 PARAMETER Experiment Name: At_100uM_ABA_Mutants_cDNA_P Parameter: Tissue Value: Aerial
  misc_feature: MA Experiment 20000069 PARAMETER Experiment Name: At_100uM_ABA_Mutants_cDNA_P Parameter: Treatment Value: 100uM ABA vs. No Treatment
  misc_feature: MA Experiment ID: 20000071 Result: Down-regulated in Transcription
  misc_feature: MA Experiment 20000071 PARAMETER Experiment Name: At_100uM_ABA_Mutants_cDNA_P Parameter: Plant Line Value: CS8104
  misc_feature: MA Experiment 20000071 PARAMETER Experiment Name: At_100uM_ABA_Mutants_cDNA_P Parameter: Timepoint (hr) Value: 6
  misc_feature: MA Experiment 20000071 PARAMETER Experiment Name: At_100uM_ABA_Mutants_cDNA_P Parameter: Tissue Value: Aerial
  misc_feature: MA Experiment 20000071 PARAMETER Experiment Name: At_100uM_ABA_Mutants_cDNA_P Parameter: Treatment Value: 100uM ABA vs. No Treatment
  misc_feature: MA Experiment ID: 20000087 Result: Down-regulated in Transcription
  misc_feature: MA Experiment 20000087 PARAMETER Experiment Name: At_100uM_ABA_Mutants_cDNA_P Parameter: Plant Line Value: WS
  misc_feature: MA Experiment 20000087 PARAMETER Experiment Name: At_100uM_ABA_Mutants_cDNA_P Parameter: Timepoint (hr) Value: 6
  misc_feature: MA Experiment 20000087 PARAMETER Experiment Name: At_100uM_ABA_Mutants_cDNA_P Parameter: Tissue Value: Aerial
  misc_feature: MA Experiment 20000087 PARAMETER Experiment Name: At_100uM_ABA_Mutants_cDNA_P Parameter: Treatment Value: 100uM ABA vs. No Treatment
  misc_feature: MA Experiment ID: 20000090 Result: Down-regulated in Transcription
  misc_feature: MA Experiment ID: 20000117 Result: Down-regulated in Transcription
  misc_feature: MA Experiment 20000117 PARAMETER Experiment Name: At_100uM_ABA_Mutants_cDNA_P Parameter: Plant Line Value: Columbia
  misc_feature: MA Experiment 20000117 PARAMETER Experiment Name: At_100uM_ABA_Mutants_cDNA_P Parameter: Timepoint (hr) Value: 6
  misc_feature: MA Experiment 20000117 PARAMETER Experiment Name: At_100uM_ABA_Mutants_cDNA_P Parameter: Tissue Value: Aerial
  misc_feature: MA Experiment 20000117 PARAMETER Experiment Name: At_100uM_ABA_Mutants_cDNA_P Parameter: Treatment Value: 100uM ABA vs. No Treatment
  misc_feature: MA Experiment ID: 20000179 Result: Up-regulated in Transcription
  misc_feature: MA Experiment 20000179 PARAMETER Experiment Name: At_Germinating_Seeds_P Parameter: Age (hr) Value: 6 vs. 0
  misc_feature: MA Experiment 20000179 PARAMETER Experiment Name: At_Germinating_Seeds_P Parameter: Tissue Value: Germinating Seeds
  misc_feature: MA Experiment ID: 20000180 Result: Up-regulated in Transcription
  misc_feature: MA Experiment 20000180 PARAMETER Experiment Name: At_Germinating_Seeds_P Parameter: Age (hr) Value: 24 vs. 0
  misc_feature: MA Experiment 20000180 PARAMETER Experiment Name: At_Germinating_Seeds_P Parameter: Tissue Value: Germinating Seeds
  misc_feature: MA Experiment ID: 20000185 Result: Down-regulated in Transcription
  misc_feature: MA Experiment 20000185 PARAMETER Experiment Name: At_Roots__P Parameter: Age (day) Value: 7 vs. 21
  misc_feature: MA Experiment 20000185 PARAMETER Experiment Name: At_Roots__P Parameter: Organism Value: A. thaliana
  misc_feature: MA Experiment 20000185 PARAMETER Experiment Name: At_Roots__P Parameter: Tissue Value: Roots vs. Whole Plant
  misc_feature: MA Experiment ID: 20000234 Result: Up-regulated in Transcription
  misc_feature: MA Experiment 20000234 PARAMETER Experiment Name: At_Siliques_P Parameter: Age (day) Value: 21
  misc_feature: MA Experiment 20000234 PARAMETER Experiment Name: At_Siliques_P Parameter: Organism Value: A. thaliana
  misc_feature: MA Experiment 20000234 PARAMETER Experiment Name: At_Siliques_P Parameter: Plant Line Value: WS
  misc_feature: MA Experiment 20000234 PARAMETER Experiment Name: At_Siliques_P Parameter: Tissue Value: Less Than 5mm Siliques vs. Whole Plant
  misc_feature: MA Experiment ID: 20000438 Result: Up-regulated in Transcription
  misc_feature: MA Experiment 20000438 PARAMETER Experiment Name: At_Shoots__P Parameter: Age (day) Value: 14
  misc_feature: MA Experiment 20000438 PARAMETER Experiment Name: At_Shoots__P Parameter: Tissue Value: Shoots vs. Whole Plant
  misc_feature: MA Experiment ID: 20000439 Result: Down-regulated in Transcription
  misc_feature: MA Experiment 20000439 PARAMETER Experiment Name: At_Roots__P Parameter: Age (day) Value: 14 vs. 21
  misc_feature: MA Experiment 20000439 PARAMETER Experiment Name: At_Roots__P Parameter: Organism Value: A. thaliana
  misc_feature: MA Experiment 20000439 PARAMETER Experiment Name: At_Roots__P Parameter: Tissue Value: Roots vs. Whole Plant
  misc_feature: MA Experiment ID: 20000441 Result: Up-regulated in Transcription
  misc_feature: MA Experiment 20000441 PARAMETER Experiment Name: At_1uM_BR-BRZ__P Parameter: Tissue Value: Shoot Apices
  misc_feature: MA Experiment 20000441 PARAMETER Experiment Name: At_1uM_BR-BRZ__P Parameter: Treatment Value: 1uM BR vs. No Treatment
  misc_feature: MA Experiment ID: 20000495 Result: Up-regulated in Transcription
  misc_feature: MA Experiment 20000495 PARAMETER Experiment Name: At_Guard_Cells_P Parameter: Harvest Date Value: 8/2/2002
  misc_feature: MA Experiment 20000495 PARAMETER Experiment Name: At_Guard_Cells_P Parameter: Organism Value: A. thaliana
  misc_feature: MA Experiment 20000495 PARAMETER Experiment Name: At_Guard_Cells_P Parameter: Tissue Value: Guard Cells vs. Leaves
  misc_feature: MA Experiment ID: 20000496 Result: Up-regulated in Transcription
  misc_feature: MA Experiment 20000496 PARAMETER Experiment Name: At_Guard_Cells_P Parameter: Harvest Date Value: 7/19/2002
  misc_feature: MA Experiment 20000496 PARAMETER Experiment Name: At_Guard_Cells_P Parameter: Organism Value: Canola
  misc_feature: MA Experiment 20000496 PARAMETER Experiment Name: At_Guard_Cells_P Parameter: Tissue Value: Guard Cells vs. Leaves
  misc_feature: MA Experiment ID: 20001247 Result: Up-regulated in Transcription
  misc_feature: MA Experiment 20001247 PARAMETER Experiment Name: At_Far-red-induction_P Parameter: Age (day) Value: 7
  misc_feature: MA Experiment 20001247 PARAMETER Experiment Name: At_Far-red-induction_P Parameter: Light Value: Far-red vs. White
  misc_feature: MA Experiment 20001247 PARAMETER Experiment Name: At_Far-red-induction_P Parameter: Organism Value: A. thaliana
  misc_feature: MA Experiment 20001247 PARAMETER Experiment Name: At_Far-red-induction_P Parameter: Plant Line Value: Columbia
  misc_feature: MA Experiment 20001247 PARAMETER Experiment Name: At_Far-red-induction_P Parameter: Timepoint (hr) Value: 1
  misc_feature: MA Experiment 20001247 PARAMETER Experiment Name: At_Far-red-induction_P Parameter: Tissue Value: Whole Plant
  misc_feature: MA Experiment ID: 20001248 Result: Down-regulated in Transcription
  misc_feature: MA Experiment 20001248 PARAMETER Experiment Name: At_Far-red-induction_P Parameter: Age (day) Value: 7
  misc_feature: MA Experiment 20001248 PARAMETER Experiment Name: At_Far-red-induction_P Parameter: Light Value: Far-red vs. White
  misc_feature: MA Experiment 20001248 PARAMETER Experiment Name: At_Far-red-induction_P Parameter: Organism Value: A. thaliana
  misc_feature: MA Experiment 20001248 PARAMETER Experiment Name: At_Far-red-induction_P Parameter: Plant Line Value: Columbia
  misc_feature: MA Experiment 20001248 PARAMETER Experiment Name: At_Far-red-induction_P Parameter: Timepoint (hr) Value: 4
  misc_feature: MA Experiment 20001248 PARAMETER Experiment Name: At_Far-red-induction_P Parameter: Tissue Value: Whole Plant
  misc_feature: MA Experiment ID: 20001451 Result: Up-regulated in Transcription
  misc_feature: MA Experiment 20001451 PARAMETER Experiment Name: At_Far-red-induction_P Parameter: Age (day) Value: 7
  misc_feature: MA Experiment 20001451 PARAMETER Experiment Name: At_Far-red-induction_P Parameter: Light Value: Far-red vs. White
  misc_feature: MA Experiment 20001451 PARAMETER Experiment Name: At_Far-red-induction_P Parameter: Organism Value: A. thaliana
  misc_feature: MA Experiment 20001451 PARAMETER Experiment Name: At_Far-red-induction_P Parameter: Plant Line Value: Columbia
  misc_feature: MA Experiment 20001451 PARAMETER Experiment Name: At_Far-red-induction_P Parameter: Timepoint (hr) Value: 24
  misc_feature: MA Experiment 20001451 PARAMETER Experiment Name: At_Far-red-induction_P Parameter: Tissue Value: Whole Plant
  misc_feature: MA Experiment ID: 20001905 Result: Down-regulated in Transcription
  misc_feature: MA Experiment 20001905 PARAMETER Experiment Name: At_Drought_Reproduction_P Parameter: Age (day) Value: 40
  misc_feature: MA Experiment 20001905 PARAMETER Experiment Name: At_Drought_Reproduction_P Parameter: Organism Value: A. thaliana
  misc_feature: MA Experiment 20001905 PARAMETER Experiment Name: At_Drought_Reproduction_P Parameter: Plant Line Value: WS
  misc_feature: MA Experiment 20001905 PARAMETER Experiment Name: At_Drought_Reproduction_P Parameter: Timepoint (day) Value: 10
  misc_feature: MA Experiment 20001905 PARAMETER Experiment Name: At_Drought_Reproduction_P Parameter: Tissue Value: Rosettes
  misc_feature: MA Experiment 20001905 PARAMETER Experiment Name: At_Drought_Reproduction_P Parameter: Treatment Value: Drought vs. No Drought
ccataaaaatctatcaataatcacttcctctctctctctctctctcttatacaacactcaagaagcgagacacagaggagagagttagtcttcttctctgtttttgtctctttggctatatatattcaaacattgtgtgaacagaacacaaatcaacacaacacacacaactttgtgttctttaagttttgtttcagagatcaatggccgggactggattgtttgctgagattcttgatggagaagtatacaaatactacgctgatggtgagtggaaaacttcttcctcaggtaagagtgttgccatcatgaacccggccacgaggaagacacagtacaaggttcaagcatgcacgcaagaagaagtgaacgcggtgatggaactggcgaaatcagctcagaaatcgtgggcgaaaactcctctttggaaaagagctgagcttcttcacaaggctgcagcaatccttaaggacaacaaagctcccatggctgagtctcttgttaaagaaatcgctaaacccgccaaagattctgttactgaggttgtgaggtctggagatttgatctcttattgtgctgaagaaggtgttaggatcttaggtgaagggaagtttcttctctccgatagcttccccggtaatgaccgtactaagtactgcctcacttccaagattccactcggtgtggttttggctattcctccattcaattatccagttaatctcgctgtatcgaagatcgctcctgctttgatcgccggaaactcccttgtcctcaaacctccaactcaaggagctgtttcttgccttcacatggtacattgctttcacttagccggtttcccaaaaggtcttatcagctgcatcaccggaaaaggatctgagatcggcgatttcctcactatgcaccctgctgttaactgcattagtttcacgggtggtgataccggaatctcaatctcaaagaaagctggtatgatccctcttcaaatggaacttggaggtaaagatgcatgcattgttctagatgatgctgatcttgatttagttgcttccaatatcatcaaaggaggattctcttacagcgggcagagatgcactgcggttaaggtagtcctagtgatggaatcagtagcggatgagcttgttgagaaagtgaaagctaaagtggccaaactcacggtgggaccgcccgaagagaactccgatatcacggcagtggtgtcggaatcttcagctaatttcattgaaggattggtgatggatgctaaggagaaaggagcaacgttttgtcaagagtataaaagagagggtaacttgatttggccgttgcttttggataatgttagaccggacatgaggatcgcgtgggaggaaccattcggtcctgttgtgccggtcttgaggatcaattctgttgaagaagggattaatcattgcaatgcaagcaactttggccttcagggatgtgtattcactaaagacatcaacaaggcaatactgatcagtgatgcaatggagacaggaaccgttcagatcaactctgcgccagctcgtggaccggaccacttccctttccagggacttaaggacagtggaatagggtcacaaggtgtgacaaatagcatcaatttgatgactaaagtgaagaccactgtcattaacttgcctacaccttcttactctatgggttagtttccctttttttttatgttcttcatcttagaatcaaaatcaatcatgtcatgtttgtattggattcaatcgaatactgcgaataaagggagtgattagcgtaactattatggtttgtaatctctatgtaaccaataagaggatattatgaaagatgagtgagaggtttggttgtgttgtgttataacaggggacggtttcatctcacgcctgtgattcgagcacacaaaactgaaaacttcttttgataattggagttttatcattt

SEQ ID NO: 77132 - protein, 496 aa, Arabidopsis thaliana
  peptide (1)..(496): Ceres Seq. ID no. 12561605
  misc_feature (1)..(496): Homolog of NCBI NO: 15224111 NR Description: putative NADP-dependent dehydrogenase; protein id: At2g24270.1, supported by cDNA: [Arabidopsis thaliana] >gi|25284182|pir||F84634 hypothetical
  misc_feature (1)..(496): Homolog of NCBI NO: 3913711 NR Description: NADP-dependent glyceraldehyde-3-phosphate
  misc_feature (1)..(496): Homolog of NCBI NO: 2494076 NR Description: NADP-DEPENDENT GLYCERALDEHYDE-3-PHOSPHATE
  misc_feature (1)..(496): Homolog of NCBI NO: 1084372 NR Description: glyceraldehyde-3-phosphate dehydrogenase (NADP)
  misc_feature (1)..(496): Homolog of NCBI NO: 6425093 NR Description: nonreversible glyceraldehyde-3-phosphate
  misc_feature (1)..(496): Homolog of NCBI NO: 2494075 NR Description: NADP-DEPENDENT GLYCERALDEHYDE-3-PHOSPHATE
  misc_feature (1)..(496): Homolog of NCBI NO: 19880027 NR Description: glyceraldehyde-3-phosphate dehydrogenase [Oryza
  misc_feature (22)..(496): Homolog of NCBI NO: 29367371 NR Description: NADH-dependent glyceraldehyde-3-phosphate
  misc_feature (1)..(496): Homolog of NCBI NO: 21780314 NR Description: nonphosphorylating glyceraldehyde-3-phosphate
  misc_feature (1)..(496): Homolog of NCBI NO: 21780317 NR Description: nonphosphorylating glyceraldehyde-3-phosphate
MAGTGLFAEILDGEVYKYYADGEWKTSSSGKSVAIMNPATRKTQYKVQACTQEEVNAVMELAKSAQKSWAKTPLWKRAELLHKAAAILKDNKAPMAESLVKEIAKPAKDSVTEVVRSGDLISYCAEEGVRILGEGKFLLSDSFPGNDRTKYCLTSKIPLGVVLAIPPFNYPVNLAVSKIAPALIAGNSLVLKPPTQGAVSCLHMVHCFHLAGFPKGLISCITGKGSEIGDFLTMHPAVNCISFTGGDTGISISKKAGMIPLQMELGGKDACIVLDDADLDLVASNIIKGGFSYSGQRCTAVKVVLVMESVADELVEKVKAKVAKLTVGPPEENSDITAVVSESSANFIEGLVMDAKEKGATFCQEYKREGNLIWPLLLDNVRPDMRIAWEEPFGPVVPVLRINSVEEGINHCNASNFGLQGCVFTKDINKAILISDAMETGTVQINSAPARGPDHFPFQGLKDSGIGSQGVTNSINLMTKVKTTVINLPTPSYSMG

SEQ ID NO: 77133 - protein, 461 aa, Arabidopsis thaliana
  peptide (1)..(461): Ceres Seq. ID no. 12561606
  misc_feature (1)..(461): Homolog of NCBI NO: 15224111 NR Description: putative NADP-dependent dehydrogenase; protein id: At2g24270.1, supported by cDNA: [Arabidopsis thaliana] >gi|25284182|pir||F84634 hypothetical
  misc_feature (1)..(461): Homolog of NCBI NO: 3913711 NR Description: NADP-dependent glyceraldehyde-3-phosphate
  misc_feature (1)..(461): Homolog of NCBI NO: 2494076 NR Description: NADP-DEPENDENT GLYCERALDEHYDE-3-PHOSPHATE
  misc_feature (1)..(461): Homolog of NCBI NO: 1084372 NR Description: glyceraldehyde-3-phosphate dehydrogenase (NADP)
  misc_feature (1)..(461): Homolog of NCBI NO: 6425093 NR Description: nonreversible glyceraldehyde-3-phosphate
  misc_feature (1)..(461): Homolog of NCBI NO: 2494075 NR Description: NADP-DEPENDENT GLYCERALDEHYDE-3-PHOSPHATE
  misc_feature (1)..(461): Homolog of NCBI NO: 19880027 NR Description: glyceraldehyde-3-phosphate dehydrogenase [Oryza
  misc_feature (1)..(461): Homolog of NCBI NO: 29367371 NR Description: NADH-dependent glyceraldehyde-3-phosphate
  misc_feature (1)..(461): Homolog of NCBI NO: 21780314 NR Description: nonphosphorylating glyceraldehyde-3-phosphate
  misc_feature (1)..(461): Homolog of NCBI NO: 21780317 NR Description: nonphosphorylating glyceraldehyde-3-phosphate
MNPATRKTQYKVQACTQEEVNAVMELAKSAQKSWAKTPLWKRAELLHKAAAILKDNKAPMAESLVKEIAKPAKDSVTEVVRSGDLISYCAEEGVRILGEGKFLLSDSFPGNDRTKYCLTSKIPLGVVLAIPPFNYPVNLAVSKIAPALIAGNSLVLKPPTQGAVSCLHMVHCFHLAGFPKGLISCITGKGSEIGDFLTMHPAVNCISFTGGDTGISISKKAGMIPLQMELGGKDACIVLDDADLDLVASNIIKGGFSYSGQRCTAVKVVLVMESVADELVEKVKAKVAKLTVGPPEENSDITAVVSESSANFIEGLVMDAKEKGATFCQEYKREGNLIWPLLLDNVRPDMRIAWEEPFGPVVPVLRINSVEEGINHCNASNFGLQGCVFTKDINKAILISDAMETGTVQINSAPARGPDHFPFQGLKDSGIGSQGVTNSINLMTKVKTTVINLPTPSYSMG

SEQ ID NO: 77134 - protein, 438 aa, Arabidopsis thaliana
  peptide (1)..(438): Ceres Seq. ID no. 12561607
  misc_feature (1)..(438): Homolog of NCBI NO: 15224111 NR Description: putative NADP-dependent dehydrogenase; protein id: At2g24270.1, supported by cDNA: [Arabidopsis thaliana] >gi|25284182|pir||F84634 hypothetical
  misc_feature (1)..(438): Homolog of NCBI NO: 3913711 NR Description: NADP-dependent glyceraldehyde-3-phosphate
  misc_feature (1)..(438): Homolog of NCBI NO: 2494076 NR Description: NADP-DEPENDENT GLYCERALDEHYDE-3-PHOSPHATE
  misc_feature (1)..(438): Homolog of NCBI NO: 1084372 NR Description: glyceraldehyde-3-phosphate dehydrogenase (NADP)
  misc_feature (1)..(438): Homolog of NCBI NO: 6425093 NR Description: nonreversible glyceraldehyde-3-phosphate
  misc_feature (1)..(438): Homolog of NCBI NO: 2494075 NR Description: NADP-DEPENDENT GLYCERALDEHYDE-3-PHOSPHATE
  misc_feature (1)..(438): Homolog of NCBI NO: 19880027 NR Description: glyceraldehyde-3-phosphate dehydrogenase [Oryza
  misc_feature (1)..(438): Homolog of NCBI NO: 29367371 NR Description: NADH-dependent glyceraldehyde-3-phosphate
  misc_feature (1)..(438): Homolog of NCBI NO: 21780314 NR Description: nonphosphorylating glyceraldehyde-3-phosphate
  misc_feature (1)..(438): Homolog of NCBI NO: 21780317 NR Description: nonphosphorylating glyceraldehyde-3-phosphate
MELAKSAQKSWAKTPLWKRAELLHKAAAILKDNKAPMAESLVKEIAKPAKDSVTEVVRSGDLISYCAEEGVRILGEGKFLLSDSFPGNDRTKYCLTSKIPLGVVLAIPPFNYPVNLAVSKIAPALIAGNSLVLKPPTQGAVSCLHMVHCFHLAGFPKGLISCITGKGSEIGDFLTMHPAVNCISFTGGDTGISISKKAGMIPLQMELGGKDACIVLDDADLDLVASNIIKGGFSYSGQRCTAVKVVLVMESVADELVEKVKAKVAKLTVGPPEENSDITAVVSESSANFIEGLVMDAKEKGATFCQEYKREGNLIWPLLLDNVRPDMRIAWEEPFGPVVPVLRINSVEEGINHCNASNFGLQGCVFTKDINKAILISDAMETGTVQINSAPARGPDHFPFQGLKDSGIGSQGVTNSINLMTKVKTTVINLPTPSYSMG

SEQ ID NO: 77135 - DNA, 987 bp, Arabidopsis thaliana
  misc_feature (1)..(987): Ceres Seq. ID no. 12561608
  misc_feature: MA Experiment ID: 108434 Result: Down-regulated in Transcription
  misc_feature: MA Experiment 108434 PARAMETER Experiment Name: At_Root_Tips_cDNA_P Parameter: Tissue Value: Root Tips
  misc_feature: MA Experiment ID: 108435 Result: Down-regulated in Transcription
  misc_feature: MA Experiment 108435 PARAMETER Experiment Name: At_stm_Mutants_cDNA_P Parameter: Plant Line Value: wt Landsburg vs stm
  misc_feature: MA Experiment 108435 PARAMETER Experiment Name: At_stm_Mutants_cDNA_P Parameter: Tissue Value: Shoot Apical Meristem Region
  misc_feature: MA Experiment ID: 108461 Result: Down-regulated in Transcription
  misc_feature: MA Experiment 108461 PARAMETER Experiment Name: At_Germinating_Seeds_cDNA_P Parameter: Age (day) Value: 1 vs. 0
  misc_feature: MA Experiment 108461 PARAMETER Experiment Name: At_Germinating_Seeds_cDNA_P Parameter: Tissue Value: Germinating Seeds
  misc_feature: MA Experiment ID: 108462 Result: Up-regulated in Transcription
  misc_feature: MA Experiment 108462 PARAMETER Experiment Name: At_Germinating_Seeds_cDNA_P Parameter: Age (day) Value: 2 vs. 0
  misc_feature: MA Experiment 108462 PARAMETER Experiment Name: At_Germinating_Seeds_cDNA_P Parameter: Tissue Value: Germinating Seeds
  misc_feature: MA Experiment ID: 108463 Result: Up-regulated in Transcription
  misc_feature: MA Experiment 108463 PARAMETER Experiment Name: At_Germinating_Seeds_cDNA_P Parameter: Age (day) Value: 3 vs. 0
  misc_feature: MA Experiment 108463 PARAMETER Experiment Name: At_Germinating_Seeds_cDNA_P Parameter: Tissue Value: Germinating Seeds
  misc_feature: MA Experiment ID: 108464 Result: Up-regulated in Transcription
  misc_feature: MA Experiment 108464 PARAMETER Experiment Name: At_Germinating_Seeds_cDNA_P Parameter: Age (day) Value: 4 vs. 0
  misc_feature: MA Experiment 108464 PARAMETER Experiment Name: At_Germinating_Seeds_cDNA_P Parameter: Tissue Value: Germinating Seeds
  misc_feature: MA Experiment ID: 108572 Result: Up-regulated in Transcription
  misc_feature: MA Experiment 108572 PARAMETER Experiment Name: At_Drought_cDNA_P Parameter: Timepoint (hr) Value: 1
  misc_feature: MA Experiment 108572 PARAMETER Experiment Name: At_Drought_cDNA_P Parameter: Tissue Value: Aerial
  misc_feature: MA Experiment 108572 PARAMETER Experiment Name: At_Drought_cDNA_P Parameter: Treatment Value: Drought vs. No Drought
  misc_feature: MA Experiment ID: 108574 Result: Up-regulated in Transcription
  misc_feature: MA Experiment 108574 PARAMETER Experiment Name: At_Wounding__cDNA_P Parameter: Timepoint (hr) Value: 1
  misc_feature: MA Experiment 108574 PARAMETER Experiment Name: At_Wounding__cDNA_P Parameter: Tissue Value: Aerial
  misc_feature: MA Experiment 108574 PARAMETER Experiment Name: At_Wounding__cDNA_P Parameter: Treatment Value: Wounding vs. No Wounding
  misc_feature: MA Experiment ID: 108576 Result: Up-regulated in Transcription
  misc_feature: MA Experiment 108576 PARAMETER Experiment Name: At_42deg_Heat_cDNA_P Parameter: Temperature (deg C) Value: 42 vs. 22
  misc_feature: MA Experiment 108576 PARAMETER Experiment Name: At_42deg_Heat_cDNA_P Parameter: Timepoint (hr) Value: 1
  misc_feature: MA Experiment 108576 PARAMETER Experiment Name: At_42deg_Heat_cDNA_P Parameter: Tissue Value: Aerial
  misc_feature: MA Experiment ID: 108585 Result: Up-regulated in Transcription
  misc_feature: MA Experiment 108585 PARAMETER Experiment Name: At_5mM_NaNP_cDNA_P Parameter: Timepoint (hr) Value: 6
  misc_feature: MA Experiment 108585 PARAMETER Experiment Name: At_5mM_NaNP_cDNA_P Parameter: Tissue Value: Aerial
  misc_feature: MA Experiment 108585 PARAMETER Experiment Name: At_5mM_NaNP_cDNA_P Parameter: Treatment Value: null
  misc_feature: MA Experiment ID: 108594 Result: Down-regulated in Transcription
  misc_feature: MA Experiment 108594 PARAMETER Experiment Name: At_Ler-rhl_Root_cDNA_P Parameter: Plant Line Value: null
  misc_feature: MA Experiment ID: 108667 Result: Up-regulated in Transcription
  misc_feature: MA Experiment 108667 PARAMETER Experiment Name: At_2mM_SA_cDNA_P Parameter: Plant Line Value: WS
  misc_feature: MA Experiment 108667 PARAMETER Experiment Name: At_2mM_SA_cDNA_P Parameter: Timepoint (hr) Value: 1
  misc_feature: MA Experiment 108667 PARAMETER Experiment Name: At_2mM_SA_cDNA_P Parameter: Treatment Value: 2mM SA vs. No Treatment
  misc_feature: MA Experiment ID: 108668 Result: Up-regulated in Transcription
  misc_feature: MA Experiment 108668 PARAMETER Experiment Name: At_2mM_SA_cDNA_P Parameter: Plant Line Value: WS
  misc_feature: MA Experiment 108668 PARAMETER Experiment Name: At_2mM_SA_cDNA_P Parameter: Timepoint (hr) Value: 6
  misc_feature: MA Experiment 108668 PARAMETER Experiment Name: At_2mM_SA_cDNA_P Parameter: Treatment Value: 2mM SA vs. No Treatment
  misc_feature: MA Experiment ID: 20000070 Result: Up-regulated in Transcription
  misc_feature: MA Experiment 20000070 PARAMETER Experiment Name: At_100uM_ABA_Mutants_cDNA_P Parameter: Plant Line Value: CS24
  misc_feature: MA Experiment 20000070 PARAMETER Experiment Name: At_100uM_ABA_Mutants_cDNA_P Parameter: Timepoint (hr) Value: 6
  misc_feature: MA Experiment 20000070 PARAMETER Experiment Name: At_100uM_ABA_Mutants_cDNA_P Parameter: Tissue Value: Aerial
  misc_feature: MA Experiment 20000070 PARAMETER Experiment Name: At_100uM_ABA_Mutants_cDNA_P Parameter: Treatment Value: 100uM ABA vs. No Treatment
  misc_feature: MA Experiment ID: 20000072 Result: Up-regulated in Transcription
  misc_feature: MA Experiment 20000072 PARAMETER Experiment Name: At_100uM_ABA_Mutants_cDNA_P Parameter: Plant Line Value: CS8105
  misc_feature: MA Experiment 20000072 PARAMETER Experiment Name: At_100uM_ABA_Mutants_cDNA_P Parameter: Timepoint (hr) Value: 6
  misc_feature: MA Experiment 20000072 PARAMETER Experiment Name: At_100uM_ABA_Mutants_cDNA_P Parameter: Tissue Value: Aerial
  misc_feature: MA Experiment 20000072 PARAMETER Experiment Name: At_100uM_ABA_Mutants_cDNA_P Parameter: Treatment Value: 100uM ABA vs. No Treatment
  misc_feature: MA Experiment ID: 20000093 Result: Up-regulated in Transcription
  misc_feature: MA Experiment 20000093 PARAMETER Experiment Name: At_42deg_Heat_cDNA_P Parameter: Temperature (deg C) Value: 42 vs. 22
  misc_feature: MA Experiment 20000093 PARAMETER Experiment Name: At_42deg_Heat_cDNA_P Parameter: Timepoint (hr) Value: 0.5
  misc_feature: MA Experiment 20000093 PARAMETER Experiment Name: At_42deg_Heat_cDNA_P Parameter: Tissue Value: Aerial
  misc_feature: MA Experiment ID: 20000112 Result: Up-regulated in Transcription
  misc_feature: MA Experiment 20000112 PARAMETER Experiment Name: At_42deg_Heat_cDNA_P Parameter: Temperature (deg C) Value: 42 vs. 22
  misc_feature: MA Experiment 20000112 PARAMETER Experiment Name: At_42deg_Heat_cDNA_P Parameter: Timepoint (hr) Value: 2
  misc_feature: MA Experiment 20000112 PARAMETER Experiment Name: At_42deg_Heat_cDNA_P Parameter: Tissue Value: Aerial
  misc_feature: MA Experiment ID: 20000180 Result: Down-regulated in Transcription
  misc_feature: MA Experiment 20000180 PARAMETER Experiment Name: At_Germinating_Seeds_P Parameter: Age (hr) Value: 24 vs. 0
  misc_feature: MA Experiment 20000180 PARAMETER Experiment Name: At_Germinating_Seeds_P Parameter: Tissue Value: Germinating Seeds
  misc_feature: MA Experiment ID: 20000182 Result: Up-regulated in Transcription
  misc_feature: MA Experiment 20000182 PARAMETER Experiment Name: At_2mM_SA_P Parameter: Age (day) Value: 14
  misc_feature: MA Experiment 20000182 PARAMETER Experiment Name: At_2mM_SA_P Parameter: Organism Value: A. thaliana
  misc_feature: MA Experiment 20000182 PARAMETER Experiment Name: At_2mM_SA_P Parameter: Plant Line Value: WS
  misc_feature: MA Experiment 20000182 PARAMETER Experiment Name: At_2mM_SA_P Parameter: Timepoint (hr) Value: 6
  misc_feature: MA Experiment 20000182 PARAMETER Experiment Name: At_2mM_SA_P Parameter: Tissue Value: Aerial
  misc_feature: MA Experiment 20000182 PARAMETER Experiment Name: At_2mM_SA_P Parameter: Treatment Value: 2mM SA vs. No Treatment
  misc_feature: MA Experiment ID: 20000185 Result: Up-regulated in Transcription
  misc_feature: MA Experiment 20000185 PARAMETER Experiment Name: At_Roots__P Parameter: Age (day) Value: 7 vs. 21
  misc_feature: MA Experiment 20000185 PARAMETER Experiment Name: At_Roots__P Parameter: Organism Value: A. thaliana
  misc_feature: MA Experiment 20000185 PARAMETER Experiment Name: At_Roots__P Parameter: Tissue Value: Roots vs. Whole Plant
  misc_feature: MA Experiment ID: 20000224 Result: Up-regulated in Transcription
  misc_feature: MA Experiment ID: 20000234 Result: Down-regulated in Transcription
  misc_feature: MA Experiment 20000234 PARAMETER Experiment Name: At_Siliques_P Parameter: Age (day) Value: 21
  misc_feature: MA Experiment 20000234 PARAMETER Experiment Name: At_Siliques_P Parameter: Organism Value: A. thaliana
  misc_feature: MA Experiment 20000234 PARAMETER Experiment Name: At_Siliques_P Parameter: Plant Line Value: WS
  misc_feature: MA Experiment 20000234 PARAMETER Experiment Name: At_Siliques_P Parameter: Tissue Value: Less Than 5mm Siliques vs. Whole Plant
  misc_feature: MA Experiment ID: 20000235 Result: Down-regulated in Transcription
  misc_feature: MA Experiment 20000235 PARAMETER Experiment Name: At_Siliques_P Parameter: Age (day) Value: 21
  misc_feature: MA Experiment 20000235 PARAMETER Experiment Name: At_Siliques_P Parameter: Organism Value: A. thaliana
  misc_feature: MA Experiment 20000235 PARAMETER Experiment Name: At_Siliques_P Parameter: Plant Line Value: WS
  misc_feature: MA Experiment 20000235 PARAMETER Experiment Name: At_Siliques_P Parameter: Tissue Value: 5-10mm Siliques vs. Whole Plant
  misc_feature: MA Experiment ID: 20000456 Result: Up-regulated in Transcription
  misc_feature: MA Experiment 20000456 PARAMETER Experiment Name: At_100uM_BA_P Parameter: Age (day) Value: 14
  misc_feature: MA Experiment 20000456 PARAMETER Experiment Name: At_100uM_BA_P Parameter: Organism Value: A. thaliana
  misc_feature: MA Experiment 20000456 PARAMETER Experiment Name: At_100uM_BA_P Parameter: Plant Line Value: WS
  misc_feature: MA Experiment 20000456 PARAMETER Experiment Name: At_100uM_BA_P Parameter: Timepoint (hr) Value: 6
  misc_feature: MA Experiment 20000456 PARAMETER Experiment Name: At_100uM_BA_P Parameter: Tissue Value: Aerial
  misc_feature: MA Experiment 20000456 PARAMETER Experiment Name: At_100uM_BA_P Parameter: Treatment Value: 100uM BA vs. No Treatment
  misc_feature: MA Experiment ID: 20000527 Result: Down-regulated in Transcription
  misc_feature: MA Experiment 20000527 PARAMETER Experiment Name: At_10percent_PEG_P Parameter: Age (day) Value: 20
  misc_feature: MA Experiment 20000527 PARAMETER Experiment Name: At_10percent_PEG_P Parameter: Organism Value: A. thaliana
  misc_feature: MA Experiment 20000527 PARAMETER Experiment Name: At_10percent_PEG_P Parameter: Plant Line Value: WS
  misc_feature: MA Experiment 20000527 PARAMETER Experiment Name: At_10percent_PEG_P Parameter: Timepoint (day) Value: 20
  misc_feature: MA Experiment 20000527 PARAMETER Experiment Name: At_10percent_PEG_P Parameter: Tissue Value: Whole Plant
  misc_feature: MA Experiment 20000527 PARAMETER Experiment Name: At_10percent_PEG_P Parameter: Treatment Value: 10percent PEG vs. No Treatment
  misc_feature: MA Experiment ID: 20000709 Result: Up-regulated in Transcription
  misc_feature: MA Experiment 20000709 PARAMETER Experiment Name: At_15mM_NH4NO3_L-to-H_P Parameter: Age (hr) Value: 14
  misc_feature: MA Experiment 20000709 PARAMETER Experiment Name: At_15mM_NH4NO3_L-to-H_P Parameter: Organism Value: A. thaliana
  misc_feature: MA Experiment 20000709 PARAMETER Experiment Name: At_15mM_NH4NO3_L-to-H_P Parameter: Plant Line Value: WS
  misc_feature: MA Experiment 20000709 PARAMETER Experiment Name: At_15mM_NH4NO3_L-to-H_P Parameter: Timepoint (hr) Value: 4
  misc_feature: MA Experiment 20000709 PARAMETER Experiment Name: At_15mM_NH4NO3_L-to-H_P Parameter: Tissue Value: Aerial
  misc_feature: MA Experiment 20000709 PARAMETER Experiment Name: At_15mM_NH4NO3_L-to-H_P Parameter: Treatment Value: 15mM NH4NO3 vs. 30mM Mannitol
  misc_feature: MA Experiment ID: 20001450 Result: Down-regulated in Transcription
  misc_feature: MA Experiment 20001450 PARAMETER Experiment Name: At_Far-red-induction_P Parameter: Age (day) Value: 7
  misc_feature: MA Experiment 20001450 PARAMETER Experiment Name: At_Far-red-induction_P Parameter: Light Value: Far-red vs. White
  misc_feature: MA Experiment 20001450 PARAMETER Experiment Name: At_Far-red-induction_P Parameter: Organism Value: A. thaliana
  misc_feature: MA Experiment 20001450 PARAMETER Experiment Name: At_Far-red-induction_P Parameter: Plant Line Value: Columbia
  misc_feature: MA Experiment 20001450 PARAMETER Experiment Name: At_Far-red-induction_P Parameter: Timepoint (hr) Value: 8
  misc_feature: MA Experiment 20001450 PARAMETER Experiment Name: At_Far-red-induction_P Parameter: Tissue Value: Whole Plant
  misc_feature: MA Experiment ID: 20001451 Result: Down-regulated in Transcription
  misc_feature: MA Experiment 20001451 PARAMETER Experiment Name: At_Far-red-induction_P Parameter: Age (day) Value: 7
  misc_feature: MA Experiment 20001451 PARAMETER Experiment Name: At_Far-red-induction_P Parameter: Light Value: Far-red vs. White
  misc_feature: MA Experiment 20001451 PARAMETER Experiment Name: At_Far-red-induction_P Parameter: Organism Value: A. thaliana
  misc_feature: MA Experiment 20001451 PARAMETER Experiment Name: At_Far-red-induction_P Parameter: Plant Line Value: Columbia
  misc_feature: MA Experiment 20001451 PARAMETER Experiment Name: At_Far-red-induction_P Parameter: Timepoint (hr) Value: 24
  misc_feature: MA Experiment 20001451 PARAMETER Experiment Name: At_Far-red-induction_P Parameter: Tissue Value: Whole Plant
  misc_feature: MA Experiment ID: 20001554 Result: Down-regulated in Transcription
  misc_feature: MA Experiment 20001554 PARAMETER Experiment Name: At_Drought_Soil_Dry_P Parameter: Age (day) Value: 21
  misc_feature: MA Experiment 20001554 PARAMETER Experiment Name: At_Drought_Soil_Dry_P Parameter: Organism Value: A. thaliana
  misc_feature: MA Experiment 20001554 PARAMETER Experiment Name: At_Drought_Soil_Dry_P Parameter: Plant Line Value: WS
  misc_feature: MA Experiment 20001554 PARAMETER Experiment Name: At_Drought_Soil_Dry_P Parameter: Post Timepoint (hr) Value: None
  misc_feature: MA Experiment 20001554 PARAMETER Experiment Name: At_Drought_Soil_Dry_P Parameter: Post-Treatment Value: None
  misc_feature: MA Experiment 20001554 PARAMETER Experiment Name: At_Drought_Soil_Dry_P Parameter: Timepoint (day) Value: 7
  misc_feature: MA Experiment 20001554 PARAMETER Experiment Name: At_Drought_Soil_Dry_P Parameter: Treatment Value: Drought vs. No Drought
  misc_feature: MA Experiment ID: 20001558 Result: Up-regulated in Transcription
  misc_feature: MA Experiment 20001558 PARAMETER Experiment Name: At_Drought_Soil_Dry_P Parameter: Age (day) Value: 27
  misc_feature: MA Experiment 20001558 PARAMETER Experiment Name: At_Drought_Soil_Dry_P Parameter: Organism Value: A. thaliana
  misc_feature: MA Experiment 20001558 PARAMETER Experiment Name: At_Drought_Soil_Dry_P Parameter: Plant Line Value: WS
  misc_feature: MA Experiment 20001558 PARAMETER Experiment Name: At_Drought_Soil_Dry_P Parameter: Post Timepoint (hr) Value: 6
  misc_feature: MA Experiment 20001558 PARAMETER Experiment Name: At_Drought_Soil_Dry_P Parameter: Post-Treatment Value: Re-Water vs. No Drought
  misc_feature: MA Experiment 20001558 PARAMETER Experiment Name: At_Drought_Soil_Dry_P Parameter: Timepoint (day) Value: 13
  misc_feature: MA Experiment 20001558 PARAMETER Experiment Name: At_Drought_Soil_Dry_P Parameter: Treatment Value: Drought vs. No Drought
  misc_feature: MA Experiment ID: 20001560 Result: Up-regulated in Transcription
  misc_feature: MA Experiment 20001560 PARAMETER Experiment Name: At_Drought_Soil_Dry_P Parameter: Age (day) Value: 28
  misc_feature: MA Experiment 20001560 PARAMETER Experiment Name: At_Drought_Soil_Dry_P Parameter: Organism Value: A. thaliana
  misc_feature: MA Experiment 20001560 PARAMETER Experiment Name: At_Drought_Soil_Dry_P Parameter: Plant Line Value: WS
  misc_feature: MA Experiment 20001560 PARAMETER Experiment Name: At_Drought_Soil_Dry_P Parameter: Post Timepoint (hr) Value: None
  misc_feature: MA Experiment 20001560 PARAMETER Experiment Name: At_Drought_Soil_Dry_P Parameter: Post-Treatment Value: None
  misc_feature: MA Experiment 20001560 PARAMETER Experiment Name: At_Drought_Soil_Dry_P Parameter: Timepoint (day) Value: 14
  misc_feature: MA Experiment 20001560 PARAMETER Experiment Name: At_Drought_Soil_Dry_P Parameter: Treatment Value: Drought vs. No Drought
atagtaaactcaagtaatcaagcaagtaaacgaaacataaaaataaaagtagtgcaagaaacagaggagttagataccaaaaagtgagagatatcgaatggcggagaaagaagagagtgtgaagcttctagggttttgggcaagcccttttagtcgtcgagtcgagatggctctcaaactcaaaggcgtgccatacgaatacttggaagaagatttgcccaacaagacccctttgcttctggagctaaacccgcttcacaagaaagttccggttcttgtccacaatgacaaaatattactcgagtcacatctgattctcgaatacatcgatcagacgtggaagaacagtccaattcttcctcaagatccttacgagaaggccatggctcgattttgggccaagttcatcgatgaccagatcctaacactagggtttaggtcccttgtaaaagcagagaaaggaagagaggttgctattgaagagactcgggaactgcttatgtttcttgagaaagaagtcactggaaaagatttcttcggtggcaagacaatcggattcttggacatgatcgcaggaagtatgatcccattttgtctagctagactttggaaaggtattggaattgatatgattccagaggagaagtttccggaattaaatagatggatcaagaatttggaagaagttgaggcagtgaggggatgtattcctccaagagagaaacaaattgagcgcatgaccaaaattgcagagacaattaagtctgcctaaattaaagatacttcttgcctacgaaaatatttgatttatatgcttgcatcgttttttatttatatttttattttttaaagtttttcgaaaaatagaatgacctaatatttaagtaaaaagatcaaaaacctatttgaaagttacagcaatcaaataacgtggtgtgtctggagattgtaaaagccaagactagaaggaaataagaataaaataac

SEQ ID NO: 77136 - protein, 224 aa, Arabidopsis thaliana
  peptide (1)..(224): Ceres Seq. ID no. 12561609
  misc_feature (87)..(198): Pfam Name: Glutathione S-transferase, C-terminal domain Pfam Description: Glutathione S-transferase, C-terminal domain
  misc_feature (1)..(224): Homolog of NCBI NO: 15227551 NR Description: glutathione transferase, putative; protein id: supported by cDNA: 38727., supported by cDNA: gi_11095999, by cDNA: gi_16226389 [Arabidopsis thaliana]
  misc_feature (1)..(223): Homolog of NCBI NO: 15227550 NR Description: glutathione transferase, putative; protein id: supported by cDNA: gi_11096001, supported by cDNA: gi_20453169
  misc_feature (1)..(224): Homolog of NCBI NO: 15227086 NR Description: glutathione transferase, putative; protein id: supported by cDNA: gi_11096005, supported by cDNA: gi_14423533
  misc_feature (1)..(224): Homolog of NCBI NO: 14423534 NR Description: putative glutathione S-transferase [Arabidopsis
  misc_feature (1)..(223): Homolog of NCBI NO: 15227087 NR Description: glutathione transferase, putative; protein id: supported by cDNA: gi_11096003 [Arabidopsis thaliana]
  misc_feature (1)..(224): Homolog of NCBI NO: 15227085 NR Description: glutathione transferase (103-1A); protein id: supported by cDNA: 6528., supported by cDNA: gi_17065199,
  misc_feature (4)..(224): Homolog of NCBI NO: 15227084 NR Description: glutathione transferase, putative; protein id: supported by cDNA: gi_11096007 [Arabidopsis thaliana]
  misc_feature (1)..(224): Homolog of NCBI NO: 15227082 NR Description: glutathione transferase, putative; protein id: supported by cDNA: 24361., supported by cDNA: gi_11096009, by cDNA: gi_15010755 [Arabidopsis thaliana]
MAEKEESVKLLGFWASPFSRRVEMALKLKGVPYEYLEEDLPNKTPLLLELNPLHKKVPVLVHNDKILLESHLILEYIDQTWKNSPILPQDPYEKAMARFWAKFIDDQILTLGFRSLVKAEKGREVAIEETRELLMFLEKEVTGKDFFGGKTIGFLDMIAGSMIPFCLARLWKGIGIDMIPEEKFPELNRWIKNLEEVEAVRGCIPPREKQIERMTKIAETIKSA

SEQ ID NO: 77137 - protein, 201 aa, Arabidopsis thaliana
  peptide (1)..(201): Ceres Seq. ID no. 12561610
  misc_feature (64)..(175): Pfam Name: Glutathione S-transferase, C-terminal domain Pfam Description: Glutathione S-transferase, C-terminal domain
  misc_feature (1)..(201): Homolog of NCBI NO: 15227551 NR Description: glutathione transferase, putative; protein id: supported by cDNA: 38727., supported by cDNA: gi_11095999, by cDNA: gi_16226389 [Arabidopsis thaliana]
  misc_feature (1)..(200): Homolog of NCBI NO: 15227550 NR Description: glutathione transferase, putative; protein id: supported by cDNA: gi_11096001, supported by cDNA: gi_20453169
  misc_feature (1)..(201): Homolog of NCBI NO: 15227086 NR Description: glutathione transferase, putative; protein id: supported by cDNA: gi_11096005, supported by cDNA: gi_14423533
  misc_feature (1)..(201): Homolog of NCBI NO: 14423534 NR Description: putative glutathione S-transferase [Arabidopsis
  misc_feature (1)..(200): Homolog of NCBI NO: 15227087 NR Description: glutathione transferase, putative; protein id: supported by cDNA: gi_11096003 [Arabidopsis thaliana]
  misc_feature (1)..(201): Homolog of NCBI NO: 15227085 NR Description: glutathione transferase (103-1A); protein id: supported by cDNA: 6528., supported by cDNA: gi_17065199,
  misc_feature (1)..(201): Homolog of NCBI NO: 15227084 NR Description: glutathione transferase, putative; protein id: supported by cDNA: gi_11096007 [Arabidopsis thaliana]
  misc_feature (1)..(201): Homolog of NCBI NO: 15227082 NR Description: glutathione transferase, putative; protein id: supported by cDNA: 24361., supported by cDNA: gi_11096009, by cDNA: gi_15010755 [Arabidopsis thaliana]
MALKLKGVPYEYLEEDLPNKTPLLLELNPLHKKVPVLVHNDKILLESHLILEYIDQTWKNSPILPQDPYEKAMARFWAKFIDDQILTLGFRSLVKAEKGREVAIEETRELLMFLEKEVTGKDFFGGKTIGFLDMIAGSMIPFCLARLWKGIGIDMIPEEKFPELNRWIKNLEEVEAVRGCIPPREKQIERMTKIAETIKSA

SEQ ID NO: 77138 - protein, 129 aa, Arabidopsis thaliana
  peptide (1)..(129): Ceres Seq. ID no. 12561611
  misc_feature (1)..(103): Pfam Name: Glutathione S-transferase, C-terminal domain Pfam Description: Glutathione S-transferase, C-terminal domain
  misc_feature (1)..(129): Homolog of NCBI NO: 15227551 NR Description: glutathione transferase, putative; protein id: supported by cDNA: 38727., supported by cDNA: gi_11095999, by cDNA: gi_16226389 [Arabidopsis thaliana]
  misc_feature (1)..(128): Homolog of NCBI NO: 15227550 NR Description: glutathione transferase, putative; protein id: supported by cDNA: gi_11096001, supported by cDNA: gi_20453169
  misc_feature (1)..(129): Homolog of NCBI NO: 15227086 NR Description: glutathione transferase, putative; protein id: supported by cDNA: gi_11096005, supported by cDNA: gi_14423533
  misc_feature (1)..(129): Homolog of NCBI NO: 14423534 NR Description: putative glutathione S-transferase [Arabidopsis
  misc_feature (1)..(128): Homolog of NCBI NO: 15227087 NR Description: glutathione transferase, putative; protein id: supported by cDNA: gi_11096003 [Arabidopsis thaliana]
  misc_feature (1)..(129): Homolog of NCBI NO: 15227085 NR Description: glutathione transferase (103-1A); protein id: supported by cDNA: 6528., supported by cDNA: gi_17065199,
  misc_feature (1)..(129): Homolog of NCBI NO: 15227084 NR Description: glutathione transferase, putative; protein id: supported by cDNA: gi_11096007 [Arabidopsis thaliana]
  misc_feature (1)..(129): Homolog of NCBI NO: 15227082 NR Description: glutathione transferase, putative; protein id: supported by cDNA: 24361., supported by cDNA: gi_11096009, by cDNA: gi_15010755 [Arabidopsis thaliana]
MARFWAKFIDDQILTLGFRSLVKAEKGREVAIEETRELLMFLEKEVTGKDFFGGKTIGFLDMIAGSMIPFCLARLWKGIGIDMIPEEKFPELNRWIKNLEEVEAVRGCIPPREKQIERMTKIAETIKSA

SEQ ID NO: 77139 - DNA, 1219 bp, Arabidopsis thaliana
  misc_feature (1)..(1219): Ceres Seq. ID no. 12561639
aagaatacctgaaaacactttctattcataaaccctttacgacaaaacaataaagacgtctctcgatttatctttgtcttaatcaggaaactatttgacatttctttatcgattattacttcatattcgggtatggatgaagattttttcttacccgatttctcactagtagacattgatttcgactttaatatttacgaagaaaataatttatcacctgatgaatctttatcaaattcacgaagagctgatcaatcgtcaaagtttgatcatcaaatgcattttgagtgcctcagagagaagccaaaggcagcggtgaagcctatgatgaagatcaacaacaagcaacaactgatttcttttgatttctctagtaatgttatttcttctccagccgcggaggagatcattatggataaattggttggtcgtggaaccaaaagaaaaacatgttctcatggcacaagatctccggttcttgcgaaagaacatgttttagccgagagaaagcgccgtgagaagctttctgaaaaattcattgctctttcagctctccttcccgggcttaagaaggcggacaaggtaacgattcttgatgacgcgatctcgcgtatgaaacaactccaagaacaactaagaacgctcaaggaagaaaaagaagcaacgagacaaatggaatccatgattcttgtaaagaaatctaaagtgtttttcgacgaggaacctaacctatcatgttctccttcagttcatattgaattcgatcaagcattaccagaaatcgaagcgaaaatttctcaaaatgacattctcatccgaatcctttgcgagaaaagcaaagggtgcatgatcaacatactaaacacaattgaaaactttcaattgcgcattgaaaatagcatcgtattgccattcggagactcgactctcgacatcacagtccttgcacagatggataaagatttttcgatgagtatacttaaggatcttgtacggaacctgagactcgcaatggtttaggtcttctttcaagttttagtaacctgagactgtacattgacacaatcgtttcgtggatttgctatcgttttcttcttgagattttttcacacgtgcccacatgtttgatgtgtttttttagcaaagctatttccgataacgaccgttgagaattaatttagatgtaacattttttgtttgttaataatgaatttaaaat

SEQ ID NO: 77140 - protein, 295 aa, Arabidopsis thaliana
  peptide (1)..(295): Ceres Seq. ID no. 12561640
  misc_feature (116)..(165): Pfam Name: Helix-loop-helix DNA-binding domain Pfam Description: Helix-loop-helix DNA-binding domain
  misc_feature (1)..(295): Homolog of NCBI NO: 30681813 NR Description: bHLH protein [Arabidopsis thaliana]
  misc_feature (1)..(295): Homolog of NCBI NO: 20127016 NR Description: putative bHLH transcription factor [Arabidopsis
  misc_feature (1)..(274): Homolog of NCBI NO: 25412136 NR Description: probable bHLH transcription factor [imported] - thaliana >gi|3738090|gb|AAC63587.1| putative bHLH transcription [Arabidopsis thaliana] >gi|20197758|gb|AAM15235.1| putative bHLH
  misc_feature (1)..(294): Homolog of NCBI NO: 20127018 NR Description: putative bHLH transcription factor [Arabidopsis
  misc_feature (1)..(294): Homolog of NCBI NO: 30681819 NR Description: bHLH transcription factor -related [Arabidopsis
  misc_feature (1)..(274): Homolog of NCBI NO: 25412138 NR Description: probable bHLH transcription factor [imported] - thaliana >gi|3738091|gb|AAC63588.1| putative bHLH transcription
  misc_feature (80)..(294): Homolog of NCBI NO: 30681807 NR Description: bHLH protein family [Arabidopsis thaliana]
  misc_feature (82)..(294): Homolog of NCBI NO: 20127022 NR Description: putative bHLH transcription factor [Arabidopsis
  misc_feature (82)..(294): Homolog of NCBI NO: 30691602 NR Description: bHLH protein family [Arabidopsis thaliana]
MDEDFFLPDFSLVDIDFDFNIYEENNLSPDESLSNSRRADQSSKFDHQMHFECLREKPKAAVKPMMKINNKQQLISFDFSSNVISSPAAEEIIMDKLVGRGTKRKTCSHGTRSPVLAKEHVLAERKRREKLSEKFIALSALLPGLKKADKVTILDDAISRMKQLQEQLRTLKEEKEATRQMESMILVKKSKVFFDEEPNLSCSPSVHIEFDQALPEIEAKISQNDILIRILCEKSKGCMINILNTIENFQLRIENSIVLPFGDSTLDITVLAQMDKDFSMSILKDLVRNLRLAMV

SEQ ID NO: 77141 - protein, 247 aa, Arabidopsis thaliana
  peptide (1)..(247): Ceres Seq. ID no. 12561641
  misc_feature (68)..(117): Pfam Name: Helix-loop-helix DNA-binding domain Pfam Description: Helix-loop-helix DNA-binding domain
  misc_feature (1)..(247): Homolog of NCBI NO: 30681813 NR Description: bHLH protein [Arabidopsis thaliana]
  misc_feature (1)..(247): Homolog of NCBI NO: 20127016 NR Description: putative bHLH transcription factor [Arabidopsis
  misc_feature (1)..(226): Homolog of NCBI NO: 25412136 NR Description: probable bHLH transcription factor [imported] - thaliana >gi|3738090|gb|AAC63587.1| putative bHLH transcription [Arabidopsis thaliana] >gi|20197758|gb|AAM15235.1| putative bHLH
  misc_feature (1)..(246): Homolog of NCBI NO: 20127018 NR Description: putative bHLH transcription factor [Arabidopsis
  misc_feature (1)..(246): Homolog of NCBI NO: 30681819 NR Description: bHLH transcription factor -related [Arabidopsis
  misc_feature (1)..(226): Homolog of NCBI NO: 25412138 NR Description: probable bHLH transcription factor [imported] - thaliana >gi|3738091|gb|AAC63588.1| putative bHLH transcription
  misc_feature (32)..(246): Homolog of NCBI NO: 30681807 NR Description: bHLH protein family [Arabidopsis thaliana]
  misc_feature (34)..(246): Homolog of NCBI NO: 20127022 NR Description: putative bHLH transcription factor [Arabidopsis
  misc_feature (34)..(246): Homolog of NCBI NO: 30691602 NR Description: bHLH protein family [Arabidopsis thaliana]
MHFECLREKPKAAVKPMMKINNKQQLISFDFSSNVISSPAAEEIIMDKLVGRGTKRKTCSHGTRSPVLAKEHVLAERKRREKLSEKFIALSALLPGLKKADKVTILDDAISRMKQLQEQLRTLKEEKEATRQMESMILVKKSKVFFDEEPNLSCSPSVHIEFDQALPEIEAKISQNDILIRILCEKSKGCMINILNTIENFQLRIENSIVLPFGDSTLDITVLAQMDKDFSMSILKDLVRNLRLAMV

SEQ ID NO: 77142 - protein, 231 aa, Arabidopsis thaliana
  peptide (1)..(231): Ceres Seq. ID no. 12561642
  misc_feature (52)..(101): Pfam Name: Helix-loop-helix DNA-binding domain Pfam Description: Helix-loop-helix DNA-binding domain
  misc_feature (1)..(231): Homolog of NCBI NO: 30681813 NR Description: bHLH protein [Arabidopsis thaliana]
  misc_feature (1)..(231): Homolog of NCBI NO: 20127016 NR Description: putative bHLH transcription factor [Arabidopsis
  misc_feature (1)..(210): Homolog of NCBI NO: 25412136 NR Description: probable bHLH transcription factor [imported] - thaliana >gi|3738090|gb|AAC63587.1| putative bHLH transcription [Arabidopsis thaliana] >gi|20197758|gb|AAM15235.1| putative bHLH
  misc_feature (1)..(230): Homolog of NCBI NO: 20127018 NR Description: putative bHLH transcription factor [Arabidopsis
  misc_feature (1)..(230): Homolog of NCBI NO: 30681819 NR Description: bHLH transcription factor -related [Arabidopsis
  misc_feature (1)..(210): Homolog of NCBI NO: 25412138 NR Description: probable bHLH transcription factor [imported] - thaliana >gi|3738091|gb|AAC63588.1| putative bHLH transcription
  misc_feature (16)..(230): Homolog of NCBI NO: 30681807 NR Description: bHLH protein family [Arabidopsis thaliana]
  misc_feature (18)..(230): Homolog of NCBI NO: 20127022 NR Description: putative bHLH transcription factor [Arabidopsis
  misc_feature (18)..(230): Homolog of NCBI NO: 30691602 NR Description: bHLH protein family [Arabidopsis thaliana]
MMKINNKQQLISFDFSSNVISSPAAEEIIMDKLVGRGTKRKTCSHGTRSPVLAKEHVLAERKRREKLSEKFIALSALLPGLKKADKVTILDDAISRMKQLQEQLRTLKEEKEATRQMESMILVKKSKVFFDEEPNLSCSPSVHIEFDQALPEIEAKISQNDILIRILCEKSKGCMINILNTIENFQLRIENSIVLPFGDSTLDITVLAQMDKDFSMSILKDLVRNLRLAMV

SEQ ID NO: 77143 - DNA, 1766 bp, Arabidopsis thaliana
  misc_feature (1)..(1766): Ceres Seq. ID no. 12561671
  misc_feature: MA Experiment ID: 108433 Result: Down-regulated in Transcription
  misc_feature: MA Experiment 108433 PARAMETER Experiment Name: At_rhl_Mutant2_cDNA_P Parameter: Age (day) Value: 7
  misc_feature: MA Experiment 108433 PARAMETER Experiment Name: At_rhl_Mutant2_cDNA_P Parameter: Organism Value: A. thaliana
  misc_feature: MA Experiment 108433 PARAMETER Experiment Name: At_rhl_Mutant2_cDNA_P Parameter: Plant Line Value: rhl Mutant vs. wt landsburg
  misc_feature: MA Experiment 108433 PARAMETER Experiment Name: At_rhl_Mutant2_cDNA_P Parameter: Tissue Value: Roots
  misc_feature: MA Experiment ID: 108569 Result: Up-regulated in Transcription
  misc_feature: MA Experiment 108569 PARAMETER Experiment Name: At_0.001%_MeJA__cDNA_P Parameter: Timepoint (hr) Value: 6
  misc_feature: MA Experiment 108569 PARAMETER Experiment Name: At_0.001%_MeJA__cDNA_P Parameter: Tissue Value: Aerial
  misc_feature: MA Experiment 108569 PARAMETER Experiment Name: At_0.001%_MeJA__cDNA_P Parameter: Treatment Value: 0.001% MeJA vs. No Treatment
  misc_feature: MA Experiment ID: 108576 Result: Down-regulated in Transcription
  misc_feature: MA Experiment 108576 PARAMETER Experiment Name: At_42deg_Heat_cDNA_P Parameter: Temperature (deg C) Value: 42 vs. 22
  misc_feature: MA Experiment 108576 PARAMETER Experiment Name: At_42deg_Heat_cDNA_P Parameter: Timepoint (hr) Value: 1
  misc_feature: MA Experiment 108576 PARAMETER Experiment Name: At_42deg_Heat_cDNA_P Parameter: Tissue Value: Aerial
  misc_feature: MA Experiment ID: 108577 Result: Down-regulated in Transcription
  misc_feature: MA Experiment 108577 PARAMETER Experiment Name: At_42deg_Heat_cDNA_P Parameter: Temperature (deg C) Value: 42 vs. 22
  misc_feature: MA Experiment 108577 PARAMETER Experiment Name: At_42deg_Heat_cDNA_P Parameter: Timepoint (hr) Value: 6
  misc_feature: MA Experiment 108577 PARAMETER Experiment Name: At_42deg_Heat_cDNA_P Parameter: Tissue Value: Aerial
  misc_feature: MA Experiment ID: 108585 Result: Down-regulated in Transcription
  misc_feature: MA Experiment 108585 PARAMETER Experiment Name: At_5mM_NaNP_cDNA_P Parameter: Timepoint (hr) Value: 6
  misc_feature: MA Experiment 108585 PARAMETER Experiment Name: At_5mM_NaNP_cDNA_P Parameter: Tissue Value: Aerial
  misc_feature: MA Experiment 108585 PARAMETER Experiment Name: At_5mM_NaNP_cDNA_P Parameter: Treatment Value: null
  misc_feature: MA Experiment ID: 108595 Result: Down-regulated in Transcription
  misc_feature: MA Experiment 108595 PARAMETER Experiment Name: At_Ler-pi_Ovule_cDNA_P Parameter: Plant Line Value: null
  misc_feature: MA Experiment ID: 20000087 Result: Down-regulated in Transcription
  misc_feature: MA Experiment 20000087 PARAMETER Experiment Name: At_100uM_ABA_Mutants_cDNA_P Parameter: Plant Line Value: WS
  misc_feature: MA Experiment 20000087 PARAMETER Experiment Name: At_100uM_ABA_Mutants_cDNA_P Parameter: Timepoint (hr) Value: 6
  misc_feature: MA Experiment 20000087 PARAMETER Experiment Name: At_100uM_ABA_Mutants_cDNA_P Parameter: Tissue Value: Aerial
  misc_feature: MA Experiment 20000087 PARAMETER Experiment Name: At_100uM_ABA_Mutants_cDNA_P Parameter: Treatment Value: 100uM ABA vs. No Treatment
  misc_feature: MA Experiment ID: 20000171 Result: Down-regulated in Transcription
  misc_feature: MA Experiment 20000171 PARAMETER Experiment Name: At_42deg_Heat_P Parameter: Age (day) Value: 14
  misc_feature: MA Experiment 20000171 PARAMETER Experiment Name: At_42deg_Heat_P Parameter: Organism Value: A. thaliana
  misc_feature: MA Experiment 20000171 PARAMETER Experiment Name: At_42deg_Heat_P Parameter: Plant Line Value: WS
  misc_feature: MA Experiment 20000171 PARAMETER Experiment Name: At_42deg_Heat_P Parameter: Temperature (deg C) Value: 42 vs. 22
  misc_feature: MA Experiment 20000171 PARAMETER Experiment Name: At_42deg_Heat_P Parameter: Timepoint (hr) Value: 1
  misc_feature: MA Experiment 20000171 PARAMETER Experiment Name: At_42deg_Heat_P Parameter: Tissue Value: Aerial
  misc_feature: MA Experiment ID: 20000173 Result: Down-regulated in Transcription
  misc_feature: MA Experiment 20000173 PARAMETER Experiment Name: At_42deg_Heat_P Parameter: Age (day) Value: 14
  misc_feature: MA Experiment 20000173 PARAMETER Experiment Name: At_42deg_Heat_P Parameter: Organism Value: A. thaliana
  misc_feature: MA Experiment 20000173 PARAMETER Experiment Name: At_42deg_Heat_P Parameter: Plant Line Value: WS
  misc_feature: MA Experiment 20000173 PARAMETER Experiment Name: At_42deg_Heat_P Parameter: Temperature (deg C) Value: 42 vs. 22
  misc_feature: MA Experiment 20000173 PARAMETER Experiment Name: At_42deg_Heat_P Parameter: Timepoint (hr) Value: 6
  misc_feature: MA Experiment 20000173 PARAMETER Experiment Name: At_42deg_Heat_P Parameter: Tissue Value: Aerial
  misc_feature: MA Experiment ID: 20000179 Result: Up-regulated in Transcription
  misc_feature: MA Experiment 20000179 PARAMETER Experiment Name: At_Germinating_Seeds_P Parameter: Age (hr) Value: 6 vs. 0
  misc_feature: MA Experiment 20000179 PARAMETER Experiment Name: At_Germinating_Seeds_P Parameter: Tissue Value: Germinating Seeds
  misc_feature: MA Experiment ID: 20000180 Result: Up-regulated in Transcription
  misc_feature: MA Experiment 20000180 PARAMETER Experiment Name: At_Germinating_Seeds_P Parameter: Age (hr) Value: 24 vs. 0
  misc_feature: MA Experiment 20000180 PARAMETER Experiment Name: At_Germinating_Seeds_P Parameter: Tissue Value: Germinating Seeds
  misc_feature: MA Experiment ID: 20000227 Result: Up-regulated in Transcription
  misc_feature: MA Experiment 20000227 PARAMETER Experiment Name: At_Root-Tips-vs-Tops_P Parameter: Tissue Value: Root Tips vs. Root Tops
  misc_feature: MA Experiment ID: 20000235 Result: Up-regulated in Transcription
  misc_feature: MA Experiment 20000235 PARAMETER Experiment Name: At_Siliques_P Parameter: Age (day) Value: 21
  misc_feature: MA Experiment 20000235 PARAMETER Experiment Name: At_Siliques_P Parameter: Organism Value: A. thaliana
  misc_feature: MA Experiment 20000235 PARAMETER Experiment Name: At_Siliques_P Parameter: Plant Line Value: WS
  misc_feature: MA Experiment 20000235 PARAMETER Experiment Name: At_Siliques_P Parameter: Tissue Value: 5-10mm Siliques vs. Whole Plant
  misc_feature: MA Experiment ID: 20000437 Result: Down-regulated in Transcription
  misc_feature: MA Experiment 20000437 PARAMETER Experiment Name: At_Drought_P Parameter: Age (day) Value: 8
  misc_feature: MA Experiment 20000437 PARAMETER Experiment Name: At_Drought_P Parameter: Organism Value: A. thaliana
  misc_feature: MA Experiment 20000437 PARAMETER Experiment Name: At_Drought_P Parameter: Plant Line Value: WS
  misc_feature: MA Experiment 20000437 PARAMETER Experiment Name: At_Drought_P Parameter: Timepoint (hr) Value: 24
  misc_feature: MA Experiment 20000437 PARAMETER Experiment Name: At_Drought_P Parameter: Tissue Value: Whole Plant
  misc_feature: MA Experiment 20000437 PARAMETER Experiment Name: At_Drought_P Parameter: Treatment Value: Drought vs. No Drought
  misc_feature: MA Experiment ID: 20001247 Result: Up-regulated in Transcription
  misc_feature: MA Experiment 20001247 PARAMETER Experiment Name: At_Far-red-induction_P Parameter: Age (day) Value: 7
  misc_feature: MA Experiment 20001247 PARAMETER Experiment Name: At_Far-red-induction_P Parameter: Light Value: Far-red vs. White
  misc_feature: MA Experiment 20001247 PARAMETER Experiment Name: At_Far-red-induction_P Parameter: Organism Value: A. thaliana
  misc_feature: MA Experiment 20001247 PARAMETER Experiment Name: At_Far-red-induction_P Parameter: Plant Line Value: Columbia
  misc_feature: MA Experiment 20001247 PARAMETER Experiment Name: At_Far-red-induction_P Parameter: Timepoint (hr) Value: 1
  misc_feature: MA Experiment 20001247 PARAMETER Experiment Name: At_Far-red-induction_P Parameter: Tissue Value: Whole Plant
  misc_feature: MA Experiment ID: 20001554 Result: Down-regulated in Transcription
  misc_feature: MA Experiment 20001554 PARAMETER Experiment Name: At_Drought_Soil_Dry_P Parameter: Age (day) Value: 21
  misc_feature: MA Experiment 20001554 PARAMETER Experiment Name: At_Drought_Soil_Dry_P Parameter: Organism Value: A. thaliana
  misc_feature: MA Experiment 20001554 PARAMETER Experiment Name: At_Drought_Soil_Dry_P Parameter: Plant Line Value: WS
  misc_feature: MA Experiment 20001554 PARAMETER Experiment Name: At_Drought_Soil_Dry_P Parameter: Post Timepoint (hr) Value: None
  misc_feature: MA Experiment 20001554 PARAMETER Experiment Name: At_Drought_Soil_Dry_P Parameter: Post-Treatment Value: None
  misc_feature: MA Experiment 20001554 PARAMETER Experiment Name: At_Drought_Soil_Dry_P Parameter: Timepoint (day) Value: 7
  misc_feature: MA Experiment 20001554 PARAMETER Experiment Name: At_Drought_Soil_Dry_P Parameter: Treatment Value: Drought vs. No Drought
  misc_feature: MA Experiment ID: 20001555 Result: Down-regulated in Transcription
  misc_feature: MA Experiment 20001555 PARAMETER Experiment Name: At_Drought_Soil_Dry_P Parameter: Age (day) Value: 24
  misc_feature: MA Experiment 20001555 PARAMETER Experiment Name: At_Drought_Soil_Dry_P Parameter: Organism Value: A. thaliana
  misc_feature: MA Experiment 20001555 PARAMETER Experiment Name: At_Drought_Soil_Dry_P Parameter: Plant Line Value: WS
  misc_feature: MA Experiment 20001555 PARAMETER Experiment Name: At_Drought_Soil_Dry_P Parameter: Post Timepoint (hr) Value: None
  misc_feature: MA Experiment 20001555 PARAMETER Experiment Name: At_Drought_Soil_Dry_P Parameter: Post-Treatment Value: None
  misc_feature: MA Experiment 20001555 PARAMETER Experiment Name: At_Drought_Soil_Dry_P Parameter: Timepoint (day) Value: 10
  misc_feature: MA Experiment 20001555 PARAMETER Experiment Name: At_Drought_Soil_Dry_P Parameter: Treatment Value: Drought vs. No Drought
  misc_feature: MA Experiment ID: 20001557 Result: Up-regulated in Transcription
  misc_feature: MA Experiment 20001557 PARAMETER Experiment Name: At_Drought_Soil_Dry_P Parameter: Age (day) Value: 27
  misc_feature: MA Experiment 20001557 PARAMETER Experiment Name: At_Drought_Soil_Dry_P Parameter: Organism Value: A. thaliana
  misc_feature: MA Experiment 20001557 PARAMETER Experiment Name: At_Drought_Soil_Dry_P Parameter: Plant Line Value: WS
  misc_feature: MA Experiment 20001557 PARAMETER Experiment Name: At_Drought_Soil_Dry_P Parameter: Post Timepoint (hr) Value: 3
  misc_feature: MA Experiment 20001557 PARAMETER Experiment Name: At_Drought_Soil_Dry_P Parameter: Post-Treatment Value: Re-Water vs. No Drought
  misc_feature: MA Experiment 20001557 PARAMETER Experiment Name: At_Drought_Soil_Dry_P Parameter: Timepoint (day) Value: 13
  misc_feature: MA Experiment 20001557 PARAMETER Experiment Name: At_Drought_Soil_Dry_P Parameter: Treatment Value: Drought vs. No Drought
  misc_feature: MA Experiment ID: 20001558 Result: Up-regulated in Transcription
  misc_feature: MA Experiment 20001558 PARAMETER Experiment Name: At_Drought_Soil_Dry_P Parameter: Age (day) Value: 27
  misc_feature: MA Experiment 20001558 PARAMETER Experiment Name: At_Drought_Soil_Dry_P Parameter: Organism Value: A. thaliana
  misc_feature: MA Experiment 20001558 PARAMETER Experiment Name: At_Drought_Soil_Dry_P Parameter: Plant Line Value: WS
  misc_feature: MA Experiment 20001558 PARAMETER Experiment Name: At_Drought_Soil_Dry_P Parameter: Post Timepoint (hr) Value: 6
  misc_feature: MA Experiment 20001558 PARAMETER Experiment Name: At_Drought_Soil_Dry_P Parameter: Post-Treatment Value: Re-Water vs. No Drought
  misc_feature: MA Experiment 20001558 PARAMETER Experiment Name: At_Drought_Soil_Dry_P Parameter: Timepoint (day) Value: 13
  misc_feature: MA Experiment 20001558 PARAMETER Experiment Name: At_Drought_Soil_Dry_P Parameter: Treatment Value: Drought vs. No Drought
  misc_feature: MA Experiment ID: 20001906 Result: Down-regulated in Transcription
  misc_feature: MA Experiment 20001906 PARAMETER Experiment Name: At_Drought_Reproduction_P Parameter: Age (day) Value: 35
  misc_feature: MA Experiment 20001906 PARAMETER Experiment Name: At_Drought_Reproduction_P Parameter: Organism Value: A. thaliana
  misc_feature: MA Experiment 20001906 PARAMETER Experiment Name: At_Drought_Reproduction_P Parameter: Plant Line Value: WS
  misc_feature: MA Experiment 20001906 PARAMETER Experiment Name: At_Drought_Reproduction_P Parameter: Timepoint (day) Value: 5
  misc_feature: MA Experiment 20001906 PARAMETER Experiment Name: At_Drought_Reproduction_P Parameter: Tissue Value: Siliques
  misc_feature: MA Experiment 20001906 PARAMETER Experiment Name: At_Drought_Reproduction_P Parameter: Treatment Value: Drought vs. No Drought
  misc_feature: MA Experiment ID: 20001911 Result: Down-regulated in Transcription
  misc_feature: MA Experiment 20001911 PARAMETER Experiment Name: At_Drought_Reproduction_P Parameter: Age (day) Value: 40
  misc_feature: MA Experiment 20001911 PARAMETER Experiment Name: At_Drought_Reproduction_P Parameter: Organism Value: A. thaliana
  misc_feature: MA Experiment 20001911 PARAMETER Experiment Name: At_Drought_Reproduction_P Parameter: Plant Line Value: WS
  misc_feature: MA Experiment 20001911 PARAMETER Experiment Name: At_Drought_Reproduction_P Parameter: Timepoint (day) Value: 10
  misc_feature: MA Experiment 20001911 PARAMETER Experiment Name: At_Drought_Reproduction_P Parameter: Tissue Value: Flowers
  misc_feature: MA Experiment 20001911 PARAMETER Experiment Name: At_Drought_Reproduction_P Parameter: Treatment Value: Drought vs. No Drought
aagagcaagagagtggtttgattcaatttttaaaattctaaataaaactccaaccgtgaatccagccatgaaactctttttagaaaatccttttttataacaaataattcctctgcttcttcttcttcttcgtttatttcaccttttttggtttctttagctcagaaaaagcccattctttttttctattcttgtttattttaatcatactgtgcgtttctacaaagtttgttcctttcttcttcaactctctcactcacagtcacagagatctgtttcttttctttttttgctttcactcttctcttccagtgagagagagtgagagaaaatggtgaagcttttgttagtagggtttgttgtggctggtataatactgggaactcaagcaaatgaatatttagatttcaatgtgacagaaatagatcgcattgaggaattagagtttggattttccaaatatagctccaatttgaaccctttaatggttggtctcacccttatcagaggagctgattctggagctgtttgtttggatggaacattgcctggatatcacttgcaccgtggacatggatctggagctaatagctggctcattcaattggagggaggaggatggtgcaacaacatcaggacctgtgtatacaggaagactactcgacgtggttcctctaattatatggagaaacagcttcagtttacaggaatactgagtgacaaagctcaagaaaatcctgactttttcaactggaatagagttaagcttcgttactgcgatggcgcttctttcagtggagatggccagaatcaggctgcacaacttcagtttagaggagagcgtatctggagagccgcaatagatgatttgaaggcgaatggaatgcgatacgccaatcaggcacttctctccggatgctctgctggtggtttagcagcaatcttgcgctgcgatgagtttaggaacttattccctggatcaaccaaagtcaagtgcttgagtgatgcaggcttgttcttggacactgccgatgtttcaggcggccgcacaatcaggaacttatacaatggtgtcgtagaattgcagagtgtgaagaacaatcttccacgtatatgcacaaaccatcttgatccaacctcgtgtttcttcccacaaaatctgatcagtcaaatgaaaactccactttttatcgtcaacgcagcatatgatacatggcagattcaaagcagtatagctccaacatcagctgatcctagtggattttggcatgactgcagactaaaccatggaaaatgtactcctgcacagttgagattcttgcaaggattcagggaacagatgcttagagtagtcaagggcttctcaatgtctagacagaatggattgttcatcaattcttgctttgctcactgccaaaccgagagacaagatacttggtttgccgatgattctcctgttatcaggaaaaaggcggtggcaatagctgtaggagattggtatttcgatagagcggaagtgaagttagtcgattgcccatacccgtgtgacaagagctgccacaacttggtgttcagatgattgtttgactatgttctttattctctctcatatatacataccttagaaaatttctttctttcaaaaggaaagattttgtatcctttggtagtaaccaatgcctcattggtatatgattaagtgtatcgtggaaaatcataataaaaaaacaaaacaaaacaaagtttgcttaaaaagagttcaatgt

SEQ ID NO: 77144 - protein, 415 aa, Arabidopsis thaliana; identical to SEQ ID NO: 35190
  peptide (1)..(415): Ceres Seq. ID no. 12561672
  misc_feature (37)..(399): Pfam Name: Pectinacetylesterase Pfam Description: Pectinacetylesterase
  misc_feature (1)..(415): Homolog of NCBI NO: 18397406 NR Description: pectinacetylesterase, putative; protein id: supported by cDNA: gi_15292826, supported by cDNA: gi_16226324, by cDNA: gi_20465792 [Arabidopsis thaliana]
  misc_feature (1)..(252): Homolog of NCBI NO: 6714404 NR Description: putative pectinacetylesterase [Arabidopsis
  misc_feature (296)..(415): Homolog of NCBI NO: 6714404 NR Description: putative pectinacetylesterase [Arabidopsis
  misc_feature (1)..(415): Homolog of NCBI NO: 7487997 NR Description: pectin acetylesterase homolog F21E10.11 - thaliana >gi|3047082|gb|AAC13595.1| similar to Vigna radiata
  misc_feature (4)..(415): Homolog of NCBI NO: 25347293 NR Description: probable pectinacetylesterase precursor T8L23.6 - Arabidopsis thaliana >gi|12321351|gb|AAG50747.1|AC079733_15
  misc_feature (4)..(415): Homolog of NCBI NO: 30696158 NR Description: pectinacetylesterase, putative [Arabidopsis
  misc_feature (4)..(415): Homolog of NCBI NO: 21703105 NR Description: At1g57590/T8L23_6 [Arabidopsis thaliana]
  misc_feature (52)..(414): Homolog of NCBI NO: 28392968 NR Description: putative pectinacetylesterase [Arabidopsis >gi|28827554|gb|AAO50621.1| putative pectinacetylesterase
  misc_feature (118)..(415): Homolog of NCBI NO: 30690308 NR Description: pectinacetylesterase, putative [Arabidopsis
  misc_feature (51)..(415): Homolog of NCBI NO: 15226462 NR Description: pectinacetylesterase, putative; protein id: supported by cDNA: gi_15450606 [Arabidopsis thaliana]

SEQ ID NO: 77145 - protein, 364 aa, Arabidopsis thaliana; identical to SEQ ID NO: 35191
  peptide (1)..(364): Ceres Seq. ID no. 12561673
  misc_feature (1)..(348): Pfam Name: Pectinacetylesterase Pfam Description: Pectinacetylesterase
  misc_feature (1)..(364): Homolog of NCBI NO: 18397406 NR Description: pectinacetylesterase, putative; protein id: supported by cDNA: gi_15292826, supported by cDNA: gi_16226324, by cDNA: gi_20465792 [Arabidopsis thaliana]
  misc_feature (1)..(201): Homolog of NCBI NO: 6714404 NR Description: putative pectinacetylesterase [Arabidopsis
  misc_feature (245)..(364): Homolog of NCBI NO: 6714404 NR Description: putative pectinacetylesterase [Arabidopsis
  misc_feature (1)..(364): Homolog of NCBI NO: 7487997 NR Description: pectin acetylesterase homolog F21E10.11 - thaliana >gi|3047082|gb|AAC13595.1| similar to Vigna radiata
  misc_feature (1)..(364): Homolog of NCBI NO: 25347293 NR Description: probable pectinacetylesterase precursor T8L23.6 - Arabidopsis thaliana >gi|12321351|gb|AAG50747.1|AC079733_15
  misc_feature (1)..(364): Homolog of NCBI NO: 30696158 NR Description: pectinacetylesterase, putative [Arabidopsis
  misc_feature (1)..(364): Homolog of NCBI NO: 21703105 NR Description: At1g57590/T8L23_6 [Arabidopsis thaliana]
  misc_feature (1)..(363): Homolog of NCBI NO: 28392968 NR Description: putative pectinacetylesterase [Arabidopsis >gi|28827554|gb|AAO50621.1| putative pectinacetylesterase
  misc_feature (67)..(364): Homolog of NCBI NO: 30690308 NR Description: pectinacetylesterase, putative [Arabidopsis
  misc_feature (1)..(364): Homolog of NCBI NO: 15226462 NR Description: pectinacetylesterase, putative; protein id: supported by cDNA: gi_15450606 [Arabidopsis thaliana]

SEQ ID NO: 77146 - protein, 298 aa, Arabidopsis thaliana; identical to SEQ ID NO: 35192
  peptide (1)..(298): Ceres Seq. ID no. 12561674
  misc_feature (1)..(282): Pfam Name: Pectinacetylesterase Pfam Description: Pectinacetylesterase
  misc_feature (1)..(298): Homolog of NCBI NO: 18397406 NR Description: pectinacetylesterase, putative; protein id: supported by cDNA: gi_15292826, supported by cDNA: gi_16226324, by cDNA: gi_20465792 [Arabidopsis thaliana]
  misc_feature (1)..(135): Homolog of NCBI NO: 6714404 NR Description: putative pectinacetylesterase [Arabidopsis
  misc_feature (179)..(298): Homolog of NCBI NO: 6714404 NR Description: putative pectinacetylesterase [Arabidopsis
  misc_feature (1)..(298): Homolog of NCBI NO: 7487997 NR Description: pectin acetylesterase homolog F21E10.11 - thaliana >gi|3047082|gb|AAC13595.1| similar to Vigna radiata
  misc_feature (1)..(298): Homolog of NCBI NO: 25347293 NR Description: probable pectinacetylesterase precursor T8L23.6 - Arabidopsis thaliana >gi|12321351|gb|AAG50747.1|AC079733_15
  misc_feature (1)..(298): Homolog of NCBI NO: 30696158 NR Description: pectinacetylesterase, putative [Arabidopsis
  misc_feature (1)..(298): Homolog of NCBI NO: 21703105 NR Description: At1g57590/T8L23_6 [Arabidopsis thaliana]
  misc_feature (1)..(297): Homolog of NCBI NO: 28392968 NR Description: putative pectinacetylesterase [Arabidopsis >gi|28827554|gb|AAO50621.1| putative pectinacetylesterase
  misc_feature (1)..(298): Homolog of NCBI NO: 30690308 NR Description: pectinacetylesterase, putative [Arabidopsis
  misc_feature (1)..(298): Homolog of NCBI NO: 15226462 NR Description: pectinacetylesterase, putative; protein id: supported by cDNA: gi_15450606 [Arabidopsis thaliana]

SEQ ID NO: 77147 - DNA, 1246 bp, Arabidopsis thaliana
  misc_feature (1)..(1246): Ceres Seq. ID no. 12561683
  misc_feature: MA Experiment ID: 108433 Result: Down-regulated in Transcription
  misc_feature: MA Experiment 108433 PARAMETER Experiment Name: At_rhl_Mutant2_cDNA_P Parameter: Age (day) Value: 7
  misc_feature: MA Experiment 108433 PARAMETER Experiment Name: At_rhl_Mutant2_cDNA_P Parameter: Organism Value: A. thaliana
  misc_feature: MA Experiment 108433 PARAMETER Experiment Name: At_rhl_Mutant2_cDNA_P Parameter: Plant Line Value: rhl Mutant vs. wt landsburg
  misc_feature: MA Experiment 108433 PARAMETER Experiment Name: At_rhl_Mutant2_cDNA_P Parameter: Tissue Value: Roots
  misc_feature: MA Experiment ID: 108434 Result: Up-regulated in Transcription
  misc_feature: MA Experiment 108434 PARAMETER Experiment Name: At_Root_Tips_cDNA_P Parameter: Tissue Value: Root Tips
  misc_feature: MA Experiment ID: 108435 Result: Up-regulated in Transcription
  misc_feature: MA Experiment 108435 PARAMETER Experiment Name: At_stm_Mutants_cDNA_P Parameter: Plant Line Value: wt Landsburg vs stm
  misc_feature: MA Experiment 108435 PARAMETER Experiment Name: At_stm_Mutants_cDNA_P Parameter: Tissue Value: Shoot Apical Meristem Region
  misc_feature: MA Experiment ID: 108462 Result: Down-regulated in Transcription
  misc_feature: MA Experiment 108462 PARAMETER Experiment Name: At_Germinating_Seeds_cDNA_P Parameter: Age (day) Value: 2 vs. 0
  misc_feature: MA Experiment 108462 PARAMETER Experiment Name: At_Germinating_Seeds_cDNA_P Parameter: Tissue Value: Germinating Seeds
  misc_feature: MA Experiment ID: 108463 Result: Down-regulated in Transcription
  misc_feature: MA Experiment 108463 PARAMETER Experiment Name: At_Germinating_Seeds_cDNA_P Parameter: Age (day) Value: 3 vs. 0
  misc_feature: MA Experiment 108463 PARAMETER Experiment Name: At_Germinating_Seeds_cDNA_P Parameter: Tissue Value: Germinating Seeds
  misc_feature: MA Experiment ID: 108489 Result: Up-regulated in Transcription
  misc_feature: MA Experiment ID: 108576 Result: Down-regulated in Transcription
  misc_feature: MA Experiment 108576 PARAMETER Experiment Name: At_42deg_Heat_cDNA_P Parameter: Temperature (deg C) Value: 42 vs. 22
  misc_feature: MA Experiment 108576 PARAMETER Experiment Name: At_42deg_Heat_cDNA_P Parameter: Timepoint (hr) Value: 1
  misc_feature: MA Experiment 108576 PARAMETER Experiment Name: At_42deg_Heat_cDNA_P Parameter: Tissue Value: Aerial
  misc_feature: MA Experiment ID: 108595 Result: Down-regulated in Transcription
  misc_feature: MA Experiment 108595 PARAMETER Experiment Name: At_Ler-pi_Ovule_cDNA_P Parameter: Plant Line Value: null
  misc_feature: MA Experiment ID: 108607 Result: Down-regulated in Transcription
  misc_feature: MA Experiment 108607 PARAMETER Experiment Name: At_100uM_ABA_cDNA_P Parameter: Timepoint (hr) Value: 4
  misc_feature: MA Experiment 108607 PARAMETER Experiment Name: At_100uM_ABA_cDNA_P Parameter: Tissue Value: Aerial
  misc_feature: MA Experiment 108607 PARAMETER Experiment Name: At_100uM_ABA_cDNA_P Parameter: Treatment Value: 100uM ABA vs. No Treatment
  misc_feature: MA Experiment ID: 108609 Result: Down-regulated in Transcription
  misc_feature: MA Experiment 108609 PARAMETER Experiment Name: At_100uM_ABA_cDNA_P Parameter: Timepoint (hr) Value: 24
  misc_feature: MA Experiment 108609 PARAMETER Experiment Name: At_100uM_ABA_cDNA_P Parameter: Tissue Value: Aerial
  misc_feature: MA Experiment 108609 PARAMETER Experiment Name: At_100uM_ABA_cDNA_P Parameter: Treatment Value: 100uM ABA vs. No Treatment
  misc_feature: MA Experiment ID: 20000069 Result: Down-regulated in Transcription
  misc_feature: MA Experiment 20000069 PARAMETER Experiment Name: At_100uM_ABA_Mutants_cDNA_P Parameter: Plant Line Value: CS23
  misc_feature: MA Experiment 20000069 PARAMETER Experiment Name: At_100uM_ABA_Mutants_cDNA_P Parameter: Timepoint (hr) Value: 6
  misc_feature: MA Experiment 20000069 PARAMETER Experiment Name: At_100uM_ABA_Mutants_cDNA_P Parameter: Tissue Value: Aerial
  misc_feature: MA Experiment 20000069 PARAMETER Experiment Name: At_100uM_ABA_Mutants_cDNA_P Parameter: Treatment Value: 100uM ABA vs. No Treatment
  misc_feature: MA Experiment ID: 20000112 Result: Down-regulated in Transcription
  misc_feature: MA Experiment 20000112 PARAMETER Experiment Name: At_42deg_Heat_cDNA_P Parameter: Temperature (deg C) Value: 42 vs. 22
  misc_feature: MA Experiment 20000112 PARAMETER Experiment Name: At_42deg_Heat_cDNA_P Parameter: Timepoint (hr) Value: 2
  misc_feature: MA Experiment 20000112 PARAMETER Experiment Name: At_42deg_Heat_cDNA_P Parameter: Tissue Value: Aerial
  misc_feature: MA Experiment ID: 20000117 Result: Down-regulated in Transcription
  misc_feature: MA Experiment 20000117 PARAMETER Experiment Name: At_100uM_ABA_Mutants_cDNA_P Parameter: Plant Line Value: Columbia
  misc_feature: MA Experiment 20000117 PARAMETER Experiment Name: At_100uM_ABA_Mutants_cDNA_P Parameter: Timepoint (hr) Value: 6
  misc_feature: MA Experiment 20000117 PARAMETER Experiment Name: At_100uM_ABA_Mutants_cDNA_P Parameter: Tissue Value: Aerial
  misc_feature: MA Experiment 20000117 PARAMETER Experiment Name: At_100uM_ABA_Mutants_cDNA_P Parameter: Treatment Value: 100uM ABA vs. No Treatment
  misc_feature: MA Experiment ID: 20000184 Result: Up-regulated in Transcription
  misc_feature: MA Experiment 20000184 PARAMETER Experiment Name: At_Shoots__P Parameter: Age (day) Value: 7
  misc_feature: MA Experiment 20000184 PARAMETER Experiment Name: At_Shoots__P Parameter: Tissue Value: Shoots vs. Whole Plant
  misc_feature: MA Experiment ID: 20000185 Result: Up-regulated in Transcription
  misc_feature: MA Experiment 20000185 PARAMETER Experiment Name: At_Roots__P Parameter: Age (day) Value: 7 vs. 21
  misc_feature: MA Experiment 20000185 PARAMETER Experiment Name: At_Roots__P Parameter: Organism Value: A. thaliana
  misc_feature: MA Experiment 20000185 PARAMETER Experiment Name: At_Roots__P Parameter: Tissue Value: Roots vs. Whole Plant
  misc_feature: MA Experiment ID: 20000227 Result: Up-regulated in Transcription
  misc_feature: MA Experiment 20000227 PARAMETER Experiment Name: At_Root-Tips-vs-Tops_P Parameter: Tissue Value: Root Tips vs. Root Tops
  misc_feature: MA Experiment ID: 20000234 Result: Up-regulated in Transcription
  misc_feature: MA Experiment 20000234 PARAMETER Experiment Name: At_Siliques_P Parameter: Age (day) Value: 21
  misc_feature: MA Experiment 20000234 PARAMETER Experiment Name: At_Siliques_P Parameter: Organism Value: A. thaliana
  misc_feature: MA Experiment 20000234 PARAMETER Experiment Name: At_Siliques_P Parameter: Plant Line Value: WS
  misc_feature: MA Experiment 20000234 PARAMETER Experiment Name: At_Siliques_P Parameter: Tissue Value: Less Than 5mm Siliques vs. Whole Plant
  misc_feature: MA Experiment ID: 20000235 Result: Up-regulated in Transcription
  misc_feature: MA Experiment 20000235 PARAMETER Experiment Name: At_Siliques_P Parameter: Age (day) Value: 21
  misc_feature: MA Experiment 20000235 PARAMETER Experiment Name: At_Siliques_P Parameter: Organism Value: A. thaliana
  misc_feature: MA Experiment 20000235 PARAMETER Experiment Name: At_Siliques_P Parameter: Plant Line Value: WS
  misc_feature: MA Experiment 20000235 PARAMETER Experiment Name: At_Siliques_P Parameter: Tissue Value: 5-10mm Siliques vs. Whole Plant
  misc_feature: MA Experiment ID: 20000264 Result: Up-regulated in Transcription
  misc_feature: MA Experiment 20000264 PARAMETER Experiment Name: At_Open_Flower_P Parameter: Age (day) Value: 21
  misc_feature: MA Experiment 20000264 PARAMETER Experiment Name: At_Open_Flower_P Parameter: Plant Line Value: WS
  misc_feature: MA Experiment 20000264 PARAMETER Experiment Name: At_Open_Flower_P Parameter: Tissue Value: Open Flower vs. Whole Plant
  misc_feature: MA Experiment ID: 20000265 Result: Up-regulated in Transcription
  misc_feature: MA Experiment 20000265 PARAMETER Experiment Name: At_Open_Flower_P Parameter: Age (day) Value: 21
  misc_feature: MA Experiment 20000265 PARAMETER Experiment Name: At_Open_Flower_P Parameter: Plant Line Value: WS
  misc_feature: MA Experiment 20000265 PARAMETER Experiment Name: At_Open_Flower_P Parameter: Tissue Value: Closed Flower vs. Whole Plant
  misc_feature: MA Experiment ID: 20000286 Result: Up-regulated in Transcription
  misc_feature: MA Experiment 20000286 PARAMETER Experiment Name: At_Open_Flower_P Parameter: Age (day) Value: 21
  misc_feature: MA Experiment 20000286 PARAMETER Experiment Name: At_Open_Flower_P Parameter: Plant Line Value: WS
  misc_feature: MA Experiment 20000286 PARAMETER Experiment Name: At_Open_Flower_P Parameter: Tissue Value: Half Open vs. Whole Plant
  misc_feature: MA Experiment ID: 20000437 Result: Down-regulated in Transcription
  misc_feature: MA Experiment 20000437 PARAMETER Experiment Name: At_Drought_P Parameter: Age (day) Value: 8
  misc_feature: MA Experiment 20000437 PARAMETER Experiment Name: At_Drought_P Parameter: Organism Value: A. thaliana
  misc_feature: MA Experiment 20000437 PARAMETER Experiment Name: At_Drought_P Parameter: Plant Line Value: WS
  misc_feature: MA Experiment 20000437 PARAMETER Experiment Name: At_Drought_P Parameter: Timepoint (hr) Value: 24
  misc_feature: MA Experiment 20000437 PARAMETER Experiment Name: At_Drought_P Parameter: Tissue Value: Whole Plant
  misc_feature: MA Experiment 20000437 PARAMETER Experiment Name: At_Drought_P Parameter: Treatment Value: Drought vs. No Drought
  misc_feature: MA Experiment ID: 20001451 Result: Down-regulated in Transcription
  misc_feature: MA Experiment 20001451 PARAMETER Experiment Name: At_Far-red-induction_P Parameter: Age (day) Value: 7
  misc_feature: MA Experiment 20001451 PARAMETER Experiment Name: At_Far-red-induction_P Parameter: Light Value: Far-red vs. White
  misc_feature: MA Experiment 20001451 PARAMETER Experiment Name: At_Far-red-induction_P Parameter: Organism Value: A. thaliana
  misc_feature: MA Experiment 20001451 PARAMETER Experiment Name: At_Far-red-induction_P Parameter: Plant Line Value: Columbia
  misc_feature: MA Experiment 20001451 PARAMETER Experiment Name: At_Far-red-induction_P Parameter: Timepoint (hr) Value: 24
  misc_feature: MA Experiment 20001451 PARAMETER Experiment Name: At_Far-red-induction_P Parameter: Tissue Value: Whole Plant
  misc_feature: MA Experiment ID: 20001458 Result: Up-regulated in Transcription
  misc_feature: MA Experiment 20001458 PARAMETER Experiment Name: At_50mM_NH4NO3_L-to-H_P Parameter: Age (day) Value: Undefined
  misc_feature: MA Experiment 20001458 PARAMETER Experiment Name: At_50mM_NH4NO3_L-to-H_P Parameter: Organism Value: Undefined
  misc_feature: MA Experiment 20001458 PARAMETER Experiment Name: At_50mM_NH4NO3_L-to-H_P Parameter: Plant Line Value: Undefined
  misc_feature: MA Experiment 20001458 PARAMETER Experiment Name: At_50mM_NH4NO3_L-to-H_P Parameter: Timepoint (hr) Value: 2
  misc_feature: MA Experiment 20001458 PARAMETER Experiment Name: At_50mM_NH4NO3_L-to-H_P Parameter: Tissue Value: Siliques
  misc_feature: MA Experiment 20001458 PARAMETER Experiment Name: At_50mM_NH4NO3_L-to-H_P Parameter: Treatment Value: 50mM NH4NO3 vs. 100mM Manitol
  misc_feature: MA Experiment ID: 20001557 Result: Up-regulated in Transcription
  misc_feature: MA Experiment 20001557 PARAMETER Experiment Name: At_Drought_Soil_Dry_P Parameter: Age (day) Value: 27
  misc_feature: MA Experiment 20001557 PARAMETER Experiment Name: At_Drought_Soil_Dry_P Parameter: Organism Value: A. thaliana
  misc_feature: MA Experiment 20001557 PARAMETER Experiment Name: At_Drought_Soil_Dry_P Parameter: Plant Line Value: WS
  misc_feature: MA Experiment 20001557 PARAMETER Experiment Name: At_Drought_Soil_Dry_P Parameter: Post Timepoint (hr) Value: 3
  misc_feature: MA Experiment 20001557 PARAMETER Experiment Name: At_Drought_Soil_Dry_P Parameter: Post-Treatment Value: Re-Water vs. No Drought
  misc_feature: MA Experiment 20001557 PARAMETER Experiment Name: At_Drought_Soil_Dry_P Parameter: Timepoint (day) Value: 13
  misc_feature: MA Experiment 20001557 PARAMETER Experiment Name: At_Drought_Soil_Dry_P Parameter: Treatment Value: Drought vs. No Drought
  misc_feature: MA Experiment ID: 20001558 Result: Up-regulated in Transcription
  misc_feature: MA Experiment 20001558 PARAMETER Experiment Name: At_Drought_Soil_Dry_P Parameter: Age (day) Value: 27
  misc_feature: MA Experiment 20001558 PARAMETER Experiment Name: At_Drought_Soil_Dry_P Parameter: Organism Value: A. thaliana
  misc_feature: MA Experiment 20001558 PARAMETER Experiment Name: At_Drought_Soil_Dry_P Parameter: Plant Line Value: WS
  misc_feature: MA Experiment 20001558 PARAMETER Experiment Name: At_Drought_Soil_Dry_P Parameter: Post Timepoint (hr) Value: 6
  misc_feature: MA Experiment 20001558 PARAMETER Experiment Name: At_Drought_Soil_Dry_P Parameter: Post-Treatment Value: Re-Water vs. No Drought
  misc_feature: MA Experiment 20001558 PARAMETER Experiment Name: At_Drought_Soil_Dry_P Parameter: Timepoint (day) Value: 13
  misc_feature: MA Experiment 20001558 PARAMETER Experiment Name: At_Drought_Soil_Dry_P Parameter: Treatment Value: Drought vs. No Drought
  misc_feature: MA Experiment ID: 20001560 Result: Up-regulated in Transcription
  misc_feature: MA Experiment 20001560 PARAMETER Experiment Name: At_Drought_Soil_Dry_P Parameter: Age (day) Value: 28
  misc_feature: MA Experiment 20001560 PARAMETER Experiment Name: At_Drought_Soil_Dry_P Parameter: Organism Value: A. thaliana
  misc_feature: MA Experiment 20001560 PARAMETER Experiment Name: At_Drought_Soil_Dry_P Parameter: Plant Line Value: WS
  misc_feature: MA Experiment 20001560 PARAMETER Experiment Name: At_Drought_Soil_Dry_P Parameter: Post Timepoint (hr) Value: None
  misc_feature: MA Experiment 20001560 PARAMETER Experiment Name: At_Drought_Soil_Dry_P Parameter: Post-Treatment Value: None
  misc_feature: MA Experiment 20001560 PARAMETER Experiment Name: At_Drought_Soil_Dry_P Parameter: Timepoint (day) Value: 14
  misc_feature: MA Experiment 20001560 PARAMETER Experiment Name: At_Drought_Soil_Dry_P Parameter: Treatment Value: Drought vs. No Drought
  misc_feature: MA Experiment ID: 20001757 Result: Up-regulated in Transcription
  misc_feature: MA Experiment 20001757 PARAMETER Experiment Name: At_50mM_NH4NO3_L-to-H_P Parameter: Timepoint (hr) Value: 6
  misc_feature: MA Experiment 20001757 PARAMETER Experiment Name: At_50mM_NH4NO3_L-to-H_P Parameter: Tissue Value: Leaf
  misc_feature: MA Experiment 20001757 PARAMETER Experiment Name: At_50mM_NH4NO3_L-to-H_P Parameter: Treatment Value: 50mM NH4NO3 vs 100mM Mannitol
  misc_feature: MA Experiment ID: 20001911 Result: Down-regulated in Transcription
  misc_feature: MA Experiment 20001911 PARAMETER Experiment Name: At_Drought_Reproduction_P Parameter: Age (day) Value: 40
  misc_feature: MA Experiment 20001911 PARAMETER Experiment Name: At_Drought_Reproduction_P Parameter: Organism Value: A. thaliana
  misc_feature: MA Experiment 20001911 PARAMETER Experiment Name: At_Drought_Reproduction_P Parameter: Plant Line Value: WS
  misc_feature: MA Experiment 20001911 PARAMETER Experiment Name: At_Drought_Reproduction_P Parameter: Timepoint (day) Value: 10
  misc_feature: MA Experiment 20001911 PARAMETER Experiment Name: At_Drought_Reproduction_P Parameter: Tissue Value: Flowers
  misc_feature: MA Experiment 20001911 PARAMETER Experiment Name: At_Drought_Reproduction_P Parameter: Treatment Value: Drought vs. No Drought
aatctctcgctctgttacgccattttcgtgagtaagaagaagaaacccgaaaacctcaaaccatggccgagggactcgtattgaagggcattatgcgcgcccacaccgacattgtcacggccatcgctacgccgatcgacaattccgacatcatcgtcacagcgtcgcgtgacaaatccatcatcctctggaaactcacaaaggacgataagtcttacggtgttgctcagcgtaggctcacaggtcactctcacttcgtggaagatgttgttctctcatcggacggtcagtttgcactctccggaagctgggacggtgagctccgtctctgggatcttgccacgggagaaacaactcgtcgattcgttggtcatacgaaagatgtgctctctgttgcattctctactgataaccggcagatcgtgtctgcttctcgtgatcgtacgattaagctttggaacacacttggtgagtgtaagtataccatctctgaaggtgatggtcacaaggaatgggttagttgtgttaggtttagtcctaatactcttgtaccaactattgtatctgcttcttgggataaaactgtgaaagtttggaatctccagaactgtaagctgaggaactctcttgttggtcactctggttacctcaacactgttgctgtctcgcctgatggttcgctatgcgccagtggtgggaaagatggtgttatcttgttgtgggatttggctgaaggaaagaagctttactcgcttgaggcgggttcgattattcactcgctttgcttcagtcctaacagatactggttgtgtgctgctactgagaatagcattaggatttgggatcttgagagcaagtctgttgttgaggacttgaaggttgatctcaagtctgaggcagagaagaatgaaggtggtgttggaactggtaaccagaagaaggttatctactgcacaagcttgaactggagtgcagatggaagcacattgttcagtggttacactgatggagttgtcagggtctggggtattggtcgttactagagacacaacaagatgaagaagaagtcacgaaatctccggaaaaaagtttagctgcttttaatttttccagactgcgtcagtattgtattagtctctcgcaaacctctattttggcaatttttgtttaatttccagaagagaaaaaaacaatccattgattatcatatcactatatatcaaaaggtcacgattttgattacact

SEQ ID NO: 77148 - protein, 326 aa, Arabidopsis thaliana
  peptide (1)..(326): Ceres Seq. ID no. 12561684
  misc_feature (1)..(326): Homolog of NCBI NO: 15229589 NR Description: protein kinase C-receptor/G-protein, putative; id: At3g18130.1, supported by cDNA: gi_15215619, supported by gi_20856143 [Arabidopsis thaliana] >gi|9294068|dbj|BAB02025.1|
  misc_feature (1)..(326): Homolog of NCBI NO: 15221916 NR Description: guanine nucleotide-binding protein, putative; id: At1g48630.1, supported by cDNA: 38966., supported by cDNA: supported by cDNA: gi_20259150 [Arabidopsis thaliana] protein,
  misc_feature (1)..(326): Homolog of NCBI NO: 21593440 NR Description: guanine nucleotide-binding protein, putative
  misc_feature (1)..(326): Homolog of NCBI NO: 15220941 NR Description: G-protein beta family; protein id: At1g18080.1, by cDNA: 7026., supported by cDNA: gi_14334667, supported by
  misc_feature (1)..(326): Homolog of NCBI NO: 2289095 NR Description: WD-40 repeat protein [Arabidopsis thaliana]
  misc_feature (1)..(326): Homolog of NCBI NO: 3023857 NR Description: GUANINE NUCLEOTIDE-BINDING PROTEIN BETA
MAEGLVLKGIMRAHTDIVTAIATPIDNSDIIVTASRDKSIILWKLTKDDKSYGVAQRRLTGHSHFVEDVVLSSDGQFALSGSWDGELRLWDLATGETTRRFVGHTKDVLSVAFSTDNRQIVSASRDRTIKLWNTLGECKYTISEGDGHKEWVSCVRFSPNTLVPTIVSASWDKTVKVWNLQNCKLRNSLVGHSGYLNTVAVSPDGSLCASGGKDGVILLWDLAEGKKLYSLEAGSIIHSLCFSPNRYWLCAATENSIRIWDLESKSVVEDLKVDLKSEAEKNEGGVGTGNQKKVIYCTSLNWSADGSTLFSGYTDGVVRVWGIGRY

SEQ ID NO: 77149 - protein, 316 aa, Arabidopsis thaliana
  peptide (1)..(316): Ceres Seq. ID no. 12561685
  misc_feature (1)..(316): Homolog of NCBI NO: 15229589 NR Description: protein kinase C-receptor/G-protein, putative; id: At3g18130.1, supported by cDNA: gi_15215619, supported by gi_20856143 [Arabidopsis thaliana] >gi|9294068|dbj|BAB02025.1|
  misc_feature (1)..(316): Homolog of NCBI NO: 15221916 NR Description: guanine nucleotide-binding protein, putative; id: At1g48630.1, supported by cDNA: 38966., supported by cDNA: supported by cDNA: gi_20259150 [Arabidopsis thaliana] protein,
  misc_feature (1)..(316): Homolog of NCBI NO: 21593440 NR Description: guanine nucleotide-binding protein, putative
  misc_feature (1)..(316): Homolog of NCBI NO: 15220941 NR Description: G-protein beta family; protein id: At1g18080.1, by cDNA: 7026., supported by cDNA: gi_14334667, supported by
  misc_feature (1)..(316): Homolog of NCBI NO: 2289095 NR Description: WD-40 repeat protein [Arabidopsis thaliana]
  misc_feature (1)..(316): Homolog of NCBI NO: 3023857 NR Description: GUANINE NUCLEOTIDE-BINDING PROTEIN BETA
MRAHTDIVTAIATPIDNSDIIVTASRDKSIILWKLTKDDKSYGVAQRRLTGHSHFVEDVVLSSDGQFALSGSWDGELRLWDLATGETTRRFVGHTKDVLSVAFSTDNRQIVSASRDRTIKLWNTLGECKYTISEGDGHKEWVSCVRFSPNTLVPTIVSASWDKTVKVWNLQNCKLRNSLVGHSGYLNTVAVSPDGSLCASGGKDGVILLWDLAEGKKLYSLEAGSIIHSLCFSPNRYWLCAATENSIRIWDLESKSVVEDLKVDLKSEAEKNEGGVGTGNQKKVIYCTSLNWSADGSTLFSGYTDGVVRVWGIGRY

SEQ ID NO: 77150 - DNA, 741 bp, Arabidopsis thaliana
  misc_feature (1)..(741): Ceres Seq. ID no. 12561686
  misc_feature: MA Experiment ID: 108434 Result: Up-regulated in Transcription
  misc_feature: MA Experiment 108434 PARAMETER Experiment Name: At_Root_Tips_cDNA_P Parameter: Tissue Value: Root Tips
  misc_feature: MA Experiment ID: 108435 Result: Down-regulated in Transcription
  misc_feature: MA Experiment 108435 PARAMETER Experiment Name: At_stm_Mutants_cDNA_P Parameter: Plant Line Value: wt Landsburg vs stm
  misc_feature: MA Experiment 108435 PARAMETER Experiment Name: At_stm_Mutants_cDNA_P Parameter: Tissue Value: Shoot Apical Meristem Region
  misc_feature: MA Experiment ID: 108461 Result: Up-regulated in Transcription
  misc_feature: MA Experiment 108461 PARAMETER Experiment Name: At_Germinating_Seeds_cDNA_P Parameter: Age (day) Value: 1 vs. 0
  misc_feature: MA Experiment 108461 PARAMETER Experiment Name: At_Germinating_Seeds_cDNA_P Parameter: Tissue Value: Germinating Seeds
  misc_feature: MA Experiment ID: 108462 Result: Up-regulated in Transcription
  misc_feature: MA Experiment 108462 PARAMETER Experiment Name: At_Germinating_Seeds_cDNA_P Parameter: Age (day) Value: 2 vs. 0
  misc_feature: MA Experiment 108462 PARAMETER Experiment Name: At_Germinating_Seeds_cDNA_P Parameter: Tissue Value: Germinating Seeds
  misc_feature: MA Experiment ID: 108488 Result: Up-regulated in Transcription
  misc_feature: MA Experiment ID: 108595 Result: Down-regulated in Transcription
  misc_feature: MA Experiment 108595 PARAMETER Experiment Name: At_Ler-pi_Ovule_cDNA_P Parameter: Plant Line Value: null
  misc_feature: MA Experiment ID: 20000071 Result: Down-regulated in Transcription
  misc_feature: MA Experiment 20000071 PARAMETER Experiment Name: At_100uM_ABA_Mutants_cDNA_P Parameter: Plant Line Value: CS8104
  misc_feature: MA Experiment 20000071 PARAMETER Experiment Name: At_100uM_ABA_Mutants_cDNA_P Parameter: Timepoint (hr) Value: 6
  misc_feature: MA Experiment 20000071 PARAMETER Experiment Name: At_100uM_ABA_Mutants_cDNA_P Parameter: Tissue Value: Aerial
  misc_feature: MA Experiment 20000071 PARAMETER Experiment Name: At_100uM_ABA_Mutants_cDNA_P Parameter: Treatment Value: 100uM ABA vs. No Treatment
  misc_feature: MA Experiment ID: 20000117 Result: Down-regulated in Transcription
  misc_feature: MA Experiment 20000117 PARAMETER Experiment Name: At_100uM_ABA_Mutants_cDNA_P Parameter: Plant Line Value: Columbia
  misc_feature: MA Experiment 20000117 PARAMETER Experiment Name: At_100uM_ABA_Mutants_cDNA_P Parameter: Timepoint (hr) Value: 6
  misc_feature: MA Experiment 20000117 PARAMETER Experiment Name: At_100uM_ABA_Mutants_cDNA_P Parameter: Tissue Value: Aerial
  misc_feature: MA Experiment 20000117 PARAMETER Experiment Name: At_100uM_ABA_Mutants_cDNA_P Parameter: Treatment Value: 100uM ABA vs. No Treatment
  misc_feature: MA Experiment ID: 20000180 Result: Up-regulated in Transcription
  misc_feature: MA Experiment 20000180 PARAMETER Experiment Name: At_Germinating_Seeds_P Parameter: Age (hr) Value: 24 vs. 0
  misc_feature: MA Experiment 20000180 PARAMETER Experiment Name: At_Germinating_Seeds_P Parameter: Tissue Value: Germinating Seeds
  misc_feature: MA Experiment ID: 20000184 Result: Up-regulated in Transcription
  misc_feature: MA Experiment 20000184 PARAMETER Experiment Name: At_Shoots__P Parameter: Age (day) Value: 7
  misc_feature: MA Experiment 20000184 PARAMETER Experiment Name: At_Shoots__P Parameter: Tissue Value: Shoots vs. Whole Plant
  misc_feature: MA Experiment ID: 20000185 Result: Down-regulated in Transcription
  misc_feature: MA Experiment 20000185 PARAMETER Experiment Name: At_Roots__P Parameter: Age (day) Value: 7 vs. 21
  misc_feature: MA Experiment 20000185 PARAMETER Experiment Name: At_Roots__P Parameter: Organism Value: A. thaliana
  misc_feature: MA Experiment 20000185 PARAMETER Experiment Name: At_Roots__P Parameter: Tissue Value: Roots vs. Whole Plant
  misc_feature: MA Experiment ID: 20000224 Result: Up-regulated in Transcription
  misc_feature: MA Experiment ID: 20000227 Result: Up-regulated in Transcription
  misc_feature: MA Experiment 20000227 PARAMETER Experiment Name: At_Root-Tips-vs-Tops_P Parameter: Tissue Value: Root Tips vs. Root Tops
  misc_feature: MA Experiment ID: 20000437 Result: Down-regulated in Transcription
  misc_feature: MA Experiment 20000437 PARAMETER Experiment Name: At_Drought_P Parameter: Age (day) Value: 8
  misc_feature: MA Experiment 20000437 PARAMETER Experiment Name: At_Drought_P Parameter: Organism Value: A. thaliana
  misc_feature: MA Experiment 20000437 PARAMETER Experiment Name: At_Drought_P Parameter: Plant Line Value: WS
  misc_feature: MA Experiment 20000437 PARAMETER Experiment Name: At_Drought_P Parameter: Timepoint (hr) Value: 24
  misc_feature: MA Experiment 20000437 PARAMETER Experiment Name: At_Drought_P Parameter: Tissue Value: Whole Plant
  misc_feature: MA Experiment 20000437 PARAMETER Experiment Name: At_Drought_P Parameter: Treatment Value: Drought vs. No Drought
  misc_feature: MA Experiment ID: 20000438 Result: Up-regulated in Transcription
  misc_feature: MA Experiment 20000438 PARAMETER Experiment Name: At_Shoots__P Parameter: Age (day) Value: 14
  misc_feature: MA Experiment 20000438 PARAMETER Experiment Name: At_Shoots__P Parameter: Tissue Value: Shoots vs. Whole Plant
  misc_feature: MA Experiment ID: 20000439 Result: Down-regulated in Transcription
  misc_feature: MA Experiment 20000439 PARAMETER Experiment Name: At_Roots__P Parameter: Age (day) Value: 14 vs. 21
  misc_feature: MA Experiment 20000439 PARAMETER Experiment Name: At_Roots__P Parameter: Organism Value: A. thaliana
  misc_feature: MA Experiment 20000439 PARAMETER Experiment Name: At_Roots__P Parameter: Tissue Value: Roots vs. Whole Plant
  misc_feature: MA Experiment ID: 20000794 Result: Down-regulated in Transcription
  misc_feature: MA Experiment 20000794 PARAMETER Experiment Name: At_Petals_P Parameter: Age (day) Value: 23-25 days
  misc_feature: MA Experiment 20000794 PARAMETER Experiment Name: At_Petals_P Parameter: Plant Line Value: WS
  misc_feature: MA Experiment 20000794 PARAMETER Experiment Name: At_Petals_P Parameter: Tissue Value: Petals vs. Whole plant
  misc_feature: MA Experiment ID: 20001757 Result: Up-regulated in Transcription
  misc_feature: MA Experiment 20001757 PARAMETER Experiment Name: At_50mM_NH4NO3_L-to-H_P Parameter: Timepoint (hr) Value: 6
  misc_feature: MA Experiment 20001757 PARAMETER Experiment Name: At_50mM_NH4NO3_L-to-H_P Parameter: Tissue Value: Leaf
  misc_feature: MA Experiment 20001757 PARAMETER Experiment Name: At_50mM_NH4NO3_L-to-H_P Parameter: Treatment Value: 50mM NH4NO3 vs 100mM Mannitol
  misc_feature: MA Experiment ID: 20001906 Result: Down-regulated in Transcription
  misc_feature: MA Experiment 20001906 PARAMETER Experiment Name: At_Drought_Reproduction_P Parameter: Age (day) Value: 35
  misc_feature: MA Experiment 20001906 PARAMETER Experiment Name: At_Drought_Reproduction_P Parameter: Organism Value: A. thaliana
  misc_feature: MA Experiment 20001906 PARAMETER Experiment Name: At_Drought_Reproduction_P Parameter: Plant Line Value: WS
  misc_feature: MA Experiment 20001906 PARAMETER Experiment Name: At_Drought_Reproduction_P Parameter: Timepoint (day) Value: 5
  misc_feature: MA Experiment 20001906 PARAMETER Experiment Name: At_Drought_Reproduction_P Parameter: Tissue Value: Siliques
  misc_feature: MA Experiment 20001906 PARAMETER Experiment Name: At_Drought_Reproduction_P Parameter: Treatment Value: Drought vs. No Drought
aattcaatctcttccaatttctcttcttcttcttcttcttcctcgcgacgcgttaatggcggcttcgttctcactcacgagcttcatctccttcatctcaccattcaaatctcaaactaaacctacaccaccaccaaatctcactcttccttctccaacaatctcccaaaggcgaagaaatgatctcgctatcgaatcaatggcggtcgaagaaacttcctcaaccgcttcttcactttcctctgagcttgcttccgtgatttgtccctcgcttgcttactccaacacactcttcttcagttctggatacaatgtgcaagtgtttgttgaagataatgagtcagaggagaggcttgtgaatcgatttaggagagaagtgatgagaactggtgttatacaggaatgtaagaggagaagatactttgagaataaacaagatgagaagaaacgtaggactcgtgatgctgctaagcgtaataagaaaaggcgtcctcaagcaaggtttactcaagaaacaagagaagaagcagcagcagcaactaagagtaagaaaaaagatgaggaagaagacaactgggagatgcctggtggagatgtaccttcttgaaacacgattttagtatataaaatctccggtcttttgattaaatttcgtattatcccgtttttattacttggtacattgtgagttggaaatgtgtttactgcatattataacttgcttctagtattgagttctct

SEQ ID NO: 77151 - protein, 201 aa, Arabidopsis thaliana
  peptide (1)..(201): Ceres Seq. ID no. 12561687
  misc_feature (105)..(158): Pfam Name: Ribosomal protein S21 Pfam Description: Ribosomal protein S21
  misc_feature (19)..(201): Homolog of NCBI NO: 18405254 NR Description: expressed protein; protein id: At3g27160.1, by cDNA: gi_14532553, supported by cDNA: gi_18655398 [Arabidopsis >gi|9294081|dbj|BAB01933.1| gene_id:MYF5.3~similar to unknown
  misc_feature (19)..(201): Homolog of NCBI NO: 14532554 NR Description: AT3g27160/MYF5_3 [Arabidopsis thaliana]
  misc_feature (24)..(201): Homolog of NCBI NO: 17154781 NR Description: ribosome-like protein [Cucumis sativus]
  misc_feature (16)..(162): Homolog of NCBI NO: 15242698 NR Description: unknown protein; protein id: At5g63300.1 thaliana] >gi|10177311|dbj|BAB10572.1| gene_id:MDC12.27~unknown
IQSLPISLLLLLLPRDALMAASFSLTSFISFISPFKSQTKPTPPPNLTLPSPTISQRRRNDLAIESMAVEETSSTASSLSSELASVICPSLAYSNTLFFSSGYNVQVFVEDNESEERLVNRFRREVMRTGVIQECKRRRYFENKQDEKKRRTRDAAKRNKKRRPQARFTQETREEAAAATKSKKKDEEEDNWEMPGGDVPS

SEQ ID NO: 77152 - protein, 183 aa, Arabidopsis thaliana
  peptide (1)..(183): Ceres Seq. ID no. 12561688
  misc_feature (87)..(140): Pfam Name: Ribosomal protein S21 Pfam Description: Ribosomal protein S21
  misc_feature (1)..(183): Homolog of NCBI NO: 18405254 NR Description: expressed protein; protein id: At3g27160.1, by cDNA: gi_14532553, supported by cDNA: gi_18655398 [Arabidopsis >gi|9294081|dbj|BAB01933.1| gene_id:MYF5.3~similar to unknown
  misc_feature (1)..(183): Homolog of NCBI NO: 14532554 NR Description: AT3g27160/MYF5_3 [Arabidopsis thaliana]
  misc_feature (6)..(183): Homolog of NCBI NO: 17154781 NR Description: ribosome-like protein [Cucumis sativus]
  misc_feature (1)..(144): Homolog of NCBI NO: 15242698 NR Description: unknown protein; protein id: At5g63300.1 thaliana] >gi|10177311|dbj|BAB10572.1| gene_id:MDC12.27~unknown
MAASFSLTSFISFISPFKSQTKPTPPPNLTLPSPTISQRRRNDLAIESMAVEETSSTASSLSSELASVICPSLAYSNTLFFSSGYNVQVFVEDNESEERLVNRFRREVMRTGVIQECKRRRYFENKQDEKKRRTRDAAKRNKKRRPQARFTQETREEAAAATKSKKKDEEEDNWEMPGGDVPS

SEQ ID NO: 77153 - protein, 135 aa, Arabidopsis thaliana
  peptide (1)..(135): Ceres Seq. ID no. 12561689
  misc_feature (39)..(92): Pfam Name: Ribosomal protein S21 Pfam Description: Ribosomal protein S21
  misc_feature (1)..(135): Homolog of NCBI NO: 18405254 NR Description: expressed protein; protein id: At3g27160.1, by cDNA: gi_14532553, supported by cDNA: gi_18655398 [Arabidopsis >gi|9294081|dbj|BAB01933.1| gene_id:MYF5.3~similar to unknown
  misc_feature (1)..(135): Homolog of NCBI NO: 14532554 NR Description: AT3g27160/MYF5_3 [Arabidopsis thaliana]
  misc_feature (1)..(135): Homolog of NCBI NO: 17154781 NR Description: ribosome-like protein [Cucumis sativus]
  misc_feature (1)..(96): Homolog of NCBI NO: 15242698 NR Description: unknown protein; protein id: At5g63300.1 thaliana] >gi|10177311|dbj|BAB10572.1| gene_id:MDC12.27~unknown
MAVEETSSTASSLSSELASVICPSLAYSNTLFFSSGYNVQVFVEDNESEERLVNRFRREVMRTGVIQECKRRRYFENKQDEKKRRTRDAAKRNKKRRPQARFTQETREEAAAATKSKKKDEEEDNWEMPGGDVPS

SEQ ID NO: 77154 - DNA, 1183 bp, Arabidopsis thaliana
  misc_feature (1)..(1183): Ceres Seq. ID no. 12561711
  misc_feature: MA Experiment ID: 108435 Result: Down-regulated in Transcription
  misc_feature: MA Experiment 108435 PARAMETER Experiment Name: At_stm_Mutants_cDNA_P Parameter: Plant Line Value: wt Landsburg vs stm
  misc_feature: MA Experiment 108435 PARAMETER Experiment Name: At_stm_Mutants_cDNA_P Parameter: Tissue Value: Shoot Apical Meristem Region
  misc_feature: MA Experiment ID: 108461 Result: Up-regulated in Transcription
  misc_feature: MA Experiment 108461 PARAMETER Experiment Name: At_Germinating_Seeds_cDNA_P Parameter: Age (day) Value: 1 vs. 0
  misc_feature: MA Experiment 108461 PARAMETER Experiment Name: At_Germinating_Seeds_cDNA_P Parameter: Tissue Value: Germinating Seeds
  misc_feature: MA Experiment ID: 108462 Result: Up-regulated in Transcription
  misc_feature: MA Experiment 108462 PARAMETER Experiment Name: At_Germinating_Seeds_cDNA_P Parameter: Age (day) Value: 2 vs. 0
  misc_feature: MA Experiment 108462 PARAMETER Experiment Name: At_Germinating_Seeds_cDNA_P Parameter: Tissue Value: Germinating Seeds
  misc_feature: MA Experiment ID: 108463 Result: Up-regulated in Transcription
  misc_feature: MA Experiment 108463 PARAMETER Experiment Name: At_Germinating_Seeds_cDNA_P Parameter: Age (day) Value: 3 vs. 0
  misc_feature: MA Experiment 108463 PARAMETER Experiment Name: At_Germinating_Seeds_cDNA_P Parameter: Tissue Value: Germinating Seeds
  misc_feature: MA Experiment ID: 108464 Result: Up-regulated in Transcription
  misc_feature: MA Experiment 108464 PARAMETER Experiment Name: At_Germinating_Seeds_cDNA_P Parameter: Age (day) Value: 4 vs. 0
  misc_feature: MA Experiment 108464 PARAMETER Experiment Name: At_Germinating_Seeds_cDNA_P Parameter: Tissue Value: Germinating Seeds
  misc_feature: MA Experiment ID: 108501 Result: Down-regulated in Transcription
  misc_feature: MA Experiment 108501 PARAMETER Experiment Name: At_ap2_floral_buds_cDNA_P Parameter: Plant Line Value: ap2 (Ler.)
  misc_feature: MA Experiment 108501 PARAMETER Experiment Name: At_ap2_floral_buds_cDNA_P Parameter: Tissue Value: Closed Flower
  misc_feature: MA Experiment ID: 108594 Result: Down-regulated in Transcription
  misc_feature: MA Experiment 108594 PARAMETER Experiment Name: At_Ler-rhl_Root_cDNA_P Parameter: Plant Line Value: null
  misc_feature: MA Experiment ID: 108595 Result: Down-regulated in Transcription
  misc_feature: MA Experiment 108595 PARAMETER Experiment Name: At_Ler-pi_Ovule_cDNA_P Parameter: Plant Line Value: null
  misc_feature: MA Experiment ID: 20000088 Result: Up-regulated in Transcription
  misc_feature: MA Experiment 20000088 PARAMETER Experiment Name: At_100uM_ABA_Mutants_cDNA_P Parameter: Plant Line Value: Landsberg
  misc_feature: MA Experiment 20000088 PARAMETER Experiment Name: At_100uM_ABA_Mutants_cDNA_P Parameter: Timepoint (hr) Value: 6
  misc_feature: MA Experiment 20000088 PARAMETER Experiment Name: At_100uM_ABA_Mutants_cDNA_P Parameter: Tissue Value: Aerial
  misc_feature: MA Experiment 20000088 PARAMETER Experiment Name: At_100uM_ABA_Mutants_cDNA_P Parameter: Treatment Value: 100uM ABA vs. No Treatment
  misc_feature: MA Experiment ID: 20000111 Result: Down-regulated in Transcription
  misc_feature: MA Experiment 20000111 PARAMETER Experiment Name: At_42deg_Heat_cDNA_P Parameter: Temperature (deg C) Value: 42 vs. 22
  misc_feature: MA Experiment 20000111 PARAMETER Experiment Name: At_42deg_Heat_cDNA_P Parameter: Timepoint (hr) Value: 6
  misc_feature: MA Experiment 20000111 PARAMETER Experiment Name: At_42deg_Heat_cDNA_P Parameter: Tissue Value: Aerial
  misc_feature: MA Experiment ID: 20000117 Result: Up-regulated in Transcription
  misc_feature: MA Experiment 20000117 PARAMETER Experiment Name: At_100uM_ABA_Mutants_cDNA_P Parameter: Plant Line Value: Columbia
  misc_feature: MA Experiment 20000117 PARAMETER Experiment Name: At_100uM_ABA_Mutants_cDNA_P Parameter: Timepoint (hr) Value: 6
  misc_feature: MA Experiment 20000117 PARAMETER Experiment Name: At_100uM_ABA_Mutants_cDNA_P Parameter: Tissue Value: Aerial
  misc_feature: MA Experiment 20000117 PARAMETER Experiment Name: At_100uM_ABA_Mutants_cDNA_P Parameter: Treatment Value: 100uM ABA vs. No Treatment
  misc_feature: MA Experiment ID: 20000180 Result: Up-regulated in Transcription
  misc_feature: MA Experiment 20000180 PARAMETER Experiment Name: At_Germinating_Seeds_P Parameter: Age (hr) Value: 24 vs. 0
  misc_feature: MA Experiment 20000180 PARAMETER Experiment Name: At_Germinating_Seeds_P Parameter: Tissue Value: Germinating Seeds
  misc_feature: MA Experiment ID: 20000185 Result: Down-regulated in Transcription
  misc_feature: MA Experiment 20000185 PARAMETER Experiment Name: At_Roots__P Parameter: Age (day) Value: 7 vs. 21
  misc_feature: MA Experiment 20000185 PARAMETER Experiment Name: At_Roots__P Parameter: Organism Value: A. thaliana
  misc_feature: MA Experiment 20000185 PARAMETER Experiment Name: At_Roots__P Parameter: Tissue Value: Roots vs. Whole Plant
  misc_feature: MA Experiment ID: 20000234 Result: Down-regulated in Transcription
  misc_feature: MA Experiment 20000234 PARAMETER Experiment Name: At_Siliques_P Parameter: Age (day) Value: 21
  misc_feature: MA Experiment 20000234 PARAMETER Experiment Name: At_Siliques_P Parameter: Organism Value: A. thaliana
  misc_feature: MA Experiment 20000234 PARAMETER Experiment Name: At_Siliques_P Parameter: Plant Line Value: WS
  misc_feature: MA Experiment 20000234 PARAMETER Experiment Name: At_Siliques_P Parameter: Tissue Value: Less Than 5mm Siliques vs. Whole Plant
  misc_feature: MA Experiment ID: 20000265 Result: Down-regulated in Transcription
  misc_feature: MA Experiment 20000265 PARAMETER Experiment Name: At_Open_Flower_P Parameter: Age (day) Value: 21
  misc_feature: MA Experiment 20000265 PARAMETER Experiment Name: At_Open_Flower_P Parameter: Plant Line Value: WS
  misc_feature: MA Experiment 20000265 PARAMETER Experiment Name: At_Open_Flower_P Parameter: Tissue Value: Closed Flower vs. Whole Plant
  misc_feature: MA Experiment ID: 20000269 Result: Down-regulated in Transcription
  misc_feature: MA Experiment 20000269 PARAMETER Experiment Name: At_1mM_KNO3_L-vs-H_Roots_P Parameter: Age (day) Value: 7,10,12
  misc_feature: MA Experiment 20000269 PARAMETER Experiment Name: At_1mM_KNO3_L-vs-H_Roots_P Parameter: Organism Value: A. thaliana
  misc_feature: MA Experiment 20000269 PARAMETER Experiment Name: At_1mM_KNO3_L-vs-H_Roots_P Parameter: Plant Line Value: WS
  misc_feature: MA Experiment 20000269 PARAMETER Experiment Name: At_1mM_KNO3_L-vs-H_Roots_P Parameter: Timepoint (day) Value: 7,10,12
  misc_feature: MA Experiment 20000269 PARAMETER Experiment Name: At_1mM_KNO3_L-vs-H_Roots_P Parameter: Tissue Value: Roots
  misc_feature: MA Experiment 20000269 PARAMETER Experiment Name: At_1mM_KNO3_L-vs-H_Roots_P Parameter: Treatment Value: 1mM KNO3 vs. 50mM KNO3
  misc_feature: MA Experiment ID: 20000286 Result: Down-regulated in Transcription
  misc_feature: MA Experiment 20000286 PARAMETER Experiment Name: At_Open_Flower_P Parameter: Age (day) Value: 21
  misc_feature: MA Experiment 20000286 PARAMETER Experiment Name: At_Open_Flower_P Parameter: Plant Line Value: WS
  misc_feature: MA Experiment 20000286 PARAMETER Experiment Name: At_Open_Flower_P Parameter: Tissue Value: Half Open vs. Whole Plant
  misc_feature: MA Experiment ID: 20000439 Result: Down-regulated in Transcription
  misc_feature: MA Experiment 20000439 PARAMETER Experiment Name: At_Roots__P Parameter: Age (day) Value: 14 vs. 21
  misc_feature: MA Experiment 20000439 PARAMETER Experiment Name: At_Roots__P Parameter: Organism Value: A. thaliana
  misc_feature: MA Experiment 20000439 PARAMETER Experiment Name: At_Roots__P Parameter: Tissue Value: Roots vs. Whole Plant
  misc_feature: MA Experiment ID: 20000451 Result: Down-regulated in Transcription
  misc_feature: MA Experiment 20000451 PARAMETER Experiment Name: At_CS6879_Shoots-Roots_P Parameter: Age (day) Value: 14
  misc_feature: MA Experiment 20000451 PARAMETER Experiment Name: At_CS6879_Shoots-Roots_P Parameter: Organism Value: A. thaliana
  misc_feature: MA Experiment 20000451 PARAMETER Experiment Name: At_CS6879_Shoots-Roots_P Parameter: Plant Line Value: CS6879 vs. WS
  misc_feature: MA Experiment 20000451 PARAMETER Experiment Name: At_CS6879_Shoots-Roots_P Parameter: Tissue Value: Roots
  misc_feature: MA Experiment ID: 20001558 Result: Down-regulated in Transcription
  misc_feature: MA Experiment 20001558 PARAMETER Experiment Name: At_Drought_Soil_Dry_P Parameter: Age (day) Value: 27
  misc_feature: MA Experiment 20001558 PARAMETER Experiment Name: At_Drought_Soil_Dry_P Parameter: Organism Value: A. thaliana
  misc_feature: MA Experiment 20001558 PARAMETER Experiment Name: At_Drought_Soil_Dry_P Parameter: Plant Line Value: WS
  misc_feature: MA Experiment 20001558 PARAMETER Experiment Name: At_Drought_Soil_Dry_P Parameter: Post Timepoint (hr) Value: 6
  misc_feature: MA Experiment 20001558 PARAMETER Experiment Name: At_Drought_Soil_Dry_P Parameter: Post-Treatment Value: Re-Water vs. No Drought
  misc_feature: MA Experiment 20001558 PARAMETER Experiment Name: At_Drought_Soil_Dry_P Parameter: Timepoint (day) Value: 13
  misc_feature: MA Experiment 20001558 PARAMETER Experiment Name: At_Drought_Soil_Dry_P Parameter: Treatment Value: Drought vs. No Drought
  misc_feature: MA Experiment ID: 20001560 Result: Down-regulated in Transcription
  misc_feature: MA Experiment 20001560 PARAMETER Experiment Name: At_Drought_Soil_Dry_P Parameter: Age (day) Value: 28
  misc_feature: MA Experiment 20001560 PARAMETER Experiment Name: At_Drought_Soil_Dry_P Parameter: Organism Value: A. thaliana
  misc_feature: MA Experiment 20001560 PARAMETER Experiment Name: At_Drought_Soil_Dry_P Parameter: Plant Line Value: WS
  misc_feature: MA Experiment 20001560 PARAMETER Experiment Name: At_Drought_Soil_Dry_P Parameter: Post Timepoint (hr) Value: None
  misc_feature: MA Experiment 20001560 PARAMETER Experiment Name: At_Drought_Soil_Dry_P Parameter: Post-Treatment Value: None
  misc_feature: MA Experiment 20001560 PARAMETER Experiment Name: At_Drought_Soil_Dry_P Parameter: Timepoint (day) Value: 14
  misc_feature: MA Experiment 20001560 PARAMETER Experiment Name: At_Drought_Soil_Dry_P Parameter: Treatment Value: Drought vs. No Drought
tcgtgccattagcttttacattaagagaaaacacttgcaaaactaagtgctatctctcttcttcttccttctcctaacaacttatataccatgagtctcttcaacactgaaaacacatgggcctttgtctttggcttgctcggcaaccttatctcctttgccgtgttcctatctcctgtgccaacgttctataggatttggaagaagaagacaacagaagggtttcagtctattccttatgttgtggcgctcttcagtgcgacgctttggctttactatgcgacacagaagaaagatgtcttcctcctcgtaaccattaacgcctttggttgcttcatcgaaaccatctacatctctatgttccttgcctacgctcccaagccagctcggatgttgacagtgaagatgctacttcttatgaactttggaggattctgtgcgattctccttctttgccaattcttggtaaaaggagccacacgtgctaagattatcggaggaatctgtgtcggattctctgtttgtgttttcgctgctcctctaagcataatcaggacggtaataaagacaagaagtgtggagtacatgccctttagcttatccttaacccttaccatcagtgctgtcatatggctcctttatggtcttgctctcaaggacatctatgttgctttcccgaatgtgcttggttttgctctcggtgcactccaaatgatactctacgttgtctacaaatactgtaaaacgtcgccgcatctaggagagaaagaagtcgaagctgctaagttaccggaggtgagcctcgatatgttgaagctaggcacagtttcatcccctgagccaatctcagtggttcgtcaagcgaacaagtgtacctgcggaaatgatcgaagggctgagattgaagatggacaaacccctaaacatggcaagcagtcctcttccgcagcagctacatgaataaaaatacgttaatgttgactttaccccaacttgatataccaaccaccacgtgtaccccgttacgctgtcgtatttttctgagtttatcaagtgtgcgaagtagaggattaattttccggagttagtttctctacttctttataaaaatttgtgtaattatctattggggataatgtatatttcctattttctgatttaacgaaaactatttaaaatatcc

SEQ ID NO: 77155 - protein, 289 aa, Arabidopsis thaliana; identical to SEQ ID NO: 41925
  peptide (1)..(289): Ceres Seq. ID no. 12561712
  misc_feature (12)..(99): Pfam Name: MtN3/saliva family Pfam Description: MtN3/saliva family
  misc_feature (1)..(289): Homolog of NCBI NO: 15229019 NR Description: MTN3-like protein; protein id: At3g48740.1, by cDNA: gi_13605687, supported by cDNA: gi_16930410, supported
  misc_feature (1)..(275): Homolog of NCBI NO: 15237803 NR Description: MtN3-like protein; protein id: At5g23660.1, by cDNA: gi_15982722, supported by cDNA: gi_16323439, supported
  misc_feature (6)..(246): Homolog of NCBI NO: 21593109 NR Description: MtN3-like protein [Arabidopsis thaliana]
  misc_feature (6)..(246): Homolog of NCBI NO: 15241278 NR Description: MtN3-like protein; protein id: At5g50800.1,
  misc_feature (6)..(259): Homolog of NCBI NO: 15234863 NR Description: MtN3 - like protein; protein id: At4g25010.1
  misc_feature (6)..(215): Homolog of NCBI NO: 1619602 NR Description: MtN3 [Medicago truncatula]
  misc_feature (6)..(248): Homolog of NCBI NO: 14715258 NR Description: N3 like protein [Medicago truncatula]
  misc_feature (11)..(252): Homolog of NCBI NO: 21593422 NR Description: senescence-associated protein (SAG29)
  misc_feature (11)..(275): Homolog of NCBI NO: 15240040 NR Description: senescence-associated protein (SAG29); protein At5g13170.1, supported by cDNA: 38843., supported by cDNA:
  misc_feature (11)..(245): Homolog of NCBI NO: 15225014 NR Description: similar to MtN3 protein; protein id: At2g39060.1, by cDNA: 20810. [Arabidopsis thaliana] >gi|25354616|pir||F84812

SEQ ID NO: 77156 - protein, 200 aa, Arabidopsis thaliana; identical to SEQ ID NO: 41926
  peptide (1)..(200): Ceres Seq. ID no. 12561713
  misc_feature (1)..(200): Homolog of NCBI NO: 15229019 NR Description: MTN3-like protein; protein id: At3g48740.1, by cDNA: gi_13605687, supported by cDNA: gi_16930410, supported
  misc_feature (1)..(186): Homolog of NCBI NO: 15237803 NR Description: MtN3-like protein; protein id: At5g23660.1, by cDNA: gi_15982722, supported by cDNA: gi_16323439, supported
  misc_feature (1)..(157): Homolog of NCBI NO: 21593109 NR Description: MtN3-like protein [Arabidopsis thaliana]
  misc_feature (1)..(157): Homolog of NCBI NO: 15241278 NR Description: MtN3-like protein; protein id: At5g50800.1,
  misc_feature (1)..(170): Homolog of NCBI NO: 15234863 NR Description: MtN3 - like protein; protein id: At4g25010.1
  misc_feature (1)..(126): Homolog of NCBI NO: 1619602 NR Description: MtN3 [Medicago truncatula]
  misc_feature (1)..(159): Homolog of NCBI NO: 14715258 NR Description: N3 like protein [Medicago truncatula]
  misc_feature (1)..(163): Homolog of NCBI NO: 21593422 NR Description: senescence-associated protein (SAG29)
  misc_feature (1)..(186): Homolog of NCBI NO: 15240040 NR Description: senescence-associated protein (SAG29); protein At5g13170.1, supported by cDNA: 38843., supported by cDNA:
  misc_feature (1)..(156): Homolog of NCBI NO: 15225014 NR Description: similar to MtN3 protein; protein id: At2g39060.1, by cDNA: 20810. [Arabidopsis thaliana] >gi|25354616|pir||F84812

SEQ ID NO: 77157 - protein, 189 aa, Arabidopsis thaliana; identical to SEQ ID NO: 41927
  peptide (1)..(189): Ceres Seq. ID no. 12561714
  misc_feature (1)..(189): Homolog of NCBI NO: 15229019 NR Description: MTN3-like protein; protein id: At3g48740.1, by cDNA: gi_13605687, supported by cDNA: gi_16930410, supported
  misc_feature (1)..(175): Homolog of NCBI NO: 15237803 NR Description: MtN3-like protein; protein id: At5g23660.1, by cDNA: gi_15982722, supported by cDNA: gi_16323439, supported
  misc_feature (1)..(146): Homolog of NCBI NO: 21593109 NR Description: MtN3-like protein [Arabidopsis thaliana]
  misc_feature (1)..(146): Homolog of NCBI NO: 15241278 NR Description: MtN3-like protein; protein id: At5g50800.1,
  misc_feature (1)..(159): Homolog of NCBI NO: 15234863 NR Description: MtN3 - like protein; protein id: At4g25010.1
  misc_feature (1)..(115): Homolog of NCBI NO: 1619602 NR Description: MtN3 [Medicago truncatula]
  misc_feature (1)..(148): Homolog of NCBI NO: 14715258 NR Description: N3 like protein [Medicago truncatula]
  misc_feature (1)..(152): Homolog of NCBI NO: 21593422 NR Description: senescence-associated protein (SAG29)
  misc_feature (1)..(175): Homolog of NCBI NO: 15240040 NR Description: senescence-associated protein (SAG29); protein At5g13170.1, supported by cDNA: 38843., supported by cDNA:
  misc_feature (1)..(145): Homolog of NCBI NO: 15225014 NR Description: similar to MtN3 protein; protein id: At2g39060.1, by cDNA: 20810. [Arabidopsis thaliana] >gi|25354616|pir||F84812

SEQ ID NO: 77158 - DNA, 895 bp, Arabidopsis thaliana
  misc_feature (1)..(895): Ceres Seq. ID no. 12561719
  misc_feature: MA Experiment ID: 20000180 Result: Up-regulated in Transcription
  misc_feature: MA Experiment 20000180 PARAMETER Experiment Name: At_Germinating_Seeds_P Parameter: Age (hr) Value: 24 vs. 0
  misc_feature: MA Experiment 20000180 PARAMETER Experiment Name: At_Germinating_Seeds_P Parameter: Tissue Value: Germinating Seeds
aaagcaattgtcagatttcagcatctcccatggaggaatcaagattcgattctgaagatgttgattatgctgagattgttgttgttcgtcatggtgaaacatcttggaatgccgagagaaaaatccagggtcatttggatgttgagttaaatgatgcaggaagacaacaagcacaaagagttgcagagcggttatcgaaggagcagaagatatctcatgtatactcttctgacttgaagagagcctttgagactgctcagatcattgctgctaaatgcggcaagcttgaggtgcttaccgatcgtgatttgcgggaaagacatttaggagatatgcaagggcttgtgtatcaagaagcttcgaaaattcgcccggaagcttacaaggctttttcatctaaccgcacagacgttgatattccaggtggaggagaaagtcttgacaaactttacgatagatgtacaactgcattacagagaatcggcgacaaacataaaggtgaaaggatagtagtagtgactcatggaggtgtgatccgatctctctacgaaagagctcgtccaagtgcaagaaaagttgaaaagatactcaatacatcggtcaatgtgttccgtttattcgacggagacaaatggaccatccaagtttggggtgatgtgagtcatctggaggaaaccggcttcttacaatcaggttttggtggtgatagaacctctggttagagagattctatactcttagtcttcttccccttggaagagcatttatgtaatttaagtttcactccataacttttcaatttttaacatttgaccccattactttgataaagtgatttgggaggattgataaagtaaattgctataaatttctacagtcaaatgttatatggttc

SEQ ID NO: 77159 - protein, 239 aa, Arabidopsis thaliana
  peptide (1)..(239): Ceres Seq. ID no. 12561720
  misc_feature (23)..(216): Pfam Name: Phosphoglycerate mutase family Pfam Description: Phosphoglycerate mutase family
  misc_feature (10)..(239): Homolog of NCBI NO: 15229783 NR Description: putative protein; protein id: At3g50520.1, by cDNA: gi_14334855, supported by cDNA: gi_17104694 [Arabidopsis
  misc_feature (17)..(235): Homolog of NCBI NO: 9955567 NR Description: phosphoglycerate mutase-like protein [Arabidopsis
  misc_feature (17)..(235): Homolog of NCBI NO: 15237633 NR Description: phosphoglycerate mutase - like protein; protein
  misc_feature (18)..(223): Homolog of NCBI NO: 22976134 NR Description: hypothetical protein [Ralstonia metallidurans]
  misc_feature (87)..(235): Homolog of NCBI NO: 26450240 NR Description: putative phosphoglycerate mutase [Arabidopsis
  misc_feature (25)..(223): Homolog of NCBI NO: 17545218 NR Description: PUTATIVE PHOSPHOGLYCERATE MUTASE 2 PROTEIN solanacearum] >gi|17427509|emb|CAD14027.1| PUTATIVE
  misc_feature (24)..(226): Homolog of NCBI NO: 33592552 NR Description: probable phosphoglycerate mutase 2 [Bordetella >gi|33600435|ref|NP_887995.1| probable phosphoglycerate mutase 2 bronchiseptica] >gi|33568034|emb|CAE31947.1| probable
  misc_feature (24)..(226): Homolog of NCBI NO: 33596671 NR Description: probable phosphoglycerate mutase 2 [Bordetella >gi|33573372|emb|CAE37356.1| probable phosphoglycerate mutase 2
  misc_feature (24)..(223): Homolog of NCBI NO: 22988026 NR Description: hypothetical protein [Burkholderia fungorum]
  misc_feature (25)..(224): Homolog of NCBI NO: 23200124 NR Description: Chain A, Bacillus Stearothermophilus Phoe Known As Yhfr) In Complex With Phosphate >gi|23200125|pdb|1H2F|A A, Bacillus Stearothermophilus Phoe (Previously Known As Yhfr) In
SNCQISASPMEESRFDSEDVDYAEIVVVRHGETSWNAERKIQGHLDVELNDAGRQQAQRVAERLSKEQKISHVYSSDLKRAFETAQIIAAKCGKLEVLTDRDLRERHLGDMQGLVYQEASKIRPEAYKAFSSNRTDVDIPGGGESLDKLYDRCTTALQRIGDKHKGERIVVVTHGGVIRSLYERARPSARKVEKILNTSVNVFRLFDGDKWTIQVWGDVSHLEETGFLQSGFGGDRTSG

SEQ ID NO: 77160 - protein, 230 aa, Arabidopsis thaliana
  peptide (1)..(230): Ceres Seq. ID no. 12561721
  misc_feature (14)..(207): Pfam Name: Phosphoglycerate mutase family Pfam Description: Phosphoglycerate mutase family
  misc_feature (1)..(230): Homolog of NCBI NO: 15229783 NR Description: putative protein; protein id: At3g50520.1, by cDNA: gi_14334855, supported by cDNA: gi_17104694 [Arabidopsis
  misc_feature (8)..(226): Homolog of NCBI NO: 9955567 NR Description: phosphoglycerate mutase-like protein [Arabidopsis
  misc_feature (8)..(226): Homolog of NCBI NO: 15237633 NR Description: phosphoglycerate mutase - like protein; protein
  misc_feature (9)..(214): Homolog of NCBI NO: 22976134 NR Description: hypothetical protein [Ralstonia metallidurans]
  misc_feature (78)..(226): Homolog of NCBI NO: 26450240 NR Description: putative phosphoglycerate mutase [Arabidopsis
  misc_feature (16)..(214): Homolog of NCBI NO: 17545218 NR Description: PUTATIVE PHOSPHOGLYCERATE MUTASE 2 PROTEIN solanacearum] >gi|17427509|emb|CAD14027.1| PUTATIVE
  misc_feature (15)..(217): Homolog of NCBI NO: 33592552 NR Description: probable phosphoglycerate mutase 2 [Bordetella >gi|33600435|ref|NP_887995.1| probable phosphoglycerate mutase 2 bronchiseptica] >gi|33568034|emb|CAE31947.1| probable
  misc_feature (15)..(217): Homolog of NCBI NO: 33596671 NR Description: probable phosphoglycerate mutase 2 [Bordetella >gi|33573372|emb|CAE37356.1| probable phosphoglycerate mutase 2
  misc_feature (15)..(214): Homolog of NCBI NO: 22988026 NR Description: hypothetical protein [Burkholderia fungorum]
  misc_feature (16)..(215): Homolog of NCBI NO: 23200124 NR Description: Chain A, Bacillus Stearothermophilus Phoe Known As Yhfr) In Complex With Phosphate >gi|23200125|pdb|1H2F|A A, Bacillus Stearothermophilus Phoe (Previously Known As Yhfr) In
MEESRFDSEDVDYAEIVVVRHGETSWNAERKIQGHLDVELNDAGRQQAQRVAERLSKEQKISHVYSSDLKRAFETAQIIAAKCGKLEVLTDRDLRERHLGDMQGLVYQEASKIRPEAYKAFSSNRTDVDIPGGGESLDKLYDRCTTALQRIGDKHKGERIVVVTHGGVIRSLYERARPSARKVEKILNTSVNVFRLFDGDKWTIQVWGDVSHLEETGFLQSGFGGDRTSG

SEQ ID NO: 77161 - protein, 129 aa, Arabidopsis thaliana
  peptide (1)..(129): Ceres Seq. ID no. 12561722
  misc_feature (1)..(106): Pfam Name: Phosphoglycerate mutase family Pfam Description: Phosphoglycerate mutase family
  misc_feature (1)..(129): Homolog of NCBI NO: 15229783 NR Description: putative protein; protein id: At3g50520.1, by cDNA: gi_14334855, supported by cDNA: gi_17104694 [Arabidopsis
  misc_feature (1)..(125): Homolog of NCBI NO: 9955567 NR Description: phosphoglycerate mutase-like protein [Arabidopsis
  misc_feature (1)..(125): Homolog of NCBI NO: 15237633 NR Description: phosphoglycerate mutase - like protein; protein
  misc_feature (1)..(113): Homolog of NCBI NO: 22976134 NR Description: hypothetical protein [Ralstonia metallidurans]
  misc_feature (1)..(125): Homolog of NCBI NO: 26450240 NR Description: putative phosphoglycerate mutase [Arabidopsis
  misc_feature (1)..(113): Homolog of NCBI NO: 17545218 NR Description: PUTATIVE PHOSPHOGLYCERATE MUTASE 2 PROTEIN solanacearum] >gi|17427509|emb|CAD14027.1| PUTATIVE
  misc_feature (1)..(116): Homolog of NCBI NO: 33592552 NR Description: probable phosphoglycerate mutase 2 [Bordetella >gi|33600435|ref|NP_887995.1| probable phosphoglycerate mutase 2 bronchiseptica] >gi|33568034|emb|CAE31947.1| probable
  misc_feature (1)..(116): Homolog of NCBI NO: 33596671 NR Description: probable phosphoglycerate mutase 2 [Bordetella >gi|33573372|emb|CAE37356.1| probable phosphoglycerate mutase 2
  misc_feature (1)..(113): Homolog of NCBI NO: 22988026 NR Description: hypothetical protein [Burkholderia fungorum]
  misc_feature (1)..(114): Homolog of NCBI NO: 23200124 NR Description: Chain A, Bacillus Stearothermophilus Phoe Known As Yhfr) In Complex With Phosphate >gi|23200125|pdb|1H2F|A A, Bacillus Stearothermophilus Phoe (Previously Known As Yhfr) In
MQGLVYQEASKIRPEAYKAFSSNRTDVDIPGGGESLDKLYDRCTTALQRIGDKHKGERIVVVTHGGVIRSLYERARPSARKVEKILNTSVNVFRLFDGDKWTIQVWGDVSHLEETGFLQSGFGGDRTSG

SEQ ID NO: 77162 - DNA, 887 bp, Arabidopsis thaliana
  misc_feature (1)..(887): Ceres Seq. ID no. 12561723
  misc_feature: MA Experiment ID: 108434 Result: Down-regulated in Transcription
  misc_feature: MA Experiment 108434 PARAMETER Experiment Name: At_Root_Tips_cDNA_P Parameter: Tissue Value: Root Tips
  misc_feature: MA Experiment ID: 108464 Result: Up-regulated in Transcription
  misc_feature: MA Experiment 108464 PARAMETER Experiment Name: At_Germinating_Seeds_cDNA_P Parameter: Age (day) Value: 4 vs. 0
  misc_feature: MA Experiment 108464 PARAMETER Experiment Name: At_Germinating_Seeds_cDNA_P Parameter: Tissue Value: Germinating Seeds
  misc_feature: MA Experiment ID: 108488 Result: Down-regulated in Transcription
  misc_feature: MA Experiment ID: 108561 Result: Up-regulated in Transcription
  misc_feature: MA Experiment 108561 PARAMETER Experiment Name: At_100uM_ABA_cDNA_P Parameter: Timepoint (hr) Value: 6
  misc_feature: MA Experiment 108561 PARAMETER Experiment Name: At_100uM_ABA_cDNA_P Parameter: Tissue Value: Aerial
  misc_feature: MA Experiment 108561 PARAMETER Experiment Name: At_100uM_ABA_cDNA_P Parameter: Treatment Value: 100uM ABA vs. No Treatment
  misc_feature: MA Experiment ID: 108573 Result: Up-regulated in Transcription
  misc_feature: MA Experiment 108573 PARAMETER Experiment Name: At_Drought_cDNA_P Parameter: Timepoint (hr) Value: 6
  misc_feature: MA Experiment 108573 PARAMETER Experiment Name: At_Drought_cDNA_P Parameter: Tissue Value: Aerial
  misc_feature: MA Experiment 108573 PARAMETER Experiment Name: At_Drought_cDNA_P Parameter: Treatment Value: Drought vs. No Drought
  misc_feature: MA Experiment ID: 108579 Result: Up-regulated in Transcription
  misc_feature: MA Experiment 108579 PARAMETER Experiment Name: At_4deg_Cold_cDNA_P Parameter: Temperature (deg C) Value: 4 vs. 22
  misc_feature: MA Experiment 108579 PARAMETER Experiment Name: At_4deg_Cold_cDNA_P Parameter: Timepoint (hr) Value: 6
  misc_feature: MA Experiment 108579 PARAMETER Experiment Name: At_4deg_Cold_cDNA_P Parameter: Tissue Value: Aerial
  misc_feature: MA Experiment ID: 108585 Result: Up-regulated in Transcription
  misc_feature: MA Experiment 108585 PARAMETER Experiment Name: At_5mM_NaNP_cDNA_P Parameter: Timepoint (hr) Value: 6
  misc_feature: MA Experiment 108585 PARAMETER Experiment Name: At_5mM_NaNP_cDNA_P Parameter: Tissue Value: Aerial
  misc_feature: MA Experiment 108585 PARAMETER Experiment Name: At_5mM_NaNP_cDNA_P Parameter: Treatment Value: null
  misc_feature: MA Experiment ID: 108595 Result: Up-regulated in Transcription
  misc_feature: MA Experiment 108595 PARAMETER Experiment Name: At_Ler-pi_Ovule_cDNA_P Parameter: Plant Line Value: null
  misc_feature: MA Experiment ID: 108605 Result: Up-regulated in Transcription
  misc_feature: MA Experiment 108605 PARAMETER Experiment Name: At_100uM_ABA_cDNA_P Parameter: Timepoint (hr) Value: 6
  misc_feature: MA Experiment 108605 PARAMETER Experiment Name: At_100uM_ABA_cDNA_P Parameter: Tissue Value: Aerial
  misc_feature: MA Experiment 108605 PARAMETER Experiment Name: At_100uM_ABA_cDNA_P Parameter: Treatment Value: 100uM ABA vs. No Treatment
  misc_feature: MA Experiment ID: 108607 Result: Up-regulated in Transcription
  misc_feature: MA Experiment 108607 PARAMETER Experiment Name: At_100uM_ABA_cDNA_P Parameter: Timepoint (hr) Value: 4
  misc_feature: MA Experiment 108607 PARAMETER Experiment Name: At_100uM_ABA_cDNA_P Parameter: Tissue Value: Aerial
  misc_feature: MA Experiment 108607 PARAMETER Experiment Name: At_100uM_ABA_cDNA_P Parameter: Treatment Value: 100uM ABA vs. No Treatment
  misc_feature: MA Experiment ID: 108668 Result: Up-regulated in Transcription
  misc_feature: MA Experiment 108668 PARAMETER Experiment Name: At_2mM_SA_cDNA_P Parameter: Plant Line Value: WS
  misc_feature: MA Experiment 108668 PARAMETER Experiment Name: At_2mM_SA_cDNA_P Parameter: Timepoint (hr) Value: 6
  misc_feature: MA Experiment 108668 PARAMETER Experiment Name: At_2mM_SA_cDNA_P Parameter: Treatment Value: 2mM SA vs. No Treatment
  misc_feature: MA Experiment ID: 20000089 Result: Down-regulated in Transcription
  misc_feature: MA Experiment ID: 20000144 Result: Down-regulated in Transcription
  misc_feature: MA Experiment 20000144 PARAMETER Experiment Name: At_42deg_Heat_cDNA_P Parameter: Temperature (deg C) Value: 42 vs. 22
  misc_feature: MA Experiment 20000144 PARAMETER Experiment Name: At_42deg_Heat_cDNA_P Parameter: Timepoint (hr) Value: 1
  misc_feature: MA Experiment 20000144 PARAMETER Experiment Name: At_42deg_Heat_cDNA_P Parameter: Tissue Value: Aerial
  misc_feature: MA Experiment ID: 20000171 Result: Down-regulated in Transcription
  misc_feature: MA Experiment 20000171 PARAMETER Experiment Name: At_42deg_Heat_P Parameter: Age (day) Value: 14
  misc_feature: MA Experiment 20000171 PARAMETER Experiment Name: At_42deg_Heat_P Parameter: Organism Value: A. thaliana
  misc_feature: MA Experiment 20000171 PARAMETER Experiment Name: At_42deg_Heat_P Parameter: Plant Line Value: WS
  misc_feature: MA Experiment 20000171 PARAMETER Experiment Name: At_42deg_Heat_P Parameter: Temperature (deg C) Value: 42 vs. 22
  misc_feature: MA Experiment 20000171 PARAMETER Experiment Name: At_42deg_Heat_P Parameter: Timepoint (hr) Value: 1
  misc_feature: MA Experiment 20000171 PARAMETER Experiment Name: At_42deg_Heat_P Parameter: Tissue Value: Aerial
  misc_feature: MA Experiment ID: 20000182 Result: Up-regulated in Transcription
  misc_feature: MA Experiment 20000182 PARAMETER Experiment Name: At_2mM_SA_P Parameter: Age (day) Value: 14
  misc_feature: MA Experiment 20000182 PARAMETER Experiment Name: At_2mM_SA_P Parameter: Organism Value: A. thaliana
  misc_feature: MA Experiment 20000182 PARAMETER Experiment Name: At_2mM_SA_P Parameter: Plant Line Value: WS
  misc_feature: MA Experiment 20000182 PARAMETER Experiment Name: At_2mM_SA_P Parameter: Timepoint (hr) Value: 6
  misc_feature: MA Experiment 20000182 PARAMETER Experiment Name: At_2mM_SA_P Parameter: Tissue Value: Aerial
  misc_feature: MA Experiment 20000182 PARAMETER Experiment Name: At_2mM_SA_P Parameter: Treatment Value: 2mM SA vs. No Treatment
  misc_feature: MA Experiment ID: 20000224 Result: Down-regulated in Transcription
  misc_feature: MA Experiment ID: 20000234 Result: Down-regulated in Transcription
  misc_feature: MA Experiment 20000234 PARAMETER Experiment Name: At_Siliques_P Parameter: Age (day) Value: 21
  misc_feature: MA Experiment 20000234 PARAMETER Experiment Name: At_Siliques_P Parameter: Organism Value: A. thaliana
  misc_feature: MA Experiment 20000234 PARAMETER Experiment Name: At_Siliques_P Parameter: Plant Line Value: WS
  misc_feature: MA Experiment 20000234 PARAMETER Experiment Name: At_Siliques_P Parameter: Tissue Value: Less Than 5mm Siliques vs. Whole Plant
  misc_feature: MA Experiment ID: 20000235 Result: Down-regulated in Transcription
  misc_feature: MA Experiment 20000235 PARAMETER Experiment Name: At_Siliques_P Parameter: Age (day) Value: 21
  misc_feature: MA Experiment 20000235 PARAMETER Experiment Name: At_Siliques_P Parameter: Organism Value: A. thaliana
  misc_feature: MA Experiment 20000235 PARAMETER Experiment Name: At_Siliques_P Parameter: Plant Line Value: WS
  misc_feature: MA Experiment 20000235 PARAMETER Experiment Name: At_Siliques_P Parameter: Tissue Value: 5-10mm Siliques vs. Whole Plant
  misc_feature: MA Experiment ID: 20000265 Result: Down-regulated in Transcription
  misc_feature: MA Experiment 20000265 PARAMETER Experiment Name: At_Open_Flower_P Parameter: Age (day) Value: 21
  misc_feature: MA Experiment 20000265 PARAMETER Experiment Name: At_Open_Flower_P Parameter: Plant Line Value: WS
  misc_feature: MA Experiment 20000265 PARAMETER Experiment Name: At_Open_Flower_P Parameter: Tissue Value: Closed Flower vs. Whole Plant
  misc_feature: MA Experiment ID: 20000436 Result: Up-regulated in Transcription
  misc_feature: MA Experiment 20000436 PARAMETER Experiment Name: At_Drought_P Parameter: Age (day) Value: 7
  misc_feature: MA Experiment 20000436 PARAMETER Experiment Name: At_Drought_P Parameter: Organism Value: A. thaliana
  misc_feature: MA Experiment 20000436 PARAMETER Experiment Name: At_Drought_P Parameter: Plant Line Value: WS
  misc_feature: MA Experiment 20000436 PARAMETER Experiment Name: At_Drought_P Parameter: Timepoint (hr) Value: 12
  misc_feature: MA Experiment 20000436 PARAMETER Experiment Name: At_Drought_P Parameter: Tissue Value: Whole Plant
  misc_feature: MA Experiment 20000436 PARAMETER Experiment Name: At_Drought_P Parameter: Treatment Value: Drought vs. No Drought
  misc_feature: MA Experiment ID: 20000438 Result: Down-regulated in Transcription
  misc_feature: MA Experiment 20000438 PARAMETER Experiment Name: At_Shoots__P Parameter: Age (day) Value: 14
  misc_feature: MA Experiment 20000438 PARAMETER Experiment Name: At_Shoots__P Parameter: Tissue Value: Shoots vs. Whole Plant
  misc_feature: MA Experiment ID: 20000460 Result: Up-regulated in Transcription
  misc_feature: MA Experiment 20000460 PARAMETER Experiment Name: At_10percent_PEG_P Parameter: Age (day) Value: 12
  misc_feature: MA Experiment 20000460 PARAMETER Experiment Name: At_10percent_PEG_P Parameter: Organism Value: A. thaliana
  misc_feature: MA Experiment 20000460 PARAMETER Experiment Name: At_10percent_PEG_P Parameter: Plant Line Value: WS
  misc_feature: MA Experiment 20000460 PARAMETER Experiment Name: At_10percent_PEG_P Parameter: Timepoint (day) Value: 12
  misc_feature: MA Experiment 20000460 PARAMETER Experiment Name: At_10percent_PEG_P Parameter: Tissue Value: Whole Plant
  misc_feature: MA Experiment 20000460 PARAMETER Experiment Name: At_10percent_PEG_P Parameter: Treatment Value: 10percent PEG vs. No Treatment
  misc_feature: MA Experiment ID: 20000495 Result: Down-regulated in Transcription
  misc_feature: MA Experiment 20000495 PARAMETER Experiment Name: At_Guard_Cells_P Parameter: Harvest Date Value: 8/2/2002
  misc_feature: MA Experiment 20000495 PARAMETER Experiment Name: At_Guard_Cells_P Parameter: Organism Value: A. thaliana
  misc_feature: MA Experiment 20000495 PARAMETER Experiment Name: At_Guard_Cells_P Parameter: Tissue Value: Guard Cells vs. Leaves
  misc_feature: MA Experiment ID: 20001247 Result: Up-regulated in Transcription
  misc_feature: MA Experiment 20001247 PARAMETER Experiment Name: At_Far-red-induction_P Parameter: Age (day) Value: 7
  misc_feature: MA Experiment 20001247 PARAMETER Experiment Name: At_Far-red-induction_P Parameter: Light Value: Far-red vs. White
  misc_feature: MA Experiment 20001247 PARAMETER Experiment Name: At_Far-red-induction_P Parameter: Organism Value: A. thaliana
  misc_feature: MA Experiment 20001247 PARAMETER Experiment Name: At_Far-red-induction_P Parameter: Plant Line Value: Columbia
  misc_feature: MA Experiment 20001247 PARAMETER Experiment Name: At_Far-red-induction_P Parameter: Timepoint (hr) Value: 1
  misc_feature: MA Experiment 20001247 PARAMETER Experiment Name: At_Far-red-induction_P Parameter: Tissue Value: Whole Plant
  misc_feature: MA Experiment ID: 20001451 Result: Up-regulated in Transcription
  misc_feature: MA Experiment 20001451 PARAMETER Experiment Name: At_Far-red-induction_P Parameter: Age (day) Value: 7
  misc_feature: MA Experiment 20001451 PARAMETER Experiment Name: At_Far-red-induction_P Parameter: Light Value: Far-red vs. White
  misc_feature: MA Experiment 20001451 PARAMETER Experiment Name: At_Far-red-induction_P Parameter: Organism Value: A. thaliana
  misc_feature: MA Experiment 20001451 PARAMETER Experiment Name: At_Far-red-induction_P Parameter: Plant Line Value: Columbia
  misc_feature: MA Experiment 20001451 PARAMETER Experiment Name: At_Far-red-induction_P Parameter: Timepoint (hr) Value: 24
  misc_feature: MA Experiment 20001451 PARAMETER Experiment Name: At_Far-red-induction_P Parameter: Tissue Value: Whole Plant
  misc_feature: MA Experiment ID: 20001905 Result: Up-regulated in Transcription
  misc_feature: MA Experiment 20001905 PARAMETER Experiment Name: At_Drought_Reproduction_P Parameter: Age (day) Value: 40
  misc_feature: MA Experiment 20001905 PARAMETER Experiment Name: At_Drought_Reproduction_P Parameter: Organism Value: A. thaliana
  misc_feature: MA Experiment 20001905 PARAMETER Experiment Name: At_Drought_Reproduction_P Parameter: Plant Line Value: WS
  misc_feature: MA Experiment 20001905 PARAMETER Experiment Name: At_Drought_Reproduction_P Parameter: Timepoint (day) Value: 10
  misc_feature: MA Experiment 20001905 PARAMETER Experiment Name: At_Drought_Reproduction_P Parameter: Tissue Value: Rosettes
  misc_feature: MA Experiment 20001905 PARAMETER Experiment Name: At_Drought_Reproduction_P Parameter: Treatment Value: Drought vs. No Drought
atcgatcactgaatcttcttcttcttcttcttccttctctcaagaacagattttttttaaacgagcttgatcaataaattctctcaagatctatggcggaagagcatcgatgtcagacaccagaaagcaaccgtctctgtgttaacaactgtggcttcctcggcagctccgccaccatgaatctctgttctaattgttacggcgatctttgtctcaaacaacaacaacaatcctcctccatcaaatccaccgttgaatcttccctctctgtatctcctccgtcgtcatcatcatcggagatctcttctccgatcatccctcctctccttaaaaatccatcagtcaagctagaggtaccggagaaaaaggcggtgatttcgctgccgacgacggagcagaatcagcaacagaggccgaatcggtgcacgacgtgtaggaaacgggtcgggttaaccggattcaagtgccggtgcggtacgatgttttgcggggttcataggtacccggagatccatggatgcagctacgatttcaaatcggccggacgtgaagagatcgcgaaagcgaatccgttggtgaaagcagcgaagcttcagaagatatgatcagagccgttcgatgcgttgacttttcctctcgtaagtcttcatttctacgcgtatgtgtgtcctccgtcccccgagaaatacggatggtgtcgatttgattgatctcagccgttggatcaaaaatggtttattattgtaaaagattgattatgtatttatcaaagggacacgtgtcacgtggttttaggatggagacgctttcgctttttctccttcattttattttctttttcctttcagaaagaaataagattattcgcgttggctttttctttttat

SEQ ID NO: 77163 - protein, 170 aa, Arabidopsis thaliana; identical to SEQ ID NO: 48223
  peptide (1)..(170): Ceres Seq. ID no. 12561724
  misc_feature (111)..(151): Pfam Name: AN1-like Zinc finger Pfam Description: AN1-like Zinc finger
  misc_feature (1)..(170): Homolog of NCBI NO: 15231686 NR Description: zinc finger - like protein; protein id: supported by cDNA: gi_14596166 [Arabidopsis thaliana]
  misc_feature (1)..(170): Homolog of NCBI NO: 14596167 NR Description: zinc finger-like protein [Arabidopsis thaliana]
  misc_feature (1)..(170): Homolog of NCBI NO: 18404102 NR Description: expressed protein; protein id: At2g36320.1, by cDNA: 24255. [Arabidopsis thaliana] >gi|25408460|pir||C84779
  misc_feature (1)..(170): Homolog of NCBI NO: 15225894 NR Description: putative zinc finger protein; protein id: supported by cDNA: 14203., supported by cDNA: gi_18253038
  misc_feature (7)..(170): Homolog of NCBI NO: 18403408 NR Description: expressed protein; protein id: At1g51200.1, by cDNA: gi_15912334 [Arabidopsis thaliana]
  misc_feature (7)..(170): Homolog of NCBI NO: 25082726 NR Description: expressed protein [Arabidopsis thaliana]
  misc_feature (4)..(170): Homolog of NCBI NO: 35187687 NR Description: zinc-finger protein [Oryza sativa (indica
  misc_feature (14)..(169): Homolog of NCBI NO: 15235819 NR Description: similar to zinc finger - like protein; protein
  misc_feature (10)..(170): Homolog of NCBI NO: 15234402 NR Description: putative protein; protein id: At4g12040.1, by cDNA: 45., supported by cDNA: gi_13605498 [Arabidopsis
  misc_feature (3)..(170): Homolog of NCBI NO: 11361253 NR Description: hypothetical protein p85RF [imported] - Prunus

SEQ ID NO: 77164 - protein, 142 aa, Arabidopsis thaliana; identical to SEQ ID NO: 29088
  peptide (1)..(142): Ceres Seq. ID no. 12561725
  misc_feature (83)..(123): Pfam Name: AN1-like Zinc finger Pfam Description: AN1-like Zinc finger
  misc_feature (1)..(142): Homolog of NCBI NO: 15231686 NR Description: zinc finger - like protein; protein id: supported by cDNA: gi_14596166 [Arabidopsis thaliana]
  misc_feature (1)..(142): Homolog of NCBI NO: 14596167 NR Description: zinc finger-like protein [Arabidopsis thaliana]
  misc_feature (1)..(142): Homolog of NCBI NO: 18404102 NR Description: expressed protein; protein id: At2g36320.1, by cDNA: 24255. [Arabidopsis thaliana] >gi|25408460|pir||C84779
  misc_feature (1)..(142): Homolog of NCBI NO: 15225894 NR Description: putative zinc finger protein; protein id: supported by cDNA: 14203., supported by cDNA: gi_18253038
  misc_feature (1)..(142): Homolog of NCBI NO: 18403408 NR Description: expressed protein; protein id: At1g51200.1, by cDNA: gi_15912334 [Arabidopsis thaliana]
  misc_feature (1)..(142): Homolog of NCBI NO: 25082726 NR Description: expressed protein [Arabidopsis thaliana]
  misc_feature (1)..(142): Homolog of NCBI NO: 35187687 NR Description: zinc-finger protein [Oryza sativa (indica
  misc_feature (1)..(141): Homolog of NCBI NO: 15235819 NR Description: similar to zinc finger - like protein; protein
  misc_feature (1)..(142): Homolog of NCBI NO: 15234402 NR Description: putative protein; protein id: At4g12040.1, by cDNA: 45., supported by cDNA: gi_13605498 [Arabidopsis
  misc_feature (1)..(142): Homolog of NCBI NO: 11361253 NR Description: hypothetical protein p85RF [imported] - Prunus

SEQ ID NO: 77165 - DNA, 1421 bp, Arabidopsis thaliana
  misc_feature (1)..(1421): Ceres Seq. ID no. 12561726
  misc_feature: MA Experiment ID: 108434 Result: Up-regulated in Transcription
  misc_feature: MA Experiment 108434 PARAMETER Experiment Name: At_Root_Tips_cDNA_P Parameter: Tissue Value: Root Tips
  misc_feature: MA Experiment ID: 108462 Result: Down-regulated in Transcription
  misc_feature: MA Experiment 108462 PARAMETER Experiment Name: At_Germinating_Seeds_cDNA_P Parameter: Age (day) Value: 2 vs. 0
  misc_feature: MA Experiment 108462 PARAMETER Experiment Name: At_Germinating_Seeds_cDNA_P Parameter: Tissue Value: Germinating Seeds
  misc_feature: MA Experiment ID: 108463 Result: Down-regulated in Transcription
  misc_feature: MA Experiment 108463 PARAMETER Experiment Name: At_Germinating_Seeds_cDNA_P Parameter: Age (day) Value: 3 vs. 0
  misc_feature: MA Experiment 108463 PARAMETER Experiment Name: At_Germinating_Seeds_cDNA_P Parameter: Tissue Value: Germinating Seeds
  misc_feature: MA Experiment ID: 108464 Result: Down-regulated in Transcription
  misc_feature: MA Experiment 108464 PARAMETER Experiment Name: At_Germinating_Seeds_cDNA_P Parameter: Age (day) Value: 4 vs. 0
  misc_feature: MA Experiment 108464 PARAMETER Experiment Name: At_Germinating_Seeds_cDNA_P Parameter: Tissue Value: Germinating Seeds
  misc_feature: MA Experiment ID: 108488 Result: Up-regulated in Transcription
  misc_feature: MA Experiment ID: 108489 Result: Up-regulated in Transcription
  misc_feature: MA Experiment ID: 108561 Result: Down-regulated in Transcription
  misc_feature: MA Experiment 108561 PARAMETER Experiment Name: At_100uM_ABA_cDNA_P Parameter: Timepoint (hr) Value: 6
  misc_feature: MA Experiment 108561 PARAMETER Experiment Name: At_100uM_ABA_cDNA_P Parameter: Tissue Value: Aerial
  misc_feature: MA Experiment 108561 PARAMETER Experiment Name: At_100uM_ABA_cDNA_P Parameter: Treatment Value: 100uM ABA vs. No Treatment
  misc_feature: MA Experiment ID: 108576 Result: Down-regulated in Transcription
  misc_feature: MA Experiment 108576 PARAMETER Experiment Name: At_42deg_Heat_cDNA_P Parameter: Temperature (deg C) Value: 42 vs. 22
  misc_feature: MA Experiment 108576 PARAMETER Experiment Name: At_42deg_Heat_cDNA_P Parameter: Timepoint (hr) Value: 1
  misc_feature: MA Experiment 108576 PARAMETER Experiment Name: At_42deg_Heat_cDNA_P Parameter: Tissue Value: Aerial
  misc_feature: MA Experiment ID: 108595 Result: Down-regulated in Transcription
  misc_feature: MA Experiment 108595 PARAMETER Experiment Name: At_Ler-pi_Ovule_cDNA_P Parameter: Plant Line Value: null
  misc_feature: MA Experiment ID: 108607 Result: Down-regulated in Transcription
  misc_feature: MA Experiment 108607 PARAMETER Experiment Name: At_100uM_ABA_cDNA_P Parameter: Timepoint (hr) Value: 4
  misc_feature: MA Experiment 108607 PARAMETER Experiment Name: At_100uM_ABA_cDNA_P Parameter: Tissue Value: Aerial
  misc_feature: MA Experiment 108607 PARAMETER Experiment Name: At_100uM_ABA_cDNA_P Parameter: Treatment Value: 100uM ABA vs. No Treatment
  misc_feature: MA Experiment ID: 20000180 Result: Down-regulated in Transcription
  misc_feature: MA Experiment 20000180 PARAMETER Experiment Name: At_Germinating_Seeds_P Parameter: Age (hr) Value: 24 vs. 0
  misc_feature: MA Experiment 20000180 PARAMETER Experiment Name: At_Germinating_Seeds_P Parameter: Tissue Value: Germinating Seeds
  misc_feature: MA Experiment ID: 20000437 Result: Down-regulated in Transcription
  misc_feature: MA Experiment 20000437 PARAMETER Experiment Name: At_Drought_P Parameter: Age (day) Value: 8
  misc_feature: MA Experiment 20000437 PARAMETER Experiment Name: At_Drought_P Parameter: Organism Value: A. thaliana
  misc_feature: MA Experiment 20000437 PARAMETER Experiment Name: At_Drought_P Parameter: Plant Line Value: WS
  misc_feature: MA Experiment 20000437 PARAMETER Experiment Name: At_Drought_P Parameter: Timepoint (hr) Value: 24
  misc_feature: MA Experiment 20000437 PARAMETER Experiment Name: At_Drought_P Parameter: Tissue Value: Whole Plant
  misc_feature: MA Experiment 20000437 PARAMETER Experiment Name: At_Drought_P Parameter: Treatment Value: Drought vs. No Drought
  misc_feature: MA Experiment ID: 20001450 Result: Down-regulated in Transcription
  misc_feature: MA Experiment 20001450 PARAMETER Experiment Name: At_Far-red-induction_P Parameter: Age (day) Value: 7
  misc_feature: MA Experiment 20001450 PARAMETER Experiment Name: At_Far-red-induction_P Parameter: Light Value: Far-red vs. White
  misc_feature: MA Experiment 20001450 PARAMETER Experiment Name: At_Far-red-induction_P Parameter: Organism Value: A. thaliana
  misc_feature: MA Experiment 20001450 PARAMETER Experiment Name: At_Far-red-induction_P Parameter: Plant Line Value: Columbia
  misc_feature: MA Experiment 20001450 PARAMETER Experiment Name: At_Far-red-induction_P Parameter: Timepoint (hr) Value: 8
  misc_feature: MA Experiment 20001450 PARAMETER Experiment Name: At_Far-red-induction_P Parameter: Tissue Value: Whole Plant
  misc_feature: MA Experiment ID: 20001557 Result: Up-regulated in Transcription
  misc_feature: MA Experiment 20001557 PARAMETER Experiment Name: At_Drought_Soil_Dry_P Parameter: Age (day) Value: 27
  misc_feature: MA Experiment 20001557 PARAMETER Experiment Name: At_Drought_Soil_Dry_P Parameter: Organism Value: A. thaliana
  misc_feature: MA Experiment 20001557 PARAMETER Experiment Name: At_Drought_Soil_Dry_P Parameter: Plant Line Value: WS
  misc_feature: MA Experiment 20001557 PARAMETER Experiment Name: At_Drought_Soil_Dry_P Parameter: Post Timepoint (hr) Value: 3
  misc_feature: MA Experiment 20001557 PARAMETER Experiment Name: At_Drought_Soil_Dry_P Parameter: Post-Treatment Value: Re-Water vs. No Drought
  misc_feature: MA Experiment 20001557 PARAMETER Experiment Name: At_Drought_Soil_Dry_P Parameter: Timepoint (day) Value: 13
  misc_feature: MA Experiment 20001557 PARAMETER Experiment Name: At_Drought_Soil_Dry_P Parameter: Treatment Value: Drought vs. No Drought
  misc_feature: MA Experiment ID: 20001558 Result: Up-regulated in Transcription
  misc_feature: MA Experiment 20001558 PARAMETER Experiment Name: At_Drought_Soil_Dry_P Parameter: Age (day) Value: 27
  misc_feature: MA Experiment 20001558 PARAMETER Experiment Name: At_Drought_Soil_Dry_P Parameter: Organism Value: A. thaliana
  misc_feature: MA Experiment 20001558 PARAMETER Experiment Name: At_Drought_Soil_Dry_P Parameter: Plant Line Value: WS
  misc_feature: MA Experiment 20001558 PARAMETER Experiment Name: At_Drought_Soil_Dry_P Parameter: Post Timepoint (hr) Value: 6
  misc_feature: MA Experiment 20001558 PARAMETER Experiment Name: At_Drought_Soil_Dry_P Parameter: Post-Treatment Value: Re-Water vs. No Drought
  misc_feature: MA Experiment 20001558 PARAMETER Experiment Name: At_Drought_Soil_Dry_P Parameter: Timepoint (day) Value: 13
  misc_feature: MA Experiment 20001558 PARAMETER Experiment Name: At_Drought_Soil_Dry_P Parameter: Treatment Value: Drought vs. No Drought
  misc_feature: MA Experiment ID: 20001757 Result: Up-regulated in Transcription
  misc_feature: MA Experiment 20001757 PARAMETER Experiment Name: At_50mM_NH4NO3_L-to-H_P Parameter: Timepoint (hr) Value: 6
  misc_feature: MA Experiment 20001757 PARAMETER Experiment Name: At_50mM_NH4NO3_L-to-H_P Parameter: Tissue Value: Leaf
  misc_feature: MA Experiment 20001757 PARAMETER Experiment Name: At_50mM_NH4NO3_L-to-H_P Parameter: Treatment Value: 50mM NH4NO3 vs 100mM Mannitol
aaaaagctaagtaaactactcaagtccctcccttttccggcgtcgctattctcagtctcattctgtctcccccatggaagctcggattttgcagtcttcttcttcctgttattcgtctctttacgctgtcaatcgatcccggttctcttctgtgtcatctccgaaacctttctccgtcagctttgctcagacgacgagaacaaggactcgtgtattatccatgtcgaagaaagatggtcgcactgataaagatgatgacactgatagtctcaattacaaagattctggtgttgatatcgatgctggtgctgagcttgttaaacgaatcgcaaagatggctcctggaattggtggatttggtggtctctttccattaggtgatagttatcttgtagctggtacggatggtgtagggactaaattgaaattggcatttgaaactggaattcatgacaccattggaatcgacttggttgctatgagtgtgaatgatattattacttctggtgcaaagcctctgtttttccttgattactttgctactagtcgtcttgatgtagaccttgctgaaaaggtcattaaagggattgttgaaggttgtcggcaatcggaatgtgctctcttagggggagagactgcagagatgcctgacttttatgcagagggcgagtacgatctaagtgggtttgcagtaggcatagtaaagaaaacttcagttatcaacggaaaaaacattgtggccggtgatgttcttattggcctcccgtctagtggtgttcattccaatggtttttctctagtaagaagggtattggctcgaagcaatctttcgctgaaggatgcgcttccaggtggatcaagtacccttggtgatgctctaatggcacccactgtcatttacgtgaaacaggtacttgatatgatagaaaaaggaggagtgaaaggtttagctcatatcacaggcggaggtttcacagacaacattccccgagtcttcccggacggtttgggtgctgttattcacaccgatgcttgggaacttccaccgttgttcaagtggattcaacagactgggagaatagaagacagtgagatgagaaggacgtttaacctggggatagggatggttatggtggttagtccagaggcagcttcacgaatactagaagaagtcaagaatggagactatgttgcgtatcgcgtaggagaggttgtcaacggtgaaggcgtaagctatcagtagagtgttgtgtgttcttttttcttctgtgtttttttaagttttcgtttcccaccgtttttaagaattaatccatttgtctacggttttatgaggttacaatcgagatgaggcattttttaagacgtcgtgttattatttgatctaattttttaaaaacaaccaatgtgattggtctggt

SEQ ID NO: 77166 - protein, 389 aa, Arabidopsis thaliana; identical to SEQ ID NO: 50839
  peptide (1)..(389): Ceres Seq. ID no. 12561727
  misc_feature (222)..(389): Pfam Name: AIR synthase related protein, C-terminal domain Pfam Description: AIR synthase related protein, C-terminal domain
  misc_feature (1)..(389): Homolog of NCBI NO: 15233161 NR Description: phosphoribosylformylglycinamidine cyclo-ligase protein id: At3g55010.1, supported by cDNA: gi_16974614
  misc_feature (1)..(344): Homolog of NCBI NO: 541885 NR Description: phosphoribosylformylglycinamidine cyclo-ligase
  misc_feature (48)..(388): Homolog of NCBI NO: 1709925 NR Description: Phosphoribosylformylglycinamidine cyclo-ligase,
  misc_feature (20)..(388): Homolog of NCBI NO: 34897250 NR Description: putative 5'-phosphoribosyl-5-aminoimidazole
  misc_feature (62)..(389): Homolog of NCBI NO: 34499070 NR Description: phosphoribosylformylglycinamidine cyclo-ligase
  misc_feature (66)..(380): Homolog of NCBI NO: 17547342 NR Description: PROBABLE PHOSPHORIBOSYLFORMYLGLYCINAMIDINE (AIRS) PROTEIN [Ralstonia solanacearum]
  misc_feature (66)..(380): Homolog of NCBI NO: 22976704 NR Description: hypothetical protein [Ralstonia metallidurans]
  misc_feature (65)..(389): Homolog of NCBI NO: 15794333 NR Description: putative phosphoribosylformylglycinamidine
  misc_feature (65)..(389): Homolog of NCBI NO: 15677123 NR Description: phosphoribosylformylglycinamidine cyclo-ligase meningitidis MC58] >gi|11272453|pir||E81104
  misc_feature (60)..(385): Homolog of NCBI NO: 23029993 NR Description: hypothetical protein [Microbulbifer degradans

SEQ ID NO: 77167 - protein, 340 aa, Arabidopsis thaliana; identical to SEQ ID NO: 50840
  peptide (1)..(340): Ceres Seq. ID no. 12561728
  misc_feature (173)..(340): Pfam Name: AIR synthase related protein, C-terminal domain Pfam Description: AIR synthase related protein, C-terminal domain
  misc_feature (1)..(340): Homolog of NCBI NO: 15233161 NR Description: phosphoribosylformylglycinamidine cyclo-ligase protein id: At3g55010.1, supported by cDNA: gi_16974614
  misc_feature (1)..(295): Homolog of NCBI NO: 541885 NR Description: phosphoribosylformylglycinamidine cyclo-ligase
  misc_feature (1)..(339): Homolog of NCBI NO: 1709925 NR Description: Phosphoribosylformylglycinamidine cyclo-ligase,
  misc_feature (1)..(339): Homolog of NCBI NO: 34897250 NR Description: putative 5'-phosphoribosyl-5-aminoimidazole
  misc_feature (13)..(340): Homolog of NCBI NO: 34499070 NR Description: phosphoribosylformylglycinamidine cyclo-ligase
  misc_feature (17)..(331): Homolog of NCBI NO: 17547342 NR Description: PROBABLE PHOSPHORIBOSYLFORMYLGLYCINAMIDINE (AIRS) PROTEIN [Ralstonia solanacearum]
  misc_feature (17)..(331): Homolog of NCBI NO: 22976704 NR Description: hypothetical protein [Ralstonia metallidurans]
  misc_feature (16)..(340): Homolog of NCBI NO: 15794333 NR Description: putative phosphoribosylformylglycinamidine
  misc_feature (16)..(340): Homolog of NCBI NO: 15677123 NR Description: phosphoribosylformylglycinamidine cyclo-ligase meningitidis MC58] >gi|11272453|pir||E81104
  misc_feature (11)..(336): Homolog of NCBI NO: 23029993 NR Description: hypothetical protein [Microbulbifer degradans

SEQ ID NO: 77168 - protein, 302 aa, Arabidopsis thaliana; identical to SEQ ID NO: 50841
  peptide (1)..(302): Ceres Seq. ID no. 12561729
  misc_feature (135)..(302): Pfam Name: AIR synthase related protein, C-terminal domain Pfam Description: AIR synthase related protein, C-terminal domain
  misc_feature (1)..(302): Homolog of NCBI NO: 15233161 NR Description: phosphoribosylformylglycinamidine cyclo-ligase protein id: At3g55010.1, supported by cDNA: gi_16974614
  misc_feature (1)..(257): Homolog of NCBI NO: 541885 NR Description: phosphoribosylformylglycinamidine cyclo-ligase
  misc_feature (1)..(301): Homolog of NCBI NO: 1709925 NR Description: Phosphoribosylformylglycinamidine cyclo-ligase,
  misc_feature (1)..(301): Homolog of NCBI NO: 34897250 NR Description: putative 5'-phosphoribosyl-5-aminoimidazole
  misc_feature (1)..(302): Homolog of NCBI NO: 34499070 NR Description: phosphoribosylformylglycinamidine cyclo-ligase
  misc_feature (1)..(293): Homolog of NCBI NO: 17547342 NR Description: PROBABLE PHOSPHORIBOSYLFORMYLGLYCINAMIDINE (AIRS) PROTEIN [Ralstonia solanacearum]
  misc_feature (1)..(293): Homolog of NCBI NO: 22976704 NR Description: hypothetical protein [Ralstonia metallidurans]
  misc_feature (1)..(302): Homolog of NCBI NO: 15794333 NR Description: putative phosphoribosylformylglycinamidine
  misc_feature (1)..(302): Homolog of NCBI NO: 15677123 NR Description: phosphoribosylformylglycinamidine cyclo-ligase meningitidis MC58] >gi|11272453|pir||E81104
  misc_feature (1)..(298): Homolog of NCBI NO: 23029993 NR Description: hypothetical protein [Microbulbifer degradans

SEQ ID NO: 77169 - DNA, 1506 bp, Arabidopsis thaliana
  misc_feature (1)..(1506): Ceres Seq. ID no. 12561738
  misc_feature: MA Experiment ID: 20000179 Result: Down-regulated in Transcription
  misc_feature: MA Experiment 20000179 PARAMETER Experiment Name: At_Germinating_Seeds_P Parameter: Age (hr) Value: 6 vs. 0
  misc_feature: MA Experiment 20000179 PARAMETER Experiment Name: At_Germinating_Seeds_P Parameter: Tissue Value: Germinating Seeds
  misc_feature: MA Experiment ID: 20000438 Result: Down-regulated in Transcription
  misc_feature: MA Experiment 20000438 PARAMETER Experiment Name: At_Shoots__P Parameter: Age (day) Value: 14
  misc_feature: MA Experiment 20000438 PARAMETER Experiment Name: At_Shoots__P Parameter: Tissue Value: Shoots vs. Whole Plant
  misc_feature: MA Experiment ID: 20000495 Result: Up-regulated in Transcription
  misc_feature: MA Experiment 20000495 PARAMETER Experiment Name: At_Guard_Cells_P Parameter: Harvest Date Value: 8/2/2002
  misc_feature: MA Experiment 20000495 PARAMETER Experiment Name: At_Guard_Cells_P Parameter: Organism Value: A. thaliana
  misc_feature: MA Experiment 20000495 PARAMETER Experiment Name: At_Guard_Cells_P Parameter: Tissue Value: Guard Cells vs. Leaves
  misc_feature: MA Experiment ID: 20001451 Result: Up-regulated in Transcription
  misc_feature: MA Experiment 20001451 PARAMETER Experiment Name: At_Far-red-induction_P Parameter: Age (day) Value: 7
  misc_feature: MA Experiment 20001451 PARAMETER Experiment Name: At_Far-red-induction_P Parameter: Light Value: Far-red vs. White
  misc_feature: MA Experiment 20001451 PARAMETER Experiment Name: At_Far-red-induction_P Parameter: Organism Value: A. thaliana
  misc_feature: MA Experiment 20001451 PARAMETER Experiment Name: At_Far-red-induction_P Parameter: Plant Line Value: Columbia
  misc_feature: MA Experiment 20001451 PARAMETER Experiment Name: At_Far-red-induction_P Parameter: Timepoint (hr) Value: 24
  misc_feature: MA Experiment 20001451 PARAMETER Experiment Name: At_Far-red-induction_P Parameter: Tissue Value: Whole Plant
  misc_feature: MA Experiment ID: 20001906 Result: Down-regulated in Transcription
  misc_feature: MA Experiment 20001906 PARAMETER Experiment Name: At_Drought_Reproduction_P Parameter: Age (day) Value: 35
  misc_feature: MA Experiment 20001906 PARAMETER Experiment Name: At_Drought_Reproduction_P Parameter: Organism Value: A. thaliana
  misc_feature: MA Experiment 20001906 PARAMETER Experiment Name: At_Drought_Reproduction_P Parameter: Plant Line Value: WS
  misc_feature: MA Experiment 20001906 PARAMETER Experiment Name: At_Drought_Reproduction_P Parameter: Timepoint (day) Value: 5
  misc_feature: MA Experiment 20001906 PARAMETER Experiment Name: At_Drought_Reproduction_P Parameter: Tissue Value: Siliques
  misc_feature: MA Experiment 20001906 PARAMETER Experiment Name: At_Drought_Reproduction_P Parameter: Treatment Value: Drought vs. No Drought
atatcgtcccaaaaaaagcaaaagtccaaaaaaaaacaactccaaaacattctctcttagctctttactctttagtttctctctctctctctgcctttctctttgttgaagttcatggatgctacgaagtggactcagggttttcaagaaatgataaacgtaaagccaatggagcaaatgatttctagcaccaacaacaacacaccgcaacaacaaccaacattcatcgccaccaacacaaggccaaacgccaccgcatccaatggtggctccggaggaaataccaacaacacggctacgatggaaactagaaaggcgaggccacaagagaaagtaaattgtccaagatgcaactcaacaaacacaaagttctgttattacaacaactacagtctcacgcaaccaagatacttctgcaaaggttgtcgaaggtattggaccgaaggtggctctcttcgtaacgtcccagtcggaggtagctcaagaaagaacaagagatcctctacacctttagcttcaccttctaatcccaaacttccagatctaaacccaccgattcttttctcaagccaaatccctaataagtcaaataaagatctcaacttgctatctttcccggtcatgcaagatcatcatcatcatgctcttgagcttctaagatccaatggagtctcttcaagaggcatgaacacgttcttgcctggtcaaatgatggattcaaactcagtcctgtactcatctttagggtttccaacaatgcctgattacaaacagagtaataacaacctttcattctccattgatcatcatcaagggattggacataacaccatcaacagtaaccaaagagctcaagataacaatgatgacatgaatggagcaagtagggttttgttccctttttcagacatgaaagagctttcaagcacaacccaagagaagagtcatggtaataatacatattggaatgggatgttcagtaatacaggaggatcttcatggtgaaaaaaggttaaaaagagctcatgaactatcagctttcttctctttttctgtttttttctcctattttattatagtttttactttgatgatcttttgttttttctcacatggggaactttacttaaagttgtcagaacttagtttacagattgtctttttattccttctttctggttttccttttttcctttttttatcagtctttttaaaatatgtatttcataattgggtttgatcattcatatttattagtatcaaaatagagtctatgttcatgagggagtgttaaggggtgtgagggtagaagaataagtgaatacgagggcttcgtgtgtaatcagtgagatctgtattcatcgtttcttctatttgtagaagtatttctgtaatttattcatatttttcaacaaaaaaaaaaaatcatctttatatccaatcattatccgattgaaattaaaattgtgttaaccctaagcttgaatagattgttttaatttgttg

SEQ ID NO: 77170 - protein, 296 aa, Arabidopsis thaliana; identical to SEQ ID NO: 42123
  peptide (1)..(296): Ceres Seq. ID no. 12561739
  misc_feature (69)..(131): Pfam Name: Dof domain, zinc finger Pfam Description: Dof domain, zinc finger
  misc_feature (1)..(296): Homolog of NCBI NO: 15228621 NR Description: Dof zinc finger transcription factor, DAG1/BBFa; id: At3g61850.1 [Arabidopsis thaliana] DOF zinc finger protein DAG1 (Dof affecting germination 1)
  misc_feature (13)..(296): Homolog of NCBI NO: 30695501 NR Description: Dof zinc finger transcription factor (DAG1) [Arabidopsis thaliana] >gi|26449798|dbj|BAC42022.1| putative
  misc_feature (1)..(282): Homolog of NCBI NO: 24211633 NR Description: DOF zinc finger protein DAG2 (Dof affecting thaliana] >gi|13624641|emb|CAC36940.1| putative DNA binding
  misc_feature (13)..(282): Homolog of NCBI NO: 30690446 NR Description: Dof zinc finger protein [Arabidopsis thaliana]
  misc_feature (14)..(282): Homolog of NCBI NO: 25352313 NR Description: probable DOF zinc finger protein [imported] - thaliana >gi|4415939|gb|AAD20169.1| putative DOF zinc finger
  misc_feature (66)..(294): Homolog of NCBI NO: 7489130 NR Description: finger protein Dof - common tobacco (fragment)
  misc_feature (21)..(296): Homolog of NCBI NO: 7485287 NR Description: hypothetical protein A_TM018A10.2 - Arabidopsis >gi|2252850|gb|AAB62848.1| contains region of similarity to DNA
  misc_feature (21)..(296): Homolog of NCBI NO: 22328198 NR Description: Dof zinc finger protein; protein id: At4g00940.1
  misc_feature (23)..(296): Homolog of NCBI NO: 25352302 NR Description: hypothetical protein AT4g00940 [imported] - thaliana >gi|7267591|emb|CAB80903.1| putative protein
  misc_feature (66)..(236): Homolog of NCBI NO: 7489124 NR Description: finger protein BBF1.1 - common tobacco (fragment)

SEQ ID NO: 77171 - protein, 284 aa, Arabidopsis thaliana; identical to SEQ ID NO: 42124
  peptide (1)..(284): Ceres Seq. ID no. 12561740
  misc_feature (57)..(119): Pfam Name: Dof domain, zinc finger Pfam Description: Dof domain, zinc finger
  misc_feature (1)..(284): Homolog of NCBI NO: 15228621 NR Description: Dof zinc finger transcription factor, DAG1/BBFa; id: At3g61850.1 [Arabidopsis thaliana] DOF zinc finger protein DAG1 (Dof affecting germination 1)
  misc_feature (1)..(284): Homolog of NCBI NO: 30695501 NR Description: Dof zinc finger transcription factor (DAG1) [Arabidopsis thaliana] >gi|26449798|dbj|BAC42022.1| putative
  misc_feature (1)..(270): Homolog of NCBI NO: 24211633 NR Description: DOF zinc finger protein DAG2 (Dof affecting thaliana] >gi|13624641|emb|CAC36940.1| putative DNA binding
  misc_feature (1)..(270): Homolog of NCBI NO: 30690446 NR Description: Dof zinc finger protein [Arabidopsis thaliana]
  misc_feature (2)..(270): Homolog of NCBI NO: 25352313 NR Description: probable DOF zinc finger protein [imported] - thaliana >gi|4415939|gb|AAD20169.1| putative DOF zinc finger
  misc_feature (54)..(282): Homolog of NCBI NO: 7489130 NR Description: finger protein Dof - common tobacco (fragment)
  misc_feature (9)..(284): Homolog of NCBI NO: 7485287 NR Description: hypothetical protein A_TM018A10.2 - Arabidopsis >gi|2252850|gb|AAB62848.1| contains region of similarity to DNA
  misc_feature (9)..(284): Homolog of NCBI NO: 22328198 NR Description: Dof zinc finger protein; protein id: At4g00940.1
  misc_feature (11)..(284): Homolog of NCBI NO: 25352302 NR Description: hypothetical protein AT4g00940 [imported] - thaliana >gi|7267591|emb|CAB80903.1| putative protein
  misc_feature (54)..(224): Homolog of NCBI NO: 7489124 NR Description: finger protein BBF1.1 - common tobacco (fragment)

SEQ ID NO: 77172 - protein, 278 aa, Arabidopsis thaliana
  peptide (1)..(278): Ceres Seq. ID no. 12561741
  misc_feature (51)..(113): Pfam Name: Dof domain, zinc finger Pfam Description: Dof domain, zinc finger
  misc_feature (1)..(278): Homolog of NCBI NO: 15228621 NR Description: Dof zinc finger transcription factor, DAG1/BBFa; id: At3g61850.1 [Arabidopsis thaliana] DOF zinc finger protein DAG1 (Dof affecting germination 1)
  misc_feature (1)..(278): Homolog of NCBI NO: 30695501 NR Description: Dof zinc finger transcription factor (DAG1) [Arabidopsis thaliana] >gi|26449798|dbj|BAC42022.1| putative
  misc_feature (1)..(264): Homolog of NCBI NO: 24211633 NR Description: DOF zinc finger protein DAG2 (Dof affecting thaliana] >gi|13624641|emb|CAC36940.1| putative DNA binding
  misc_feature (1)..(264): Homolog of NCBI NO: 30690446 NR Description: Dof zinc finger protein [Arabidopsis thaliana]
  misc_feature (1)..(264): Homolog of NCBI NO: 25352313 NR Description: probable DOF zinc finger protein [imported] - thaliana >gi|4415939|gb|AAD20169.1| putative DOF zinc finger
  misc_feature (48)..(276): Homolog of NCBI NO: 7489130 NR Description: finger protein Dof - common tobacco (fragment)
  misc_feature (3)..(278): Homolog of NCBI NO: 7485287 NR Description: hypothetical protein A_TM018A10.2 - Arabidopsis >gi|2252850|gb|AAB62848.1| contains region of similarity to DNA
  misc_feature (3)..(278): Homolog of NCBI NO: 22328198 NR Description: Dof zinc finger protein; protein id: At4g00940.1
  misc_feature (5)..(278): Homolog of NCBI NO: 25352302 NR Description: hypothetical protein AT4g00940 [imported] - thaliana >gi|7267591|emb|CAB80903.1| putative protein
  misc_feature (48)..(218): Homolog of NCBI NO: 7489124 NR Description: finger protein BBF1.1 - common tobacco (fragment)
MEQMISSTNNNTPQQQPTFIATNTRPNATASNGGSGGNTNNTATMETRKARPQEKVNCPRCNSTNTKFCYYNNYSLTQPRYFCKGCRRYWTEGGSLRNVPVGGSSRKNKRSSTPLASPSNPKLPDLNPPILFSSQIPNKSNKDLNLLSFPVMQDHHHHALELLRSNGVSSRGMNTFLPGQMMDSNSVLYSSLGFPTMPDYKQSNNNLSFSIDHHQGIGHNTINSNQRAQDNNDDMNGASRVLFPFSDMKELSSTTQEKSHGNNTYWNGMFSNTGGSSW

SEQ ID NO: 77173 - DNA, 1381 bp, Arabidopsis thaliana
  misc_feature (1)..(1381): Ceres Seq. ID no. 12561746
agagctagcttctgatacatttcgactttggcgtttctcgatctgttgtttctgctcccaaataaaaataaaaaaaaatcggatcggggatttccccaaatcgtaaaattaggttttgttcttcatttctagccctagcttagttttatcgttatcttattcattaaggtttgattctacctttgtttcgcttccctcctcgaattttgcaattccgttattaaaggatcctagtttttctggctcttgtactacgtcaagtttcatggattctcgagtttcgattctcttcgtctgtgcaatagccgtgtcatgctttacgtctgggtctgcttcatcaccagtggacttttccgtttgcaattacgaattcgagctgtttcgattcgatttagaggccaaatgtcctccttctctgtatccaactcctcctattgaggtagatggagactcactagacaggctaatggcttcacaacatggaaatgcttatatgtctgtactcttttatgcttcctggtgcccattctcacgtgctgtgcgccctaagtttgatatgttgagttccatgtttcctcaaatacaacacctagctgtggagcattctcaagcactgccatctgtcttttctaggtatggtatccatagcttaccttcaatcctgatggtaaatcaaactttaaatgctcggtaccatggtcgaaaggatcttatatccctgattgagttttatgaagaggcaacaggcctccaacctgtccagtatgtggctgaaggggaaccaacaggcttaaatgccggtgatggtaacttgatcacatggttgcgcaaggggacatctattagagaaatattcaaacaagatccgttcttggtactatctctgctgtttatctgtttacaaatggcaatccttgtcttccccatagctgaatcccgcatgagagcgttatgggcttcttacgttgccaatttgaacttgggaagatttggagagataagccaactgttcaaccgtggtattcacatggtcgatgtgaggaggttatggttgaaactaagtctcgtcaaaacaagaaacttccatgaaagggcaaagaacgcacaagcttgggcttcatcgctggcatctgtctctctaggccaaacttcatcagaccaatcctgatctcaagggtaagatcatgtcagtattgggaagagatgagcttttaagtgtgtgctggaaatctgagagttcctttaatgaatgttatatgacttatttgagtttgatttgtctgcaacgaagcatgtaaatccaggaacagctttgcttctgtttgtgaatatctttctcccttttttgttctataaatttgagatgtctgtttttggcctc

SEQ ID NO: 77174 - protein, 300 aa, Arabidopsis thaliana
  peptide (1)..(300): Ceres Seq. ID no. 12561747
  misc_feature (1)..(300): Homolog of NCBI NO: 18396691 NR Description: expressed protein; protein id: At3g03860.1, by cDNA: gi_16604552, supported by cDNA: gi_20259148 [Arabidopsis >gi|16604553|gb|AAL24078.1| unknown protein [Arabidopsis
  misc_feature (1)..(160): Homolog of NCBI NO: 6006856 NR Description: unknown protein [Arabidopsis thaliana]
  misc_feature (161)..(300): Homolog of NCBI NO: 6006856 NR Description: unknown protein [Arabidopsis thaliana]
  misc_feature (1)..(300): Homolog of NCBI NO: 18418521 NR Description: putative protein; protein id: At5g18120.1, by cDNA: 105494. [Arabidopsis thaliana] unknown protein [Arabidopsis thaliana]
  misc_feature (1)..(300): Homolog of NCBI NO: 21536613 NR Description: contains similarity to protein disulfide
  misc_feature (1)..(300): Homolog of NCBI NO: 9758894 NR Description: contains similarity to protein disulfide
  misc_feature (43)..(299): Homolog of NCBI NO: 30103009 NR Description: unknown protein [Oryza sativa (japonica
  misc_feature (53)..(297): Homolog of NCBI NO: 29367467 NR Description: disulfide isomerase-like protein [Oryza sativa
  misc_feature (76)..(297): Homolog of NCBI NO: 18399435 NR Description: expressed protein; protein id: At1g34780.1, by cDNA: gi_16649012, supported by cDNA: gi_20260019 [Arabidopsis >gi|5668777|gb|AAD46003.1|AC007894_1 Contains similarity to from
  misc_feature (76)..(162): Homolog of NCBI NO: 15236643 NR Description: putative protein disulfide isomerase; protein id: [Arabidopsis thaliana] >gi|25372635|pir||A85090 hypothetical
MDSRVSILFVCAIAVSCFTSGSASSPVDFSVCNYEFELFRFDLEAKCPPSLYPTPPIEVDGDSLDRLMASQHGNAYMSVLFYASWCPFSRAVRPKFDMLSSMFPQIQHLAVEHSQALPSVFSRYGIHSLPSILMVNQTLNARYHGRKDLISLIEFYEEATGLQPVQYVAEGEPTGLNAGDGNLITWLRKGTSIREIFKQDPFLVLSLLFICLQMAILVFPIAESRMRALWASYVANLNLGRFGEISQLFNRGIHMVDVRRLWLKLSLVKTRNFHERAKNAQAWASSLASVSLGQTSSDQS

SEQ ID NO: 77175 - protein, 233 aa, Arabidopsis thaliana
  peptide (1)..(233): Ceres Seq. ID no. 12561748
  misc_feature (1)..(233): Homolog of NCBI NO: 18396691 NR Description: expressed protein; protein id: At3g03860.1, by cDNA: gi_16604552, supported by cDNA: gi_20259148 [Arabidopsis >gi|16604553|gb|AAL24078.1| unknown protein [Arabidopsis
  misc_feature (1)..(93): Homolog of NCBI NO: 6006856 NR Description: unknown protein [Arabidopsis thaliana]
  misc_feature (94)..(233): Homolog of NCBI NO: 6006856 NR Description: unknown protein [Arabidopsis thaliana]
  misc_feature (1)..(233): Homolog of NCBI NO: 18418521 NR Description: putative protein; protein id: At5g18120.1, by cDNA: 105494. [Arabidopsis thaliana] unknown protein [Arabidopsis thaliana]
  misc_feature (1)..(233): Homolog of NCBI NO: 21536613 NR Description: contains similarity to protein disulfide
  misc_feature (1)..(233): Homolog of NCBI NO: 9758894 NR Description: contains similarity to protein disulfide
  misc_feature (1)..(232): Homolog of NCBI NO: 30103009 NR Description: unknown protein [Oryza sativa (japonica
  misc_feature (1)..(230): Homolog of NCBI NO: 29367467 NR Description: disulfide isomerase-like protein [Oryza sativa
  misc_feature (9)..(230): Homolog of NCBI NO: 18399435 NR Description: expressed protein; protein id: At1g34780.1, by cDNA: gi_16649012, supported by cDNA: gi_20260019 [Arabidopsis >gi|5668777|gb|AAD46003.1|AC007894_1 Contains similarity to from
  misc_feature (9)..(95): Homolog of NCBI NO: 15236643 NR Description: putative protein disulfide isomerase; protein id: [Arabidopsis thaliana] >gi|25372635|pir||A85090 hypothetical
MASQHGNAYMSVLFYASWCPFSRAVRPKFDMLSSMFPQIQHLAVEHSQALPSVFSRYGIHSLPSILMVNQTLNARYHGRKDLISLIEFYEEATGLQPVQYVAEGEPTGLNAGDGNLITWLRKGTSIREIFKQDPFLVLSLLFICLQMAILVFPIAESRMRALWASYVANLNLGRFGEISQLFNRGIHMVDVRRLWLKLSLVKTRNFHERAKNAQAWASSLASVSLGQTSSDQS

SEQ ID NO: 77176 - protein, 224 aa, Arabidopsis thaliana
  peptide (1)..(224): Ceres Seq. ID no. 12561749
  misc_feature (1)..(224): Homolog of NCBI NO: 18396691 NR Description: expressed protein; protein id: At3g03860.1, by cDNA: gi_16604552, supported by cDNA: gi_20259148 [Arabidopsis >gi|16604553|gb|AAL24078.1| unknown protein [Arabidopsis
  misc_feature (1)..(84): Homolog of NCBI NO: 6006856 NR Description: unknown protein [Arabidopsis thaliana]
  misc_feature (85)..(224): Homolog of NCBI NO: 6006856 NR Description: unknown protein [Arabidopsis thaliana]
  misc_feature (1)..(224): Homolog of NCBI NO: 18418521 NR Description: putative protein; protein id: At5g18120.1, by cDNA: 105494. [Arabidopsis thaliana] unknown protein [Arabidopsis thaliana]
  misc_feature (1)..(224): Homolog of NCBI NO: 21536613 NR Description: contains similarity to protein disulfide
  misc_feature (1)..(224): Homolog of NCBI NO: 9758894 NR Description: contains similarity to protein disulfide
  misc_feature (1)..(223): Homolog of NCBI NO: 30103009 NR Description: unknown protein [Oryza sativa (japonica
  misc_feature (1)..(221): Homolog of NCBI NO: 29367467 NR Description: disulfide isomerase-like protein [Oryza sativa
  misc_feature (1)..(221): Homolog of NCBI NO: 18399435 NR Description: expressed protein; protein id: At1g34780.1, by cDNA: gi_16649012, supported by cDNA: gi_20260019 [Arabidopsis >gi|5668777|gb|AAD46003.1|AC007894_1 Contains similarity to from
  misc_feature (1)..(86): Homolog of NCBI NO: 15236643 NR Description: putative protein disulfide isomerase; protein id: [Arabidopsis thaliana] >gi|25372635|pir||A85090 hypothetical
MSVLFYASWCPFSRAVRPKFDMLSSMFPQIQHLAVEHSQALPSVFSRYGIHSLPSILMVNQTLNARYHGRKDLISLIEFYEEATGLQPVQYVAEGEPTGLNAGDGNLITWLRKGTSIREIFKQDPFLVLSLLFICLQMAILVFPIAESRMRALWASYVANLNLGRFGEISQLFNRGIHMVDVRRLWLKLSLVKTRNFHERAKNAQAWASSLASVSLGQTSSDQS

SEQ ID NO: 77177 - DNA, 2388 bp, Arabidopsis thaliana
  misc_feature (1)..(2388): Ceres Seq. ID no. 12561754
  misc_feature: MA Experiment ID: 108434 Result: Down-regulated in Transcription
  misc_feature: MA Experiment 108434 PARAMETER Experiment Name: At_Root_Tips_cDNA_P Parameter: Tissue Value: Root Tips
  misc_feature: MA Experiment ID: 108463 Result: Up-regulated in Transcription
  misc_feature: MA Experiment 108463 PARAMETER Experiment Name: At_Germinating_Seeds_cDNA_P Parameter: Age (day) Value: 3 vs. 0
  misc_feature: MA Experiment 108463 PARAMETER Experiment Name: At_Germinating_Seeds_cDNA_P Parameter: Tissue Value: Germinating Seeds
  misc_feature: MA Experiment ID: 108464 Result: Up-regulated in Transcription
  misc_feature: MA Experiment 108464 PARAMETER Experiment Name: At_Germinating_Seeds_cDNA_P Parameter: Age (day) Value: 4 vs. 0
  misc_feature: MA Experiment 108464 PARAMETER Experiment Name: At_Germinating_Seeds_cDNA_P Parameter: Tissue Value: Germinating Seeds
  misc_feature: MA Experiment ID: 108474 Result: Down-regulated in Transcription
  misc_feature: MA Experiment 108474 PARAMETER Experiment Name: At_Drought_Flowers_cDNA_P Parameter: Timepoint (hr) Value: null
  misc_feature: MA Experiment 108474 PARAMETER Experiment Name: At_Drought_Flowers_cDNA_P Parameter: Treatment Value: Drought vs. No Drought
  misc_feature: MA Experiment ID: 108573 Result: Up-regulated in Transcription
  misc_feature: MA Experiment 108573 PARAMETER Experiment Name: At_Drought_cDNA_P Parameter: Timepoint (hr) Value: 6
  misc_feature: MA Experiment 108573 PARAMETER Experiment Name: At_Drought_cDNA_P Parameter: Tissue Value: Aerial
  misc_feature: MA Experiment 108573 PARAMETER Experiment Name: At_Drought_cDNA_P Parameter: Treatment Value: Drought vs. No Drought
  misc_feature: MA Experiment ID: 108577 Result: Up-regulated in Transcription
  misc_feature: MA Experiment 108577 PARAMETER Experiment Name: At_42deg_Heat_cDNA_P Parameter: Temperature (deg C) Value: 42 vs. 22
  misc_feature: MA Experiment 108577 PARAMETER Experiment Name: At_42deg_Heat_cDNA_P Parameter: Timepoint (hr) Value: 6
  misc_feature: MA Experiment 108577 PARAMETER Experiment Name: At_42deg_Heat_cDNA_P Parameter: Tissue Value: Aerial
  misc_feature: MA Experiment ID: 108595 Result: Down-regulated in Transcription
  misc_feature: MA Experiment 108595 PARAMETER Experiment Name: At_Ler-pi_Ovule_cDNA_P Parameter: Plant Line Value: null
  misc_feature: MA Experiment ID: 108605 Result: Up-regulated in Transcription
  misc_feature: MA Experiment 108605 PARAMETER Experiment Name: At_100uM_ABA_cDNA_P Parameter: Timepoint (hr) Value: 6
  misc_feature: MA Experiment 108605 PARAMETER Experiment Name: At_100uM_ABA_cDNA_P Parameter: Tissue Value: Aerial
  misc_feature: MA Experiment 108605 PARAMETER Experiment Name: At_100uM_ABA_cDNA_P Parameter: Treatment Value: 100uM ABA vs. No Treatment
  misc_feature: MA Experiment ID: 108607 Result: Up-regulated in Transcription
  misc_feature: MA Experiment 108607 PARAMETER Experiment Name: At_100uM_ABA_cDNA_P Parameter: Timepoint (hr) Value: 4
  misc_feature: MA Experiment 108607 PARAMETER Experiment Name: At_100uM_ABA_cDNA_P Parameter: Tissue Value: Aerial
  misc_feature: MA Experiment 108607 PARAMETER Experiment Name: At_100uM_ABA_cDNA_P Parameter: Treatment Value: 100uM ABA vs. No Treatment
  misc_feature: MA Experiment ID: 108668 Result: Up-regulated in Transcription
  misc_feature: MA Experiment 108668 PARAMETER Experiment Name: At_2mM_SA_cDNA_P Parameter: Plant Line Value: WS
  misc_feature: MA Experiment 108668 PARAMETER Experiment Name: At_2mM_SA_cDNA_P Parameter: Timepoint (hr) Value: 6
  misc_feature: MA Experiment 108668 PARAMETER Experiment Name: At_2mM_SA_cDNA_P Parameter: Treatment Value: 2mM SA vs. No Treatment
  misc_feature: MA Experiment ID: 20000089 Result: Down-regulated in Transcription
  misc_feature: MA Experiment ID: 20000090 Result: Down-regulated in Transcription
  misc_feature: MA Experiment ID: 20000169 Result: Up-regulated in Transcription
  misc_feature: MA Experiment 20000169 PARAMETER Experiment Name: At_100uM_ABA_P Parameter: Age (day) Value: 14
  misc_feature: MA Experiment 20000169 PARAMETER Experiment Name: At_100uM_ABA_P Parameter: Organism Value: A. thaliana
  misc_feature: MA Experiment 20000169 PARAMETER Experiment Name: At_100uM_ABA_P Parameter: Plant Line Value: WS
  misc_feature: MA Experiment 20000169 PARAMETER Experiment Name: At_100uM_ABA_P Parameter: Timepoint (hr) Value: 6
  misc_feature: MA Experiment 20000169 PARAMETER Experiment Name: At_100uM_ABA_P Parameter: Tissue Value: Aerial
  misc_feature: MA Experiment 20000169 PARAMETER Experiment Name: At_100uM_ABA_P Parameter: Treatment Value: 100uM ABA vs. No Treatment
  misc_feature: MA Experiment ID: 20000182 Result: Up-regulated in Transcription
  misc_feature: MA Experiment 20000182 PARAMETER Experiment Name: At_2mM_SA_P Parameter: Age (day) Value: 14
  misc_feature: MA Experiment 20000182 PARAMETER Experiment Name: At_2mM_SA_P Parameter: Organism Value: A. thaliana
  misc_feature: MA Experiment 20000182 PARAMETER Experiment Name: At_2mM_SA_P Parameter: Plant Line Value: WS
  misc_feature: MA Experiment 20000182 PARAMETER Experiment Name: At_2mM_SA_P Parameter: Timepoint (hr) Value: 6
  misc_feature: MA Experiment 20000182 PARAMETER Experiment Name: At_2mM_SA_P Parameter: Tissue Value: Aerial
  misc_feature: MA Experiment 20000182 PARAMETER Experiment Name: At_2mM_SA_P Parameter: Treatment Value: 2mM SA vs. No Treatment
  misc_feature: MA Experiment ID: 20000185 Result: Down-regulated in Transcription
  misc_feature: MA Experiment 20000185 PARAMETER Experiment Name: At_Roots__P Parameter: Age (day) Value: 7 vs. 21
  misc_feature: MA Experiment 20000185 PARAMETER Experiment Name: At_Roots__P Parameter: Organism Value: A. thaliana
  misc_feature: MA Experiment 20000185 PARAMETER Experiment Name: At_Roots__P Parameter: Tissue Value: Roots vs. Whole Plant
  misc_feature: MA Experiment ID: 20000234 Result: Down-regulated in Transcription
  misc_feature: MA Experiment 20000234 PARAMETER Experiment Name: At_Siliques_P Parameter: Age (day) Value: 21
  misc_feature: MA Experiment 20000234 PARAMETER Experiment Name: At_Siliques_P Parameter: Organism Value: A. thaliana
  misc_feature: MA Experiment 20000234 PARAMETER Experiment Name: At_Siliques_P Parameter: Plant Line Value: WS
  misc_feature: MA Experiment 20000234 PARAMETER Experiment Name: At_Siliques_P Parameter: Tissue Value: Less Than 5mm Siliques vs. Whole Plant
  misc_feature: MA Experiment ID: 20000265 Result: Up-regulated in Transcription
  misc_feature: MA Experiment 20000265 PARAMETER Experiment Name: At_Open_Flower_P Parameter: Age (day) Value: 21
  misc_feature: MA Experiment 20000265 PARAMETER Experiment Name: At_Open_Flower_P Parameter: Plant Line Value: WS
  misc_feature: MA Experiment 20000265 PARAMETER Experiment Name: At_Open_Flower_P Parameter: Tissue Value: Closed Flower vs. Whole Plant
  misc_feature: MA Experiment ID: 20000439 Result: Down-regulated in Transcription
  misc_feature: MA Experiment 20000439 PARAMETER Experiment Name: At_Roots__P Parameter: Age (day) Value: 14 vs. 21
  misc_feature: MA Experiment 20000439 PARAMETER Experiment Name: At_Roots__P Parameter: Organism Value: A. thaliana
  misc_feature: MA Experiment 20000439 PARAMETER Experiment Name: At_Roots__P Parameter: Tissue Value: Roots vs. Whole Plant
  misc_feature: MA Experiment ID: 20000445 Result: Up-regulated in Transcription
  misc_feature: MA Experiment 20000445 PARAMETER Experiment Name: At_100uM_NAA__P Parameter: Age (day) Value: 14
  misc_feature: MA Experiment 20000445 PARAMETER Experiment Name: At_100uM_NAA__P Parameter: Organism Value: A. thaliana
  misc_feature: MA Experiment 20000445 PARAMETER Experiment Name: At_100uM_NAA__P Parameter: Plant Line Value: WS
  misc_feature: MA Experiment 20000445 PARAMETER Experiment Name: At_100uM_NAA__P Parameter: Timepoint (hr) Value: 6
  misc_feature: MA Experiment 20000445 PARAMETER Experiment Name: At_100uM_NAA__P Parameter: Tissue Value: Aerial
  misc_feature: MA Experiment 20000445 PARAMETER Experiment Name: At_100uM_NAA__P Parameter: Treatment Value: 100uM NAA vs. No Treatment
  misc_feature: MA Experiment ID: 20000495 Result: Down-regulated in Transcription
  misc_feature: MA Experiment 20000495 PARAMETER Experiment Name: At_Guard_Cells_P Parameter: Harvest Date Value: 8/2/2002
  misc_feature: MA Experiment 20000495 PARAMETER Experiment Name: At_Guard_Cells_P Parameter: Organism Value: A. thaliana
  misc_feature: MA Experiment 20000495 PARAMETER Experiment Name: At_Guard_Cells_P Parameter: Tissue Value: Guard Cells vs. Leaves
  misc_feature: MA Experiment ID: 20000794 Result: Up-regulated in Transcription
  misc_feature: MA Experiment 20000794 PARAMETER Experiment Name: At_Petals_P Parameter: Age (day) Value: 23-25 days
  misc_feature: MA Experiment 20000794 PARAMETER Experiment Name: At_Petals_P Parameter: Plant Line Value: WS
  misc_feature: MA Experiment 20000794 PARAMETER Experiment Name: At_Petals_P Parameter: Tissue Value: Petals vs. Whole plant
  misc_feature: MA Experiment ID: 20001560 Result: Down-regulated in Transcription
  misc_feature: MA Experiment 20001560 PARAMETER Experiment Name: At_Drought_Soil_Dry_P Parameter: Age (day) Value: 28
  misc_feature: MA Experiment 20001560 PARAMETER Experiment Name: At_Drought_Soil_Dry_P Parameter: Organism Value: A. thaliana
  misc_feature: MA Experiment 20001560 PARAMETER Experiment Name: At_Drought_Soil_Dry_P Parameter: Plant Line Value: WS
  misc_feature: MA Experiment 20001560 PARAMETER Experiment Name: At_Drought_Soil_Dry_P Parameter: Post Timepoint (hr) Value: None
  misc_feature: MA Experiment 20001560 PARAMETER Experiment Name: At_Drought_Soil_Dry_P Parameter: Post-Treatment Value: None
  misc_feature: MA Experiment 20001560 PARAMETER Experiment Name: At_Drought_Soil_Dry_P Parameter: Timepoint (day) Value: 14
  misc_feature: MA Experiment 20001560 PARAMETER Experiment Name: At_Drought_Soil_Dry_P Parameter: Treatment Value: Drought vs. No Drought
ttttttgttttgtttttcttaattacttttgggtatcccaggttcagaacaggtttgggttgtagtaaaattgggttcctcttgctatagtggaaatggcggctttattagcttctcagagctgctgctatggcggtgagaccgcaagagtcaccaaagctattggtttcagtagctctttggagaatcatttcactggggaagccactcagtgttatggcagcaagtctaagagatttcgtattgagatgagacagtcggaattgccctctaaggttggaatcaatggacgttcagtcaaaatggttcctgcgagtgaggtggtgaagaggaaagatggtgtgaatggatcggctgggaaaggtgttaatggagcgagtttggttagtagtagaaacattaatggtgcggcgtcaactttggttaaggcaccaaagaaaacaacagaatcgtaccttcctccaccggttgaaggagttagggttcttccttctgatgaaggttttagctgggctgatgagaattatagctcacttcaacgcagtattgatgtttggtcatttgttatttccctgaggattcgtatcttgttcgataattcgaaatgggcttatgttggaggattcacagaagaaaaacagaaaagcagaagaagagaaacagcttcatggttgagagagagtgtattgcagcttggtccaacgtttatcaaactgggacagttgtcttcaactaggtcagacttgtttccgcgcgaattcgtggatgagctttccaagttgcaggacagagtccccgctttttctccagagaaagcaaagcgcttcattgaggctgaacttggggctcctattagtgtaatgtataaagaatttgaagagcaacccatagctgcagctagccttggtcaggtacacagagctgttttgcacaatggcgagaaagtggtagtaaaagtacaaagacccggactaaagaaacttttcgatattgatctacgaaatctgaagctgattgccgagtatttccagaaaagtgaatcatttggtacaaacgattgggttggtatctatgaagaatgtgccttaattttgtatcaagagattgactacataaacgaagctaagaacgctgacagattccggagagacttccggaatataaactgggtccgcgtacctttggtttattgggattactctgccatgaaggtcttgactttggagtatgtaccaggtgttaagatcaacaacttggacgccttagctgcacggggttttaaccgttctagaatcgcatcacgggccattgaagcttatcttatacagatactcaaaaccggcttctttcatgcggatccgcacccaggaaaccttgcaattgatgtagatgaatcaatcatctactatgacttcggcatgatgggagagatcaaaacatttactcggaagagattacttgatctcttctattctgtttatgaaaaagatgcaaaaaaggtcatgcaaaaccttatagaccttgaagcacttcaacccactggagatctttcatcggtaaggagatctgttcagtttttcttggacaacctattaagccaatcaccagatcagcaacagactttggcagctattggagaggatctgtttgcaatttcccaggatcagccattccgtttcccatcaactttcacctttgtcatccgagcattttccacacttgagggtattggttacatccttgatccagaattttcctttgtgaaggttgcggctccttatgcgcaggaactcctggatctaaaacaaaggcaacgctcgggaactcagcttgtccaagaaataagaaagcaggctgatgatgccaggtcttctactctgtctatgccatatcgagtgcagcgaatagaagagtttgtgaaagaactcgattcaggcgatctgaaactccgtgttcgggttcttgagtcggaaagagcagcccggaaagcgacaatactgcagatggcgacgatgtatacagttcttggaggaactctacttaatattggggttacatttagcaaccaaggaagtcagcttgttgccaatggatccttcattggagcagggatattcatgttattggtactgaggtctatgcaaagggtaaataagcttgataaatttgagaagatgatatgatgatgactggtggtctggtggatagtttattcttttaaagctccaaatatcagatatagaatttgtgatgtataggtatagcatgtatctttagctcccatacacaatatttataaattgtataaaaactgtttctaaggaaaggaaagtcaaagatataatatgagactgagtttcactataaagtacacaacttttattctcc

SEQ ID NO: 77178 - protein, 695 aa, Arabidopsis thaliana
  peptide (1)..(695): Ceres Seq. ID no. 12561755
  misc_feature (247)..(365): Pfam Name: ABC1 family Pfam Description: ABC1 family
  misc_feature (130)..(695): Homolog of NCBI NO: 19424003 NR Description: unknown protein [Arabidopsis thaliana]
  misc_feature (133)..(690): Homolog of NCBI NO: 23039589 NR Description: hypothetical protein [Trichodesmium erythraeum
  misc_feature (133)..(690): Homolog of NCBI NO: 23130618 NR Description: hypothetical protein [Nostoc punctiforme]
  misc_feature (133)..(690): Homolog of NCBI NO: 17232007 NR Description: hypothetical protein [Nostoc sp. PCC 7120]
  misc_feature (105)..(679): Homolog of NCBI NO: 16330264 NR Description: ABC1-like [Synechocystis sp. PCC 6803]
  misc_feature (79)..(512): Homolog of NCBI NO: 22328063 NR Description: ABC transporter-like; protein id: At5g64940.1, by cDNA: gi_16649014, supported by cDNA: gi_20465836 [Arabidopsis
  misc_feature (506)..(695): Homolog of NCBI NO: 22328063 NR Description: ABC transporter-like; protein id: At5g64940.1, by cDNA: gi_16649014, supported by cDNA: gi_20465836 [Arabidopsis
  misc_feature (79)..(415): Homolog of NCBI NO: 8843758 NR Description: ABC transporter-like [Arabidopsis thaliana]
  misc_feature (506)..(695): Homolog of NCBI NO: 8843758 NR Description: ABC transporter-like [Arabidopsis thaliana]
  misc_feature (399)..(512): Homolog of NCBI NO: 8843758 NR Description: ABC transporter-like [Arabidopsis thaliana]
MAALLASQSCCYGGETARVTKAIGFSSSLENHFTGEATQCYGSKSKRFRIEMRQSELPSKVGINGRSVKMVPASEVVKRKDGVNGSAGKGVNGASLVSSRNINGAASTLVKAPKKTTESYLPPPVEGVRVLPSDEGFSWADENYSSLQRSIDVWSFVISLRIRILFDNSKWAYVGGFTEEKQKSRRRETASWLRESVLQLGPTFIKLGQLSSTRSDLFPREFVDELSKLQDRVPAFSPEKAKRFIEAELGAPISVMYKEFEEQPIAAASLGQVHRAVLHNGEKVVVKVQRPGLKKLFDIDLRNLKLIAEYFQKSESFGTNDWVGIYEECALILYQEIDYINEAKNADRFRRDFRNINWVRVPLVYWDYSAMKVLTLEYVPGVKINNLDALAARGFNRSRIASRAIEAYLIQILKTGFFHADPHPGNLAIDVDESIIYYDFGMMGEIKTFTRKRLLDLFYSVYEKDAKKVMQNLIDLEALQPTGDLSSVRRSVQFFLDNLLSQSPDQQQTLAAIGEDLFAISQDQPFRFPSTFTFVIRAFSTLEGIGYILDPEFSFVKVAAPYAQELLDLKQRQRSGTQLVQEIRKQADDARSSTLSMPYRVQRIEEFVKELDSGDLKLRVRVLESERAARKATILQMATMYTVLGGTLLNIGVTFSNQGSQLVANGSFIGAGIFMLLVLRSMQRVNKLDKFEKMI

SEQ ID NO: 77179 - protein, 644 aa, Arabidopsis thaliana; identical to SEQ ID NO: 38197
  peptide (1)..(644): Ceres Seq. ID no. 12561756
  misc_feature (196)..(314): Pfam Name: ABC1 family Pfam Description: ABC1 family
  misc_feature (79)..(644): Homolog of NCBI NO: 19424003 NR Description: unknown protein [Arabidopsis thaliana]
  misc_feature (82)..(639): Homolog of NCBI NO: 23039589 NR Description: hypothetical protein [Trichodesmium erythraeum
  misc_feature (82)..(639): Homolog of NCBI NO: 23130618 NR Description: hypothetical protein [Nostoc punctiforme]
  misc_feature (82)..(639): Homolog of NCBI NO: 17232007 NR Description: hypothetical protein [Nostoc sp. PCC 7120]
  misc_feature (54)..(628): Homolog of NCBI NO: 16330264 NR Description: ABC1-like [Synechocystis sp. PCC 6803]
  misc_feature (28)..(461): Homolog of NCBI NO: 22328063 NR Description: ABC transporter-like; protein id: At5g64940.1, by cDNA: gi_16649014, supported by cDNA: gi_20465836 [Arabidopsis
  misc_feature (455)..(644): Homolog of NCBI NO: 22328063 NR Description: ABC transporter-like; protein id: At5g64940.1, by cDNA: gi_16649014, supported by cDNA: gi_20465836 [Arabidopsis
  misc_feature (28)..(364): Homolog of NCBI NO: 8843758 NR Description: ABC transporter-like [Arabidopsis thaliana]
  misc_feature (455)..(644): Homolog of NCBI NO: 8843758 NR Description: ABC transporter-like [Arabidopsis thaliana]
  misc_feature (348)..(461): Homolog of NCBI NO: 8843758 NR Description: ABC transporter-like [Arabidopsis thaliana]

SEQ ID NO: 77180 - protein, 626 aa, Arabidopsis thaliana; identical to SEQ ID NO: 38198
  peptide (1)..(626): Ceres Seq. ID no. 12561757
  misc_feature (178)..(296): Pfam Name: ABC1 family Pfam Description: ABC1 family
  misc_feature (61)..(626): Homolog of NCBI NO: 19424003 NR Description: unknown protein [Arabidopsis thaliana]
  misc_feature (64)..(621): Homolog of NCBI NO: 23039589 NR Description: hypothetical protein [Trichodesmium erythraeum
  misc_feature (64)..(621): Homolog of NCBI NO: 23130618 NR Description: hypothetical protein [Nostoc punctiforme]
  misc_feature (64)..(621): Homolog of NCBI NO: 17232007 NR Description: hypothetical protein [Nostoc sp. PCC 7120]
  misc_feature (36)..(610): Homolog of NCBI NO: 16330264 NR Description: ABC1-like [Synechocystis sp. PCC 6803]
  misc_feature (10)..(443): Homolog of NCBI NO: 22328063 NR Description: ABC transporter-like; protein id: At5g64940.1, by cDNA: gi_16649014, supported by cDNA: gi_20465836 [Arabidopsis
  misc_feature (437)..(626): Homolog of NCBI NO: 22328063 NR Description: ABC transporter-like; protein id: At5g64940.1, by cDNA: gi_16649014, supported by cDNA: gi_20465836 [Arabidopsis
  misc_feature (10)..(346): Homolog of NCBI NO: 8843758 NR Description: ABC transporter-like [Arabidopsis thaliana]
  misc_feature (437)..(626): Homolog of NCBI NO: 8843758 NR Description: ABC transporter-like [Arabidopsis thaliana]
  misc_feature (330)..(443): Homolog of NCBI NO: 8843758 NR Description: ABC transporter-like [Arabidopsis thaliana]

SEQ ID NO: 77181 - DNA, 3341 bp, Arabidopsis thaliana
  misc_feature (1)..(3341): Ceres Seq. ID no. 12561762
  misc_feature: MA Experiment ID: 20000180 Result: Down-regulated in Transcription
  misc_feature: MA Experiment 20000180 PARAMETER Experiment Name: At_Germinating_Seeds_P Parameter: Age (hr) Value: 24 vs. 0
  misc_feature: MA Experiment 20000180 PARAMETER Experiment Name: At_Germinating_Seeds_P Parameter: Tissue Value: Germinating Seeds
  misc_feature: MA Experiment ID: 20000184 Result: Down-regulated in Transcription
  misc_feature: MA Experiment 20000184 PARAMETER Experiment Name: At_Shoots__P Parameter: Age (day) Value: 7
  misc_feature: MA Experiment 20000184 PARAMETER Experiment Name: At_Shoots__P Parameter: Tissue Value: Shoots vs. Whole Plant
  misc_feature: MA Experiment ID: 20000439 Result: Up-regulated in Transcription
  misc_feature: MA Experiment 20000439 PARAMETER Experiment Name: At_Roots__P Parameter: Age (day) Value: 14 vs. 21
  misc_feature: MA Experiment 20000439 PARAMETER Experiment Name: At_Roots__P Parameter: Organism Value: A. thaliana
  misc_feature: MA Experiment 20000439 PARAMETER Experiment Name: At_Roots__P Parameter: Tissue Value: Roots vs. Whole Plant
  misc_feature: MA Experiment ID: 20000495 Result: Up-regulated in Transcription
  misc_feature: MA Experiment 20000495 PARAMETER Experiment Name: At_Guard_Cells_P Parameter: Harvest Date Value: 8/2/2002
  misc_feature: MA Experiment 20000495 PARAMETER Experiment Name: At_Guard_Cells_P Parameter: Organism Value: A. thaliana
  misc_feature: MA Experiment 20000495 PARAMETER Experiment Name: At_Guard_Cells_P Parameter: Tissue Value: Guard Cells vs. Leaves
  misc_feature: MA Experiment ID: 20000496 Result: Up-regulated in Transcription
  misc_feature: MA Experiment 20000496 PARAMETER Experiment Name: At_Guard_Cells_P Parameter: Harvest Date Value: 7/19/2002
  misc_feature: MA Experiment 20000496 PARAMETER Experiment Name: At_Guard_Cells_P Parameter: Organism Value: Canola
  misc_feature: MA Experiment 20000496 PARAMETER Experiment Name: At_Guard_Cells_P Parameter: Tissue Value: Guard Cells vs. Leaves
  misc_feature: MA Experiment ID: 20000794 Result: Up-regulated in Transcription
  misc_feature: MA Experiment 20000794 PARAMETER Experiment Name: At_Petals_P Parameter: Age (day) Value: 23-25 days
  misc_feature: MA Experiment 20000794 PARAMETER Experiment Name: At_Petals_P Parameter: Plant Line Value: WS
  misc_feature: MA Experiment 20000794 PARAMETER Experiment Name: At_Petals_P Parameter: Tissue Value: Petals vs. Whole plant
  misc_feature: MA Experiment ID: 20001911 Result: Up-regulated in Transcription
  misc_feature: MA Experiment 20001911 PARAMETER Experiment Name: At_Drought_Reproduction_P Parameter: Age (day) Value: 40
  misc_feature: MA Experiment 20001911 PARAMETER Experiment Name: At_Drought_Reproduction_P Parameter: Organism Value: A. thaliana
  misc_feature: MA Experiment 20001911 PARAMETER Experiment Name: At_Drought_Reproduction_P Parameter: Plant Line Value: WS
  misc_feature: MA Experiment 20001911 PARAMETER Experiment Name: At_Drought_Reproduction_P Parameter: Timepoint (day) Value: 10
  misc_feature: MA Experiment 20001911 PARAMETER Experiment Name: At_Drought_Reproduction_P Parameter: Tissue Value: Flowers
  misc_feature: MA Experiment 20001911 PARAMETER Experiment Name: At_Drought_Reproduction_P Parameter: Treatment Value: Drought vs. No Drought
tttttttttttaattggcttggggttagagtctgaagagagagtaagaaatctgatggggaagagaaaagagcgtcgttacgccgccatgaatagcaccggccgtcgtgtcaagcttgatctctttgcggaaccctctggagatttgggtggctcagatgtgcgtgatggagttgagcgggaacaaacagagcttaatgagctacccaattcaccttcttcttcaggtgggttccatcagctatcttcaaaatccgctatgtagccaagcccatagttatttgtcaccaaaatttcttctcagagtattagagtgattgtggtcttaaggacgtcgtatgacatcagttcaggccaagacacagtgatattttgaatgagttggtctattttgcagcttcaagctttctggggactttcttctggatgtagctcctagcggttcgtatgtctctggctgttttggcttgctacgcttaactgacggctttgtcatttatttgtgacaggtcgctgataaatcttccccgacgttattctctatcctttttttttttactttacaatgcaatataaagtatcacattcctatacttttagcaggtcatataactgaagtctatgtatgtacttggtacggctcccaaattttgacgctttatttatttgcttttttcaggtcagaaaacagaaaatcctttgcttttacttgggcagtatagtgatgatgaggtggaagaagattcggataagaaggcagatgatacctctgcagatagtttcttagccaataaaaatgagcaggttgatggattaattcaaggaggacacaaagatacgaatatcaaatcaggtgcagtcaccaccactatgcagatggctgatcaacagcagacaggggagaattcttctgctcttgattctagagctgaagtagaaactggttataccacagtgagtaactcaacaacattggatggactaaacaagcagacagttccctcagttcaagcatctggcagtgtgtctttggagcaccaggctcccacagatgttacgtcgcagtggaagatgattctgcatgaggagagcaatcagtattattactggaatacagaaactggagaaacttcgtgggaattgcctacagttttgactcaaactacctttgcatatgggactgggtacaatgagtctgggcccatggttacagatgcttccaccttgatttcaagtgttgaaccaagctatttcgtacccgtgcaaaatagtttcacaggaactgactattctacttttccaactgttgagctggatgggagaaacaaaagtgaagatctatatgtcaaaagtttaggaactgatggtcatcaagttgaatgtcggatagactctgttgttagttgtcaggaggacctttcaaggccaggaaattcagatcatgtgcatacttattttgatgcaggagctgctactgacctcccatctcgcttgttgagtcaaatcgaaagcttactggagaagctgaggtctctgaagaggtcgcatgggaactttcacagcaatgagcagataacaaagtacattctggaggttgaagtcagacattctgatgtaaaggcgctcatattggacacctcacctttactttctttttggcttcacactgagaaacaacttaagcggctggaagatagtgttaacgatgagatttaccagcttgcaaaatctgcagtaatggatgaaccagaaactaacaaaagccctcccaaagaaaagttggtggcagatgctaatacagagagtgagtccgaggacagtgagagagatggagagttagctcaatctggaaaatctcttcattcagatgaatcagctgatgggagcggcgatggatctcctaaacactccccaaatcatccagctgggcagtctgatattattccttcaactgagatgcttcagaaggccggctccccagatgtggaagatgttgacatggatgtggatatggaagttgaagaatcagttccagtgtcttctgttcaagtgatagacgcttctgatggtaagatgttcagtcaaacagagccatccaaccttcatacagatgttccaccacctccgggtgaggaatggattccaccaccgccgtctgagagtgaagatgttcctccaccgccaccagacagttatagcgaaccaattcctccaccacctgacaatggccatgtcgcttcatctttgtccagtgactctctcggagttccctataccgtacctcaatcatatatgcatcaatctgctgattatgcgacacaatacaacttatcctatccagagtccaattatcaatataccaatgctgttactctagctcctaatactcagttctatggccatgtggatggatctcaagtttctcttccccaatccacattttattatgaaactgttcctggtacaactgaagttgttcctgcagcagccagtgctggtgaagcttattacgatttcaatggtgcagctccactgtttcctgtcattagctcgggtgagtcatctctacatcacagtggagttggttctgctaatcaccacatcccaaacaactcttctacagctgcagtgcctagttcgagatccaatgactctactgaggttggatcttcagcaactgcttctaaatccacagatgttacaagtggatcgtctctattagcaaaaggtcaaactaaagtgaaacggacaaaaaagaaaacagtagctgctacatctacattgaggtcaaataaaaaggtttccagtttggttgacaagtggaaagctgcgaaagaggagctaaacgatagcgaagaagaagaagatgattccgaaatcctagatagaaaaagaaaacgagaaatcgaagaatggaaatctcgacaaatcgcaagtggagaggctaaagacaacgcaaatttccaacccctgggtggtgactggcgtgagaaagtgaaacggaagagagaacgagctgagaagtctcagaagaaagaccccgaaaagcagcaaaaacctgatctaacaaaactctcagcaaatctcccgtcggaatggcaggcatattgggacgaatctaccaaaaaagtttactatgggaatacgagtacatctcaaaccagttggacacgacccactacctgaacctcaattgctttctcgtctcacattttttacaatttcttctgtgatacatttgttttagattctctaatcttacctttatgtaaatttattacagagctagtgttggtgacatatagacaaagctaaatcaagaaaatatcattttaccatttc

SEQ ID NO: 77182 - protein, 771 aa, Arabidopsis thaliana; identical to SEQ ID NO: 75208
  peptide (1)..(771): Ceres Seq. ID no. 12561763
  misc_feature (62)..(92): Pfam Name: WW domain Pfam Description: WW domain
  misc_feature (1)..(122): Homolog of NCBI NO: 39104535 NR Description: mKIAA1014 protein [Mus musculus]
  misc_feature (639)..(713): Homolog of NCBI NO: 39104535 NR Description: mKIAA1014 protein [Mus musculus]
  misc_feature (425)..(450): Homolog of NCBI NO: 39104535 NR Description: mKIAA1014 protein [Mus musculus]
  misc_feature (1)..(97): Homolog of NCBI NO: 11360125 NR Description: hypothetical protein DKFZp434M2023.1 - human
  misc_feature (1)..(97): Homolog of NCBI NO: 24308033 NR Description: KIAA1014 protein [Homo sapiens]
  misc_feature (639)..(713): Homolog of NCBI NO: 11360125 NR Description: hypothetical protein DKFZp434M2023.1 - human
  misc_feature (639)..(713): Homolog of NCBI NO: 24308033 NR Description: KIAA1014 protein [Homo sapiens]
  misc_feature (409)..(455): Homolog of NCBI NO: 11360125 NR Description: hypothetical protein DKFZp434M2023.1 - human
  misc_feature (409)..(455): Homolog of NCBI NO: 24308033 NR Description: KIAA1014 protein [Homo sapiens]
  misc_feature (1)..(97): Homolog of NCBI NO: 20521728 NR Description: KIAA1014 protein [Homo sapiens]

SEQ ID NO: 77183 - protein, 769 aa, Arabidopsis thaliana
  peptide (1)..(769): Ceres Seq. ID no. 12561764
  misc_feature (60)..(90): Pfam Name: WW domain Pfam Description: WW domain
  misc_feature (1)..(120): Homolog of NCBI NO: 39104535 NR Description: mKIAA1014 protein [Mus musculus]
  misc_feature (637)..(711): Homolog of NCBI NO: 39104535 NR Description: mKIAA1014 protein [Mus musculus]
  misc_feature (423)..(448): Homolog of NCBI NO: 39104535 NR Description: mKIAA1014 protein [Mus musculus]
  misc_feature (1)..(95): Homolog of NCBI NO: 11360125 NR Description: hypothetical protein DKFZp434M2023.1 - human
  misc_feature (1)..(95): Homolog of NCBI NO: 24308033 NR Description: KIAA1014 protein [Homo sapiens]
  misc_feature (637)..(711): Homolog of NCBI NO: 11360125 NR Description: hypothetical protein DKFZp434M2023.1 - human
  misc_feature (637)..(711): Homolog of NCBI NO: 24308033 NR Description: KIAA1014 protein [Homo sapiens]
  misc_feature (407)..(453): Homolog of NCBI NO: 11360125 NR Description: hypothetical protein DKFZp434M2023.1 - human
  misc_feature (407)..(453): Homolog of NCBI NO: 24308033 NR Description: KIAA1014 protein [Homo sapiens]
  misc_feature (1)..(95): Homolog of NCBI NO: 20521728 NR Description: KIAA1014 protein [Homo sapiens]
MADQQQTGENSSALDSRAEVETGYTTVSNSTTLDGLNKQTVPSVQASGSVSLEHQAPTDVTSQWKMILHEESNQYYYWNTETGETSWELPTVLTQTTFAYGTGYNESGPMVTDASTLISSVEPSYFVPVQNSFTGTDYSTFPTVELDGRNKSEDLYVKSLGTDGHQVECRIDSVVSCQEDLSRPGNSDHVHTYFDAGAATDLPSRLLSQIESLLEKLRSLKRSHGNFHSNEQITKYILEVEVRHSDVKALILDTSPLLSFWLHTEKQLKRLEDSVNDEIYQLAKSAVMDEPETNKSPPKEKLVADANTESESEDSERDGELAQSGKSLHSDESADGSGDGSPKHSPNHPAGQSDIIPSTEMLQKAGSPDVEDVDMDVDMEVEESVPVSSVQVIDASDGKMFSQTEPSNLHTDVPPPPGEEWIPPPPSESEDVPPPPPDSYSEPIPPPPDNGHVASSLSSDSLGVPYTVPQSYMHQSADYATQYNLSYPESNYQYTNAVTLAPNTQFYGHVDGSQVSLPQSTFYYETVPGTTEVVPAAASAGEAYYDFNGAAPLFPVISSGESSLHHSGVGSANHHIPNNSSTAAVPSSRSNDSTEVGSSATASKSTDVTSGSSLLAKGQTKVKRTKKKTVAATSTLRSNKKVSSLVDKWKAAKEELNDSEEEEDDSEILDRKRKREIEEWKSRQIASGEAKDNANFQPLGGDWREKVKRKRERAEKSQKKDPEKQQKPDLTKLSANLPSEWQAYWDESTKKVYYGNTSTSQTSWTRPTT

SEQ ID NO: 77184 - protein, 704 aa, Arabidopsis thaliana
  peptide (1)..(704): Ceres Seq. ID no. 12561765
  misc_feature (1)..(25): Pfam Name: WW domain Pfam Description: WW domain
  misc_feature (1)..(55): Homolog of NCBI NO: 39104535 NR Description: mKIAA1014 protein [Mus musculus]
  misc_feature (572)..(646): Homolog of NCBI NO: 39104535 NR Description: mKIAA1014 protein [Mus musculus]
  misc_feature (358)..(383): Homolog of NCBI NO: 39104535 NR Description: mKIAA1014 protein [Mus musculus]
  misc_feature (1)..(30): Homolog of NCBI NO: 11360125 NR Description: hypothetical protein DKFZp434M2023.1 - human
  misc_feature (1)..(30): Homolog of NCBI NO: 24308033 NR Description: KIAA1014 protein [Homo sapiens]
  misc_feature (572)..(646): Homolog of NCBI NO: 11360125 NR Description: hypothetical protein DKFZp434M2023.1 - human
  misc_feature (572)..(646): Homolog of NCBI NO: 24308033 NR Description: KIAA1014 protein [Homo sapiens]
  misc_feature (342)..(388): Homolog of NCBI NO: 11360125 NR Description: hypothetical protein DKFZp434M2023.1 - human
  misc_feature (342)..(388): Homolog of NCBI NO: 24308033 NR Description: KIAA1014 protein [Homo sapiens]
  misc_feature (1)..(30): Homolog of NCBI NO: 20521728 NR Description: KIAA1014 protein [Homo sapiens]
MILHEESNQYYYWNTETGETSWELPTVLTQTTFAYGTGYNESGPMVTDASTLISSVEPSYFVPVQNSFTGTDYSTFPTVELDGRNKSEDLYVKSLGTDGHQVECRIDSVVSCQEDLSRPGNSDHVHTYFDAGAATDLPSRLLSQIESLLEKLRSLKRSHGNFHSNEQITKYILEVEVRHSDVKALILDTSPLLSFWLHTEKQLKRLEDSVNDEIYQLAKSAVMDEPETNKSPPKEKLVADANTESESEDSERDGELAQSGKSLHSDESADGSGDGSPKHSPNHPAGQSDIIPSTEMLQKAGSPDVEDVDMDVDMEVEESVPVSSVQVIDASDGKMFSQTEPSNLHTDVPPPPGEEWIPPPPSESEDVPPPPPDSYSEPIPPPPDNGHVASSLSSDSLGVPYTVPQSYMHQSADYATQYNLSYPESNYQYTNAVTLAPNTQFYGHVDGSQVSLPQSTFYYETVPGTTEVVPAAASAGEAYYDFNGAAPLFPVISSGESSLHHSGVGSANHHIPNNSSTAAVPSSRSNDSTEVGSSATASKSTDVTSGSSLLAKGQTKVKRTKKKTVAATSTLRSNKKVSSLVDKWKAAKEELNDSEEEEDDSEILDRKRKREIEEWKSRQIASGEAKDNANFQPLGGDWREKVKRKRERAEKSQKKDPEKQQKPDLTKLSANLPSEWQAYWDESTKKVYYGNTSTSQTSWTRPTT

SEQ ID NO: 77185 - DNA, 1930 bp, Arabidopsis thaliana
  misc_feature (1)..(1930): Ceres Seq. ID no. 12561774
  misc_feature: MA Experiment ID: 108573 Result: Up-regulated in Transcription
  misc_feature: MA Experiment 108573 PARAMETER Experiment Name: At_Drought_cDNA_P Parameter: Timepoint (hr) Value: 6
  misc_feature: MA Experiment 108573 PARAMETER Experiment Name: At_Drought_cDNA_P Parameter: Tissue Value: Aerial
  misc_feature: MA Experiment 108573 PARAMETER Experiment Name: At_Drought_cDNA_P Parameter: Treatment Value: Drought vs. No Drought
  misc_feature: MA Experiment ID: 108577 Result: Down-regulated in Transcription
  misc_feature: MA Experiment 108577 PARAMETER Experiment Name: At_42deg_Heat_cDNA_P Parameter: Temperature (deg C) Value: 42 vs. 22
  misc_feature: MA Experiment 108577 PARAMETER Experiment Name: At_42deg_Heat_cDNA_P Parameter: Timepoint (hr) Value: 6
  misc_feature: MA Experiment 108577 PARAMETER Experiment Name: At_42deg_Heat_cDNA_P Parameter: Tissue Value: Aerial
  misc_feature: MA Experiment ID: 108595 Result: Down-regulated in Transcription
  misc_feature: MA Experiment 108595 PARAMETER Experiment Name: At_Ler-pi_Ovule_cDNA_P Parameter: Plant Line Value: null
  misc_feature: MA Experiment ID: 20000069 Result: Up-regulated in Transcription
  misc_feature: MA Experiment 20000069 PARAMETER Experiment Name: At_100uM_ABA_Mutants_cDNA_P Parameter: Plant Line Value: CS23
  misc_feature: MA Experiment 20000069 PARAMETER Experiment Name: At_100uM_ABA_Mutants_cDNA_P Parameter: Timepoint (hr) Value: 6
  misc_feature: MA Experiment 20000069 PARAMETER Experiment Name: At_100uM_ABA_Mutants_cDNA_P Parameter: Tissue Value: Aerial
  misc_feature: MA Experiment 20000069 PARAMETER Experiment Name: At_100uM_ABA_Mutants_cDNA_P Parameter: Treatment Value: 100uM ABA vs. No Treatment
  misc_feature: MA Experiment ID: 20000072 Result: Up-regulated in Transcription
  misc_feature: MA Experiment 20000072 PARAMETER Experiment Name: At_100uM_ABA_Mutants_cDNA_P Parameter: Plant Line Value: CS8105
  misc_feature: MA Experiment 20000072 PARAMETER Experiment Name: At_100uM_ABA_Mutants_cDNA_P Parameter: Timepoint (hr) Value: 6
  misc_feature: MA Experiment 20000072 PARAMETER Experiment Name: At_100uM_ABA_Mutants_cDNA_P Parameter: Tissue Value: Aerial
  misc_feature: MA Experiment 20000072 PARAMETER Experiment Name: At_100uM_ABA_Mutants_cDNA_P Parameter: Treatment Value: 100uM ABA vs. No Treatment
  misc_feature: MA Experiment ID: 20000111 Result: Down-regulated in Transcription
  misc_feature: MA Experiment 20000111 PARAMETER Experiment Name: At_42deg_Heat_cDNA_P Parameter: Temperature (deg C) Value: 42 vs. 22
  misc_feature: MA Experiment 20000111 PARAMETER Experiment Name: At_42deg_Heat_cDNA_P Parameter: Timepoint (hr) Value: 6
  misc_feature: MA Experiment 20000111 PARAMETER Experiment Name: At_42deg_Heat_cDNA_P Parameter: Tissue Value: Aerial
  misc_feature: MA Experiment ID: 20000173 Result: Down-regulated in Transcription
  misc_feature: MA Experiment 20000173 PARAMETER Experiment Name: At_42deg_Heat_P Parameter: Age (day) Value: 14
  misc_feature: MA Experiment 20000173 PARAMETER Experiment Name: At_42deg_Heat_P Parameter: Organism Value: A. thaliana
  misc_feature: MA Experiment 20000173 PARAMETER Experiment Name: At_42deg_Heat_P Parameter: Plant Line Value: WS
  misc_feature: MA Experiment 20000173 PARAMETER Experiment Name: At_42deg_Heat_P Parameter: Temperature (deg C) Value: 42 vs. 22
  misc_feature: MA Experiment 20000173 PARAMETER Experiment Name: At_42deg_Heat_P Parameter: Timepoint (hr) Value: 6
  misc_feature: MA Experiment 20000173 PARAMETER Experiment Name: At_42deg_Heat_P Parameter: Tissue Value: Aerial
  misc_feature: MA Experiment ID: 20000184 Result: Down-regulated in Transcription
  misc_feature: MA Experiment 20000184 PARAMETER Experiment Name: At_Shoots__P Parameter: Age (day) Value: 7
  misc_feature: MA Experiment 20000184 PARAMETER Experiment Name: At_Shoots__P Parameter: Tissue Value: Shoots vs. Whole Plant
  misc_feature: MA Experiment ID: 20000794 Result: Up-regulated in Transcription
  misc_feature: MA Experiment 20000794 PARAMETER Experiment Name: At_Petals_P Parameter: Age (day) Value: 23-25 days
  misc_feature: MA Experiment 20000794 PARAMETER Experiment Name: At_Petals_P Parameter: Plant Line Value: WS
  misc_feature: MA Experiment 20000794 PARAMETER Experiment Name: At_Petals_P Parameter: Tissue Value: Petals vs. Whole plant
ttgccgtcgagacgaagaacccgctttctctgaaaccgtaatctcacttcaatatctgcgaatccacaaatctggattcacacctgagaagtttgttaatcggtacatctctagatttttgcaatcggagatggagatcgaatccgtcgcagctggttcttgttccaaggagaatcaaatgatctacaaggaatggttcgaattctccgattcagacggcgatggccgtattactggtaacgatgcgatcaagttcttcactatgtcgaatttgcctcgtccggaattgaagcagatctgggctattgcagattcaaagagacaagggtatcttggtttcaaagagtttattgttgccatgcagcttgtttcgttggctcaaactggacatgaaatatcgcatgaagttcttattagcgatgttgatttcaaaaatatcaatcctcctaccatggaaggtctgggtgtattaatggcgaaaaagaagcattcatcaaagtcgagtgatcctaatatgaatggtagccctgccgcagacacctcacttacagctcactggttctcttcaaaatcttcaaaaaagatttctctgtcctccgtaacatctatagtggatggcctgaagaggttgtacattcagaagctgaagccacttgaagtagcatatcggtttaacgattttgtatcccctttgttgactaacagtgatttcgatgcaaaacctatggtaatgcttctgggtcaatactccacaggaaaaacaacattcattaagcatttgcttaaatctacttatccaggagctcatattggaccagagccgactactgacagatttgttgttgtcatgtctggacctgatgaaagaagcattccggggaacacagtagcagttcaagcagatatgccattcagtggtcttacaacttttgggactgcctttttgtcaaagtttgaatgctctcagatgcctcaccctctgctggagcatgtaacatttgtcgacacccctggagttttatcaggggaaaaacaaagaacacagcgagcatatgatttcactggtgttacatcatggtttgcctctaagtgtgatcttatcctcctcctatttgacccacacaagctggatgtaagtgatgagttcaagcgtgtaatttcatctttacgcggtcatgatgacaagatccgcgttgttctgaataaggctgaccaagtggacactcagcagctaatgagggtatatggagctctcatgtggtcacttgggaaagttctcaatactcctgaggtctctcgtgtctacattggttccttcagtgataaacccataaacgaagctgcaactggtccaattgggagagagttgtttgaaaaggagcaagatgaccttcttgctgatttgaaagacattcctaagaaagcttgtgatcgtcgaataaatgagtttgtgaaacgggcaagagcagcaaagatacatgcgtacatcatcagccatttgaagaaggagatgccagcgataatggggaaagccaaagctcaacagaaactgatagataacttggaagacgagtttggaaaggtacaaagagagcatcacttacctaaaggagatttcccaaatgtggatcatttcagggaggtgctaagtggttacaacatcgacaagtttgagaagctaaagccgaaaatgttgcagactgttgatgatatgttggggtatgacatcccagagctcttgaaaaatttcaaaaacccttatgattaatatttctatccctcttatcttctgcggttgctgtataatccaaaactatacattcacttttggcctagcccttgtgacttgtgagcgttaatgcatatttgtatcttacaagccttgtagacaatagagacaaacataaagagtgctgacttgataattggc

SEQ ID NO: 77186 - protein, 588 aa, Arabidopsis thaliana
  peptide (1)..(588): Ceres Seq. ID no. 12561775
  misc_feature (61)..(89): Pfam Name: EF hand Pfam Description: EF hand
  misc_feature (44)..(588): Homolog of NCBI NO: 18402561 NR Description: expressed protein; protein id: At3g20290.1, by cDNA: gi_14334439 [Arabidopsis thaliana] unknown protein [Arabidopsis thaliana]
  misc_feature (170)..(588): Homolog of NCBI NO: 9294546 NR Description: contains similarity to EH domain containing
  misc_feature (44)..(153): Homolog of NCBI NO: 9294546 NR Description: contains similarity to EH domain containing
  misc_feature (56)..(588): Homolog of NCBI NO: 38345297 NR Description: OSJNBa0043A12.19 [Oryza sativa (japonica
  misc_feature (48)..(534): Homolog of NCBI NO: 18412957 NR Description: score=11.7, E=0.66,N=1; protein id: At4g05520.1
  misc_feature (186)..(580): Homolog of NCBI NO: 39594267 NR Description: Hypothetical protein CBG18887 [Caenorhabditis
  misc_feature (165)..(580): Homolog of NCBI NO: 7206819 NR Description: Receptor mediated endocytosis protein 1, isoform
  misc_feature (165)..(580): Homolog of NCBI NO: 17565132 NR Description: Receptor Mediated Endocytosis 1 RME-1 isoform 2,
  misc_feature (169)..(580): Homolog of NCBI NO: 17565130 NR Description: Receptor Mediated Endocytosis 1 isoform 1,
  misc_feature (186)..(580): Homolog of NCBI NO: 18250262 NR Description: Receptor mediated endocytosis protein 1, isoform
CRRDEEPAFSETVISLQYLRIHKSGFTPEKFVNRYISRFLQSEMEIESVAAGSCSKENQMIYKEWFEFSDSDGDGRITGNDAIKFFTMSNLPRPELKQIWAIADSKRQGYLGFKEFIVAMQLVSLAQTGHEISHEVLISDVDFKNINPPTMEGLGVLMAKKKHSSKSSDPNMNGSPAADTSLTAHWFSSKSSKKISLSSVTSIVDGLKRLYIQKLKPLEVAYRFNDFVSPLLTNSDFDAKPMVMLLGQYSTGKTTFIKHLLKSTYPGAHIGPEPTTDRFVVVMSGPDERSIPGNTVAVQADMPFSGLTTFGTAFLSKFECSQMPHPLLEHVTFVDTPGVLSGEKQRTQRAYDFTGVTSWFASKCDLILLLFDPHKLDVSDEFKRVISSLRGHDDKIRVVLNKADQVDTQQLMRVYGALMWSLGKVLNTPEVSRVYIGSFSDKPINEAATGPIGRELFEKEQDDLLADLKDIPKKACDRRINEFVKRARAAKIHAYIISHLKKEMPAIMGKAKAQQKLIDNLEDEFGKVQREHHLPKGDFPNVDHFREVLSGYNIDKFEKLKPKMLQTVDDMLGYDIPELLKNFKNPYD

SEQ ID NO: 77187 - protein, 545 aa, Arabidopsis thaliana; identical to SEQ ID NO: 36226
  peptide (1)..(545): Ceres Seq. ID no. 12561776
  misc_feature (18)..(46): Pfam Name: EF hand Pfam Description: EF hand
  misc_feature (1)..(545): Homolog of NCBI NO: 18402561 NR Description: expressed protein; protein id: At3g20290.1, by cDNA: gi_14334439 [Arabidopsis thaliana] unknown protein [Arabidopsis thaliana]
  misc_feature (127)..(545): Homolog of NCBI NO: 9294546 NR Description: contains similarity to EH domain containing
  misc_feature (1)..(110): Homolog of NCBI NO: 9294546 NR Description: contains similarity to EH domain containing
  misc_feature (13)..(545): Homolog of NCBI NO: 38345297 NR Description: OSJNBa0043A12.19 [Oryza sativa (japonica
  misc_feature (5)..(491): Homolog of NCBI NO: 18412957 NR Description: score=11.7, E=0.66,N=1; protein id: At4g05520.1
  misc_feature (143)..(537): Homolog of NCBI NO: 39594267 NR Description: Hypothetical protein CBG18887 [Caenorhabditis
  misc_feature (122)..(537): Homolog of NCBI NO: 7206819 NR Description: Receptor mediated endocytosis protein 1, isoform
  misc_feature (122)..(537): Homolog of NCBI NO: 17565132 NR Description: Receptor Mediated Endocytosis 1 RME-1 isoform 2,
  misc_feature (126)..(537): Homolog of NCBI NO: 17565130 NR Description: Receptor Mediated Endocytosis 1 isoform 1,
  misc_feature (143)..(537): Homolog of NCBI NO: 18250262 NR Description: Receptor mediated endocytosis protein 1, isoform

SEQ ID NO: 77188 - protein, 529 aa, Arabidopsis thaliana; identical to SEQ ID NO: 36227
  peptide (1)..(529): Ceres Seq. ID no. 12561777
  misc_feature (2)..(30): Pfam Name: EF hand Pfam Description: EF hand
  misc_feature (1)..(529): Homolog of NCBI NO: 18402561 NR Description: expressed protein; protein id: At3g20290.1, by cDNA: gi_14334439 [Arabidopsis thaliana] unknown protein [Arabidopsis thaliana]
  misc_feature (111)..(529): Homolog of NCBI NO: 9294546 NR Description: contains similarity to EH domain containing
  misc_feature (1)..(94): Homolog of NCBI NO: 9294546 NR Description: contains similarity to EH domain containing
  misc_feature (1)..(529): Homolog of NCBI NO: 38345297 NR Description: OSJNBa0043A12.19 [Oryza sativa (japonica
  misc_feature (1)..(475): Homolog of NCBI NO: 18412957 NR Description: score=11.7, E=0.66,N=1; protein id: At4g05520.1
  misc_feature (127)..(521): Homolog of NCBI NO: 39594267 NR Description: Hypothetical protein CBG18887 [Caenorhabditis
  misc_feature (106)..(521): Homolog of NCBI NO: 7206819 NR Description: Receptor mediated endocytosis protein 1, isoform
  misc_feature (106)..(521): Homolog of NCBI NO: 17565132 NR Description: Receptor Mediated Endocytosis 1 RME-1 isoform 2,
  misc_feature (110)..(521): Homolog of NCBI NO: 17565130 NR Description: Receptor Mediated Endocytosis 1 isoform 1,
  misc_feature (127)..(521): Homolog of NCBI NO: 18250262 NR Description: Receptor mediated endocytosis protein 1, isoform

SEQ ID NO: 77189 - DNA, 1316 bp, Arabidopsis thaliana
  misc_feature (1)..(1316): Ceres Seq. ID no. 12561782
  misc_feature: MA Experiment ID: 20000173 Result: Down-regulated in Transcription
  misc_feature: MA Experiment 20000173 PARAMETER Experiment Name: At_42deg_Heat_P Parameter: Age (day) Value: 14
  misc_feature: MA Experiment 20000173 PARAMETER Experiment Name: At_42deg_Heat_P Parameter: Organism Value: A. thaliana
  misc_feature: MA Experiment 20000173 PARAMETER Experiment Name: At_42deg_Heat_P Parameter: Plant Line Value: WS
  misc_feature: MA Experiment 20000173 PARAMETER Experiment Name: At_42deg_Heat_P Parameter: Temperature (deg C) Value: 42 vs. 22
  misc_feature: MA Experiment 20000173 PARAMETER Experiment Name: At_42deg_Heat_P Parameter: Timepoint (hr) Value: 6
  misc_feature: MA Experiment 20000173 PARAMETER Experiment Name: At_42deg_Heat_P Parameter: Tissue Value: Aerial
  misc_feature: MA Experiment ID: 20000227 Result: Up-regulated in Transcription
  misc_feature: MA Experiment 20000227 PARAMETER Experiment Name: At_Root-Tips-vs-Tops_P Parameter: Tissue Value: Root Tips vs. Root Tops
  misc_feature: MA Experiment ID: 20000264 Result: Up-regulated in Transcription
  misc_feature: MA Experiment 20000264 PARAMETER Experiment Name: At_Open_Flower_P Parameter: Age (day) Value: 21
  misc_feature: MA Experiment 20000264 PARAMETER Experiment Name: At_Open_Flower_P Parameter: Plant Line Value: WS
  misc_feature: MA Experiment 20000264 PARAMETER Experiment Name: At_Open_Flower_P Parameter: Tissue Value: Open Flower vs. Whole Plant
  misc_feature: MA Experiment ID: 20000286 Result: Up-regulated in Transcription
  misc_feature: MA Experiment 20000286 PARAMETER Experiment Name: At_Open_Flower_P Parameter: Age (day) Value: 21
  misc_feature: MA Experiment 20000286 PARAMETER Experiment Name: At_Open_Flower_P Parameter: Plant Line Value: WS
  misc_feature: MA Experiment 20000286 PARAMETER Experiment Name: At_Open_Flower_P Parameter: Tissue Value: Half Open vs. Whole Plant
  misc_feature: MA Experiment ID: 20000437 Result: Down-regulated in Transcription
  misc_feature: MA Experiment 20000437 PARAMETER Experiment Name: At_Drought_P Parameter: Age (day) Value: 8
  misc_feature: MA Experiment 20000437 PARAMETER Experiment Name: At_Drought_P Parameter: Organism Value: A. thaliana
  misc_feature: MA Experiment 20000437 PARAMETER Experiment Name: At_Drought_P Parameter: Plant Line Value: WS
  misc_feature: MA Experiment 20000437 PARAMETER Experiment Name: At_Drought_P Parameter: Timepoint (hr) Value: 24
  misc_feature: MA Experiment 20000437 PARAMETER Experiment Name: At_Drought_P Parameter: Tissue Value: Whole Plant
  misc_feature: MA Experiment 20000437 PARAMETER Experiment Name: At_Drought_P Parameter: Treatment Value: Drought vs. No Drought
  misc_feature: MA Experiment ID: 20000495 Result: Up-regulated in Transcription
  misc_feature: MA Experiment 20000495 PARAMETER Experiment Name: At_Guard_Cells_P Parameter: Harvest Date Value: 8/2/2002
  misc_feature: MA Experiment 20000495 PARAMETER Experiment Name: At_Guard_Cells_P Parameter: Organism Value: A. thaliana
  misc_feature: MA Experiment 20000495 PARAMETER Experiment Name: At_Guard_Cells_P Parameter: Tissue Value: Guard Cells vs. Leaves
  misc_feature: MA Experiment ID: 20001248 Result: Down-regulated in Transcription
  misc_feature: MA Experiment 20001248 PARAMETER Experiment Name: At_Far-red-induction_P Parameter: Age (day) Value: 7
  misc_feature: MA Experiment 20001248 PARAMETER Experiment Name: At_Far-red-induction_P Parameter: Light Value: Far-red vs. White
  misc_feature: MA Experiment 20001248 PARAMETER Experiment Name: At_Far-red-induction_P Parameter: Organism Value: A. thaliana
  misc_feature: MA Experiment 20001248 PARAMETER Experiment Name: At_Far-red-induction_P Parameter: Plant Line Value: Columbia
  misc_feature: MA Experiment 20001248 PARAMETER Experiment Name: At_Far-red-induction_P Parameter: Timepoint (hr) Value: 4
  misc_feature: MA Experiment 20001248 PARAMETER Experiment Name: At_Far-red-induction_P Parameter: Tissue Value: Whole Plant
  misc_feature: MA Experiment ID: 20001556 Result: Up-regulated in Transcription
  misc_feature: MA Experiment 20001556 PARAMETER Experiment Name: At_Drought_Soil_Dry_P Parameter: Age (day) Value: 26
  misc_feature: MA Experiment 20001556 PARAMETER Experiment Name: At_Drought_Soil_Dry_P Parameter: Organism Value: A. thaliana
  misc_feature: MA Experiment 20001556 PARAMETER Experiment Name: At_Drought_Soil_Dry_P Parameter: Plant Line Value: WS
  misc_feature: MA Experiment 20001556 PARAMETER Experiment Name: At_Drought_Soil_Dry_P Parameter: Post Timepoint (hr) Value: None
  misc_feature: MA Experiment 20001556 PARAMETER Experiment Name: At_Drought_Soil_Dry_P Parameter: Post-Treatment Value: None
  misc_feature: MA Experiment 20001556 PARAMETER Experiment Name: At_Drought_Soil_Dry_P Parameter: Timepoint (day) Value: 12
  misc_feature: MA Experiment 20001556 PARAMETER Experiment Name: At_Drought_Soil_Dry_P Parameter: Treatment Value: Drought vs. No Drought
  misc_feature: MA Experiment ID: 20001558 Result: Up-regulated in Transcription
  misc_feature: MA Experiment 20001558 PARAMETER Experiment Name: At_Drought_Soil_Dry_P Parameter: Age (day) Value: 27
  misc_feature: MA Experiment 20001558 PARAMETER Experiment Name: At_Drought_Soil_Dry_P Parameter: Organism Value: A. thaliana
  misc_feature: MA Experiment 20001558 PARAMETER Experiment Name: At_Drought_Soil_Dry_P Parameter: Plant Line Value: WS
  misc_feature: MA Experiment 20001558 PARAMETER Experiment Name: At_Drought_Soil_Dry_P Parameter: Post Timepoint (hr) Value: 6
  misc_feature: MA Experiment 20001558 PARAMETER Experiment Name: At_Drought_Soil_Dry_P Parameter: Post-Treatment Value: Re-Water vs. No Drought
  misc_feature: MA Experiment 20001558 PARAMETER Experiment Name: At_Drought_Soil_Dry_P Parameter: Timepoint (day) Value: 13
  misc_feature: MA Experiment 20001558 PARAMETER Experiment Name: At_Drought_Soil_Dry_P Parameter: Treatment Value: Drought vs. No Drought
  misc_feature: MA Experiment ID: 20001911 Result: Down-regulated in Transcription
  misc_feature: MA Experiment 20001911 PARAMETER Experiment Name: At_Drought_Reproduction_P Parameter: Age (day) Value: 40
  misc_feature: MA Experiment 20001911 PARAMETER Experiment Name: At_Drought_Reproduction_P Parameter: Organism Value: A. thaliana
  misc_feature: MA Experiment 20001911 PARAMETER Experiment Name: At_Drought_Reproduction_P Parameter: Plant Line Value: WS
  misc_feature: MA Experiment 20001911 PARAMETER Experiment Name: At_Drought_Reproduction_P Parameter: Timepoint (day) Value: 10
  misc_feature: MA Experiment 20001911 PARAMETER Experiment Name: At_Drought_Reproduction_P Parameter: Tissue Value: Flowers
  misc_feature: MA Experiment 20001911 PARAMETER Experiment Name: At_Drought_Reproduction_P Parameter: Treatment Value: Drought vs. No Drought
ctcactctctctttgttccatggacttgcaactgaaacaatggagaagtcagcagcagaatgagtcagaagaacaaggctctgctgcaactaagatatcaaactttttctttgatcagattcagtcccaaactgctacttctgctgctgcggctcctcttcctctctttgtccctgaacccacttcttcctcttctttctcttgcttctctcctgactcttctaattcttcttcttcttccaggttcctcaagatgggaaacttcttcagctgggcacagtggcaagaacttgagctacaagcactgatctatagatacatgttggctggtgcttctgttcctcaagagcttctcttacctattaagaaaagtctcctccatcaatctcctatgcatttccttcaccatcctcttcaacatagttttcctcatcaccaaccttcttggtattggggaagaggagcaatggatcctgagccagggaggtgtaagagaactgacggcaagaaatggagatgttcaagggatgttgtagcgggccacaagtattgtgaccgccacattcaccgtggaagaaaccgttcaagaaagcctgtggaaaccgccacaaccaccatcacaacgacagccacaacaaccgcatcttcttttgtcttaggtgaggagcttggtcatggaccaaacaacaaccacttcttctcctctggttcatctcaacctctccaccttagtcatcaacaaagttgttcttcagagatgaaacaagaaagcaacaacaacaagaggccatatgaagctaacagtggattcagcaatggaagatcagacgatggtcacatcttgaggcatttctttgacgattggccacgatcatcagactctacctccagtccaatgagctcatccacttgtcatctttcaatctccatgcccggtaacaacacgtcctcagatgtttctctaaaactttccacaggcaatgaagaagaagaagagaacatgagaaataacaacaatgagagggagcaaatgaattggtggagcaatggagggaatcaccacaacaatatgggaggaccattagctgaggctttgaggtcagcttcttcgacgtcaagtgttcttcatcagatgggaatctctactcaagtttttcattaaagaaaagtgtttgtaatctttttggtttgtgctctttgaatctttattttctgcagaaaataatctttgaatttgtcttcttttggaattgtgagttctgcttttggaattgttttgttccttactctgctattatatttatgtttaaagcttg

SEQ ID NO: 77190 - protein, 386 aa, Arabidopsis thaliana
  peptide (1)..(386): Ceres Seq. ID no. 12561783
  misc_feature (7)..(386): Homolog of NCBI NO: 21539886 NR Description: transcription activator [Arabidopsis thaliana]
  misc_feature (7)..(383): Homolog of NCBI NO: 15231708 NR Description: putative protein; protein id: At3g52910.1
  misc_feature (7)..(197): Homolog of NCBI NO: 27808514 NR Description: At3g52910 [Arabidopsis thaliana]
  misc_feature (7)..(357): Homolog of NCBI NO: 15227652 NR Description: unknown protein; protein id: At2g36400.1
  misc_feature (7)..(357): Homolog of NCBI NO: 26449924 NR Description: unknown protein [Arabidopsis thaliana]
  misc_feature (13)..(386): Homolog of NCBI NO: 26449924 NR Description: unknown protein [Arabidopsis thaliana]
  misc_feature (13)..(386): Homolog of NCBI NO: 15227652 NR Description: unknown protein; protein id: At2g36400.1
  misc_feature (89)..(297): Homolog of NCBI NO: 32470646 NR Description: putative growth-regulating factor [Solanum
  misc_feature (89)..(317): Homolog of NCBI NO: 32470630 NR Description: putative growth-regulating factor [Solanum
  misc_feature (48)..(245): Homolog of NCBI NO: 38605957 NR Description: OSJNBa0019K04.18 [Oryza sativa (japonica
SLSLCSMDLQLKQWRSQQQNESEEQGSAATKISNFFFDQIQSQTATSAAAAPLPLFVPEPTSSSSFSCFSPDSSNSSSSSRFLKMGNFFSWAQWQELELQALIYRYMLAGASVPQELLLPIKKSLLHQSPMHFLHHPLQHSFPHHQPSWYWGRGAMDPEPGRCKRTDGKKWRCSRDVVAGHKYCDRHIHRGRNRSRKPVETATTTITTTATTTASSFVLGEELGHGPNNNHFFSSGSSQPLHLSHQQSCSSEMKQESNNNKRPYEANSGFSNGRSDDGHILRHFFDDWPRSSDSTSSPMSSSTCHLSISMPGNNTSSDVSLKLSTGNEEEEENMRNNNNEREQMNWWSNGGNHHNNMGGPLAEALRSASSTSSVLHQMGISTQVFH

SEQ ID NO: 77191 - protein, 380 aa, Arabidopsis thaliana
  peptide (1)..(380): Ceres Seq. ID no. 12561784
  misc_feature (1)..(380): Homolog of NCBI NO: 21539886 NR Description: transcription activator [Arabidopsis thaliana]
  misc_feature (1)..(377): Homolog of NCBI NO: 15231708 NR Description: putative protein; protein id: At3g52910.1
  misc_feature (1)..(191): Homolog of NCBI NO: 27808514 NR Description: At3g52910 [Arabidopsis thaliana]
  misc_feature (1)..(351): Homolog of NCBI NO: 15227652 NR Description: unknown protein; protein id: At2g36400.1
  misc_feature (1)..(351): Homolog of NCBI NO: 26449924 NR Description: unknown protein [Arabidopsis thaliana]
  misc_feature (7)..(380): Homolog of NCBI NO: 26449924 NR Description: unknown protein [Arabidopsis thaliana]
  misc_feature (7)..(380): Homolog of NCBI NO: 15227652 NR Description: unknown protein; protein id: At2g36400.1
  misc_feature (83)..(291): Homolog of NCBI NO: 32470646 NR Description: putative growth-regulating factor [Solanum
  misc_feature (83)..(311): Homolog of NCBI NO: 32470630 NR Description: putative growth-regulating factor [Solanum
  misc_feature (42)..(239): Homolog of NCBI NO: 38605957 NR Description: OSJNBa0019K04.18 [Oryza sativa (japonica
MDLQLKQWRSQQQNESEEQGSAATKISNFFFDQIQSQTATSAAAAPLPLFVPEPTSSSSFSCFSPDSSNSSSSSRFLKMGNFFSWAQWQELELQALIYRYMLAGASVPQELLLPIKKSLLHQSPMHFLHHPLQHSFPHHQPSWYWGRGAMDPEPGRCKRTDGKKWRCSRDVVAGHKYCDRHIHRGRNRSRKPVETATTTITTTATTTASSFVLGEELGHGPNNNHFFSSGSSQPLHLSHQQSCSSEMKQESNNNKRPYEANSGFSNGRSDDGHILRHFFDDWPRSSDSTSSPMSSSTCHLSISMPGNNTSSDVSLKLSTGNEEEEENMRNNNNEREQMNWWSNGGNHHNNMGGPLAEALRSASSTSSVLHQMGISTQVFH

SEQ ID NO: 77192 - protein, 302 aa, Arabidopsis thaliana
  peptide (1)..(302): Ceres Seq. ID no. 12561785
  misc_feature (1)..(302): Homolog of NCBI NO: 21539886 NR Description: transcription activator [Arabidopsis thaliana]
  misc_feature (1)..(299): Homolog of NCBI NO: 15231708 NR Description: putative protein; protein id: At3g52910.1
  misc_feature (1)..(113): Homolog of NCBI NO: 27808514 NR Description: At3g52910 [Arabidopsis thaliana]
  misc_feature (1)..(273): Homolog of NCBI NO: 15227652 NR Description: unknown protein; protein id: At2g36400.1
  misc_feature (1)..(273): Homolog of NCBI NO: 26449924 NR Description: unknown protein [Arabidopsis thaliana]
  misc_feature (1)..(302): Homolog of NCBI NO: 26449924 NR Description: unknown protein [Arabidopsis thaliana]
  misc_feature (1)..(302): Homolog of NCBI NO: 15227652 NR Description: unknown protein; protein id: At2g36400.1
  misc_feature (5)..(213): Homolog of NCBI NO: 32470646 NR Description: putative growth-regulating factor [Solanum
  misc_feature (5)..(233): Homolog of NCBI NO: 32470630 NR Description: putative growth-regulating factor [Solanum
  misc_feature (1)..(161): Homolog of NCBI NO: 38605957 NR Description: OSJNBa0019K04.18 [Oryza sativa (japonica
MGNFFSWAQWQELELQALIYRYMLAGASVPQELLLPIKKSLLHQSPMHFLHHPLQHSFPHHQPSWYWGRGAMDPEPGRCKRTDGKKWRCSRDVVAGHKYCDRHIHRGRNRSRKPVETATTTITTTATTTASSFVLGEELGHGPNNNHFFSSGSSQPLHLSHQQSCSSEMKQESNNNKRPYEANSGFSNGRSDDGHILRHFFDDWPRSSDSTSSPMSSSTCHLSISMPGNNTSSDVSLKLSTGNEEEEENMRNNNNEREQMNWWSNGGNHHNNMGGPLAEALRSASSTSSVLHQMGISTQVFH

SEQ ID NO: 77193 - DNA, 1021 bp, Arabidopsis thaliana
  misc_feature (1)..(1021): Ceres Seq. ID no. 12561789
  misc_feature: MA Experiment ID: 108434 Result: Down-regulated in Transcription
  misc_feature: MA Experiment 108434 PARAMETER Experiment Name: At_Root_Tips_cDNA_P Parameter: Tissue Value: Root Tips
  misc_feature: MA Experiment ID: 108461 Result: Up-regulated in Transcription
  misc_feature: MA Experiment 108461 PARAMETER Experiment Name: At_Germinating_Seeds_cDNA_P Parameter: Age (day) Value: 1 vs. 0
  misc_feature: MA Experiment 108461 PARAMETER Experiment Name: At_Germinating_Seeds_cDNA_P Parameter: Tissue Value: Germinating Seeds
  misc_feature: MA Experiment ID: 108462 Result: Up-regulated in Transcription
  misc_feature: MA Experiment 108462 PARAMETER Experiment Name: At_Germinating_Seeds_cDNA_P Parameter: Age (day) Value: 2 vs. 0
  misc_feature: MA Experiment 108462 PARAMETER Experiment Name: At_Germinating_Seeds_cDNA_P Parameter: Tissue Value: Germinating Seeds
  misc_feature: MA Experiment ID: 108463 Result: Up-regulated in Transcription
  misc_feature: MA Experiment 108463 PARAMETER Experiment Name: At_Germinating_Seeds_cDNA_P Parameter: Age (day) Value: 3 vs. 0
  misc_feature: MA Experiment 108463 PARAMETER Experiment Name: At_Germinating_Seeds_cDNA_P Parameter: Tissue Value: Germinating Seeds
  misc_feature: MA Experiment ID: 108464 Result: Up-regulated in Transcription
  misc_feature: MA Experiment 108464 PARAMETER Experiment Name: At_Germinating_Seeds_cDNA_P Parameter: Age (day) Value: 4 vs. 0
  misc_feature: MA Experiment 108464 PARAMETER Experiment Name: At_Germinating_Seeds_cDNA_P Parameter: Tissue Value: Germinating Seeds
  misc_feature: MA Experiment ID: 20000185 Result: Up-regulated in Transcription
  misc_feature: MA Experiment 20000185 PARAMETER Experiment Name: At_Roots__P Parameter: Age (day) Value: 7 vs. 21
  misc_feature: MA Experiment 20000185 PARAMETER Experiment Name: At_Roots__P Parameter: Organism Value: A. thaliana
  misc_feature: MA Experiment 20000185 PARAMETER Experiment Name: At_Roots__P Parameter: Tissue Value: Roots vs. Whole Plant
  misc_feature: MA Experiment ID: 20000224 Result: Down-regulated in Transcription
  misc_feature: MA Experiment ID: 20000439 Result: Up-regulated in Transcription
  misc_feature: MA Experiment 20000439 PARAMETER Experiment Name: At_Roots__P Parameter: Age (day) Value: 14 vs. 21
  misc_feature: MA Experiment 20000439 PARAMETER Experiment Name: At_Roots__P Parameter: Organism Value: A. thaliana
  misc_feature: MA Experiment 20000439 PARAMETER Experiment Name: At_Roots__P Parameter: Tissue Value: Roots vs. Whole Plant
actactatgtacagattcagcaacacagttattggggtcttaaaccttctcaccttactagcctcgattccaatcatcggaaccgctttatacaaggcaagaagcagcacgacatgtgaaaacttcctccagacgccgctacttgttataggattcatcatactcatagtttcccttgcgggattcataggagcctgcttcaacgtggcatgggctctttgggtgtacttagtggtcatgatcttcctcatcgctaccctaatgggtctaacgctatttggtctggtggtgacgagccaaggaggtggagtggaagtgccagggaggatttataaagagtataggcttggagactatcatccatggttgagagagagagttagggatcctgagtattggaactccattagaagctgtatcttgagttccaagacttgtactaagattgagtcttggactacacttgattatttccaaagagacatgacttctgttcagtcgggatgttgtaagccaccgacggcgtgtacgtacgaagctggagtagtggacggaggaggagattgcttcagatggaacaatggagtggagatgttatgctacgagtgcgatgcttgcaaggctggtgttctcgaagagatccgtctcgactggagaaagttatcggttgtcaacattctcgtcctcgtcctcctcatcgcggtctacgccgctggttgctgcgccttccacaacactcgccacgcagctcatccttaccatccatctgatgataaccgcatgaccagagtccgtcctcgttgggactattactggtggagatggtggcacgaaaagaaagagcagctttactaaaagccgcatcgtttttttgttcttaatcattttctttttagcaaacttagattaagaaaacacaaagatagtttaaaaatgttgatgtagtcctgttcctataaatcatcaagagattagtaagatttgctacgagtgcatgagtatatgcatatatttttcgtct

SEQ ID NO: 77194 - protein, 284 aa, Arabidopsis thaliana
  peptide (1)..(284): Ceres Seq. ID no. 12561790
  misc_feature (6)..(232): Pfam Name: Tetraspanin family Pfam Description: Tetraspanin family
  misc_feature (3)..(284): Homolog of NCBI NO: 30682045 NR Description: senescence-associated protein family [Arabidopsis
  misc_feature (3)..(272): Homolog of NCBI NO: 9294106 NR Description: senescence-associated protein-like [Arabidopsis
  misc_feature (3)..(277): Homolog of NCBI NO: 28392978 NR Description: unknown protein [Arabidopsis thaliana]
  misc_feature (7)..(273): Homolog of NCBI NO: 34906104 NR Description: putative senescence-assocated protein [Oryza
  misc_feature (165)..(284): Homolog of NCBI NO: 21617939 NR Description: senescence-assocated protein, putative
  misc_feature (3)..(247): Homolog of NCBI NO: 15234743 NR Description: senescence-associated protein homolog; protein
  misc_feature (2)..(245): Homolog of NCBI NO: 3551954 NR Description: senescence-associated protein 5 [Hemerocallis
  misc_feature (3)..(247): Homolog of NCBI NO: 21537169 NR Description: senescence-associated protein-like protein
  misc_feature (3)..(247): Homolog of NCBI NO: 20197174 NR Description: hypothetical protein [Arabidopsis thaliana]
  misc_feature (4)..(247): Homolog of NCBI NO: 29367553 NR Description: senescence-associated protein-like protein [Oryza
TTMYRFSNTVIGVLNLLTLLASIPIIGTALYKARSSTTCENFLQTPLLVIGFIILIVSLAGFIGACFNVAWALWVYLVVMIFLIATLMGLTLFGLVVTSQGGGVEVPGRIYKEYRLGDYHPWLRERVRDPEYWNSIRSCILSSKTCTKIESWTTLDYFQRDMTSVQSGCCKPPTACTYEAGVVDGGGDCFRWNNGVEMLCYECDACKAGVLEEIRLDWRKLSVVNILVLVLLIAVYAAGCCAFHNTRHAAHPYHPSDDNRMTRVRPRWDYYWWRWWHEKKEQLY

SEQ ID NO: 77195 - protein, 282 aa, Arabidopsis thaliana
  peptide (1)..(282): Ceres Seq. ID no. 12561791
  misc_feature (4)..(230): Pfam Name: Tetraspanin family Pfam Description: Tetraspanin family
  misc_feature (1)..(282): Homolog of NCBI NO: 30682045 NR Description: senescence-associated protein family [Arabidopsis
  misc_feature (1)..(270): Homolog of NCBI NO: 9294106 NR Description: senescence-associated protein-like [Arabidopsis
  misc_feature (1)..(275): Homolog of NCBI NO: 28392978 NR Description: unknown protein [Arabidopsis thaliana]
  misc_feature (5)..(271): Homolog of NCBI NO: 34906104 NR Description: putative senescence-assocated protein [Oryza
  misc_feature (163)..(282): Homolog of NCBI NO: 21617939 NR Description: senescence-assocated protein, putative
  misc_feature (1)..(245): Homolog of NCBI NO: 15234743 NR Description: senescence-associated protein homolog; protein
  misc_feature (1)..(243): Homolog of NCBI NO: 3551954 NR Description: senescence-associated protein 5 [Hemerocallis
  misc_feature (1)..(245): Homolog of NCBI NO: 21537169 NR Description: senescence-associated protein-like protein
  misc_feature (1)..(245): Homolog of NCBI NO: 20197174 NR Description: hypothetical protein [Arabidopsis thaliana]
  misc_feature (2)..(245): Homolog of NCBI NO: 29367553 NR Description: senescence-associated protein-like protein [Oryza
MYRFSNTVIGVLNLLTLLASIPIIGTALYKARSSTTCENFLQTPLLVIGFIILIVSLAGFIGACFNVAWALWVYLVVMIFLIATLMGLTLFGLVVTSQGGGVEVPGRIYKEYRLGDYHPWLRERVRDPEYWNSIRSCILSSKTCTKIESWTTLDYFQRDMTSVQSGCCKPPTACTYEAGVVDGGGDCFRWNNGVEMLCYECDACKAGVLEEIRLDWRKLSVVNILVLVLLIAVYAAGCCAFHNTRHAAHPYHPSDDNRMTRVRPRWDYYWWRWWHEKKEQLY

SEQ ID NO: 77196 - protein, 205 aa, Arabidopsis thaliana
  peptide (1)..(205): Ceres Seq. ID no. 12561792
  misc_feature (1)..(153): Pfam Name: Tetraspanin family Pfam Description: Tetraspanin family
  misc_feature (1)..(205): Homolog of NCBI NO: 30682045 NR Description: senescence-associated protein family [Arabidopsis
  misc_feature (1)..(193): Homolog of NCBI NO: 9294106 NR Description: senescence-associated protein-like [Arabidopsis
  misc_feature (1)..(198): Homolog of NCBI NO: 28392978 NR Description: unknown protein [Arabidopsis thaliana]
  misc_feature (1)..(194): Homolog of NCBI NO: 34906104 NR Description: putative senescence-assocated protein [Oryza
  misc_feature (86)..(205): Homolog of NCBI NO: 21617939 NR Description: senescence-assocated protein, putative
  misc_feature (1)..(168): Homolog of NCBI NO: 15234743 NR Description: senescence-associated protein homolog; protein
  misc_feature (1)..(166): Homolog of NCBI NO: 3551954 NR Description: senescence-associated protein 5 [Hemerocallis
  misc_feature (1)..(168): Homolog of NCBI NO: 21537169 NR Description: senescence-associated protein-like protein
  misc_feature (1)..(168): Homolog of NCBI NO: 20197174 NR Description: hypothetical protein [Arabidopsis thaliana]
  misc_feature (1)..(168): Homolog of NCBI NO: 29367553 NR Description: senescence-associated protein-like protein [Oryza
MIFLIATLMGLTLFGLVVTSQGGGVEVPGRIYKEYRLGDYHPWLRERVRDPEYWNSIRSCILSSKTCTKIESWTTLDYFQRDMTSVQSGCCKPPTACTYEAGVVDGGGDCFRWNNGVEMLCYECDACKAGVLEEIRLDWRKLSVVNILVLVLLIAVYAAGCCAFHNTRHAAHPYHPSDDNRMTRVRPRWDYYWWRWWHEKKEQLY

SEQ ID NO: 77197 - DNA, 3754 bp, Arabidopsis thaliana
  misc_feature (1)..(3754): Ceres Seq. ID no. 12561805
  misc_feature: MA Experiment ID: 108461 Result: Up-regulated in Transcription
  misc_feature: MA Experiment 108461 PARAMETER Experiment Name: At_Germinating_Seeds_cDNA_P Parameter: Age (day) Value: 1 vs. 0
  misc_feature: MA Experiment 108461 PARAMETER Experiment Name: At_Germinating_Seeds_cDNA_P Parameter: Tissue Value: Germinating Seeds
  misc_feature: MA Experiment ID: 108561 Result: Down-regulated in Transcription
  misc_feature: MA Experiment 108561 PARAMETER Experiment Name: At_100uM_ABA_cDNA_P Parameter: Timepoint (hr) Value: 6
  misc_feature: MA Experiment 108561 PARAMETER Experiment Name: At_100uM_ABA_cDNA_P Parameter: Tissue Value: Aerial
  misc_feature: MA Experiment 108561 PARAMETER Experiment Name: At_100uM_ABA_cDNA_P Parameter: Treatment Value: 100uM ABA vs. No Treatment
  misc_feature: MA Experiment ID: 108569 Result: Up-regulated in Transcription
  misc_feature: MA Experiment 108569 PARAMETER Experiment Name: At_0.001%_MeJA__cDNA_P Parameter: Timepoint (hr) Value: 6
  misc_feature: MA Experiment 108569 PARAMETER Experiment Name: At_0.001%_MeJA__cDNA_P Parameter: Tissue Value: Aerial
  misc_feature: MA Experiment 108569 PARAMETER Experiment Name: At_0.001%_MeJA__cDNA_P Parameter: Treatment Value: 0.001% MeJA vs. No Treatment
  misc_feature: MA Experiment ID: 108572 Result: Down-regulated in Transcription
  misc_feature: MA Experiment 108572 PARAMETER Experiment Name: At_Drought_cDNA_P Parameter: Timepoint (hr) Value: 1
  misc_feature: MA Experiment 108572 PARAMETER Experiment Name: At_Drought_cDNA_P Parameter: Tissue Value: Aerial
  misc_feature: MA Experiment 108572 PARAMETER Experiment Name: At_Drought_cDNA_P Parameter: Treatment Value: Drought vs. No Drought
  misc_feature: MA Experiment ID: 108573 Result: Down-regulated in Transcription
  misc_feature: MA Experiment 108573 PARAMETER Experiment Name: At_Drought_cDNA_P Parameter: Timepoint (hr) Value: 6
  misc_feature: MA Experiment 108573 PARAMETER Experiment Name: At_Drought_cDNA_P Parameter: Tissue Value: Aerial
  misc_feature: MA Experiment 108573 PARAMETER Experiment Name: At_Drought_cDNA_P Parameter: Treatment Value: Drought vs. No Drought
  misc_feature: MA Experiment ID: 108576 Result: Down-regulated in Transcription
  misc_feature: MA Experiment 108576 PARAMETER Experiment Name: At_42deg_Heat_cDNA_P Parameter: Temperature (deg C) Value: 42 vs. 22
  misc_feature: MA Experiment 108576 PARAMETER Experiment Name: At_42deg_Heat_cDNA_P Parameter: Timepoint (hr) Value: 1
  misc_feature: MA Experiment 108576 PARAMETER Experiment Name: At_42deg_Heat_cDNA_P Parameter: Tissue Value: Aerial
  misc_feature: MA Experiment ID: 108579 Result: Up-regulated in Transcription
  misc_feature: MA Experiment 108579 PARAMETER Experiment Name: At_4deg_Cold_cDNA_P Parameter: Temperature (deg C) Value: 4 vs. 22
  misc_feature: MA Experiment 108579 PARAMETER Experiment Name: At_4deg_Cold_cDNA_P Parameter: Timepoint (hr) Value: 6
  misc_feature: MA Experiment 108579 PARAMETER Experiment Name: At_4deg_Cold_cDNA_P Parameter: Tissue Value: Aerial
  misc_feature: MA Experiment ID: 108595 Result: Down-regulated in Transcription
  misc_feature: MA Experiment 108595 PARAMETER Experiment Name: At_Ler-pi_Ovule_cDNA_P Parameter: Plant Line Value: null
  misc_feature: MA Experiment ID: 20000069 Result: Down-regulated in Transcription
  misc_feature: MA Experiment 20000069 PARAMETER Experiment Name: At_100uM_ABA_Mutants_cDNA_P Parameter: Plant Line Value: CS23
  misc_feature: MA Experiment 20000069 PARAMETER Experiment Name: At_100uM_ABA_Mutants_cDNA_P Parameter: Timepoint (hr) Value: 6
  misc_feature: MA Experiment 20000069 PARAMETER Experiment Name: At_100uM_ABA_Mutants_cDNA_P Parameter: Tissue Value: Aerial
  misc_feature: MA Experiment 20000069 PARAMETER Experiment Name: At_100uM_ABA_Mutants_cDNA_P Parameter: Treatment Value: 100uM ABA vs. No Treatment
ctcttcccacttctcactctctgatctcagatctctccctccctctttctccgatctcagatccattcaacaatctacaaagaagatggaaccagtctcttcatggggtaacacctctctcgtctccgtagatccagagatccacgacctaatcgagaaggagaaacgtcggcaatgtcgaggaatcgaacttatcgcttccgagaatttcacttccttcgccgtcatcgaagctctcggaagtgccttaaccaacaaatactccgaaggtattcctggtaatcgttattacggaggtaacgaattcatcgatgagatcgagaatctttgccgttcaagagctctcgaagctttccattgtgatccagcagcgtggggcgttaatgttcagccgtattctggatctccggcaaatttcgctgcttacacggctttgcttcagcctcacgatcgtatcatggggcttgatttgccttcaggtggtcatttgactcatggttactatacatctggtggtaagaagatctctgcgacttcgatctactttgagagtcttccgtataaggtgaatttcaccactggttacattgattacgataagcttgaagagaaggcgttggatttcaggcctaagttgcttatctgtggtggtagtgcgtatcctagggattgggattacgctagatttagagctattgctgataaggttggagctcttttgctttgtgacatggctcacatcagtggtctcgttgctgctcaggaagctgcaaacccatttgagtactgtgacgttgtgacaaccacaacccacaagagtttgaggggtccaagggctggtatgattttctacaggaagggtccaaaaccaccaaagaagggtcaacccgagggtgcagtctatgattttgaggacaaaatcaactttgctgtattccctgcgcttcaaggtggtcctcacaatcaccagattggtgctctagctgttgcgttgaagcaggctaatactcctgggttcaaggtctacgcaaaacaagtgaaagccaatgctgttgcccttggaaactacctaatgagcaagggttaccagattgtgaccaatggaactgagaaccaccttgttctctgggatcttcgccctcttggattgaccggaaacaaggttgagaagctctgcgatctgtgcagcattacattgaacaagaacgcagtatttggagacagtagtgctcttgctcctggaggtgtaagaatcggtgcacccgcgatgacatcgagaggattggtggagaaggactttgagcagataggagaattcctgagccgtgcagtgacactgacgttggacatccaaaagacatacggtaagttgttgaaggacttcaacaagggtttggtgaacaacaaagatctcgatcagctcaaggctgatgtcgagaagttctcggcgtcttatgagatgcctggattcctcatgtctgagatgaagtacaaggattagagatctttctctatatgcaagagtaatcttctattattatctaccatatatataaaatatgcttttgtaggatcgccttaaaggcgaagagatgaagatgcaaacagtaaaaaaaaagggttttcttttcagctatttcttcttgaatgttttttttctttttcttttggtttcttattgaaattgttgtatttttgttggcttttttctaataatatcagcgagtttttctttccactgtttcaattaaatacggtgtgtttgtatgggttttagtttcatagattgaattatttgtactcaactaaggaattcttgtaaatgcaaaaaaaaaagaaagttttacgaaaagtaaaaaaaaaaaaaaaagagctcttggatccttctctttgaaaggtggattctttttggccggagaaagccaattctgagctcgccaatggctaacagagcattgaaccggcttctacggaatttctttgtagaaagttcaccattcaggaagagaagtggattgtatcaaggagttgtttacaatgtaatcaaacggtttcagtctcatttatcagagtccgggaaggtagaaaaggagttagaagagcaggaggcagagaagagaaggcctagtagtgtcacttcttcgaggtccggattagagaaaagaagacaatttgaatcaggaatcgacaatgatagctctagtgatgaagatacaggtgatggaaagtggaaactagacctagcttggctcactaaagcacttgagccagctatgcaattacgtagatgggctcttccaacaggagagaagtcactgcctggtagtcgatctctgtctgagataattgctagtattcagaggagtaggcttgggattgaaggttggacttttggtgatcttactattggtctctatcttatataccttagacaagcatccttgtctccatttgaggacgtcaagggcgtagaagttgtttcagagtctacagtttatgatctgatatataatgcggagttagcaaaaggttgttacagggatagtgtgagtggtcttgcaaagaacaccatgcttcgagagaataacattcttaaatttgtgaaagattcaagtgttatgaggcctggatactacataggagttgatcatcgaaggaaacttgttgtctttggaatacgcgggacacatacaatttacgatcttatcactgacattgtctcttcaagcgatgaagaagtcacttttgaaggctactcaacacactttggaactgctgaagctgcacgatggttccttaaccacgaattgcaaactataagaagatgcttagcgaaatacgagggatacaagctacggcttgttggtcattctctcggcggtgctatagcctccttaatggcgataatgctcaagaaaatgccaagggaggaattgggattcgatgctgaaattatttcagccgttgggtatgcgacacctccttgtgtttccaaagagcttgcagagaattgctctgagtttgtaacaactattgtaatgcaggacgacattatacctagactcagtgcagcttctctagcgagattgaggaatgaaatccttcagacagattggacaagtgtaattgagaaggaagaatggaagaacgttttggatttggtaacaaacgcaaaacaagttgtcacctctgtgcaagacgtagctagaaaagtttctgattatgcaaacttcggaaacaaaaaagaagttccagaaatcccgtcatccaagaacaaccagtctgggatattaatctctgactctactactaaagatgttgtgaaattgccagaagagttatatgtaccgggtgcagtttactatctgatgaggagcctaagaggaaccccgaaaagctcagcaggaaaacaagtagagtactatagtctatggaagagagatccaggacaacattttcagaggatacttctctccggtaatttcattacagaccataaatgtgatagccattactacgctctgcgagatgtgctcaaaggatttcccagtttcatcaacgaaagcatctttaagaagtgaaatactgaaatggaatctcatctctggatagaacgtaatgttttagtttgtgagtttgtctgcaaacatttttttaagaataaatgatcagtttatcccagcatgaaaaaattatgcttcttagaaattttgaatgattaatgaaaagctggctgtgattgctgattggttcc

SEQ ID NO: 77198 - protein, 546 aa, Arabidopsis thaliana
  peptide (1)..(546): Ceres Seq. ID no. 12561806
  misc_feature (121)..(546): Homolog of NCBI NO: 15227944 NR Description: hypothetical protein; protein id: At2g42450.1
  misc_feature (15)..(94): Homolog of NCBI NO: 15227944 NR Description: hypothetical protein; protein id: At2g42450.1
  misc_feature (131)..(408): Homolog of NCBI NO: 18400268 NR Description: expressed protein; protein id: At3g14075.1, by cDNA: gi_15146180 [Arabidopsis thaliana] AT3g14070/MAG2_2 [Arabidopsis thaliana]
  misc_feature (131)..(432): Homolog of NCBI NO: 22328699 NR Description: hypothetical protein; protein id: At4g16070.1, by cDNA: gi_17064827, supported by cDNA: gi_20259857 [Arabidopsis
  misc_feature (131)..(432): Homolog of NCBI NO: 17064828 NR Description: Unknown protein [Arabidopsis thaliana]
  misc_feature (127)..(532): Homolog of NCBI NO: 21040277 NR Description: KCCR13L [Homo sapiens] KCCR13L [Homo sapiens] >gi|22761016|dbj|BAC11420.1| unnamed
  misc_feature (181)..(532): Homolog of NCBI NO: 22760385 NR Description: unnamed protein product [Homo sapiens]
  misc_feature (131)..(408): Homolog of NCBI NO: 9294632 NR Description: emb|CAB10386.1~gene_id:MAG2.3~strong similarity
  misc_feature (226)..(432): Homolog of NCBI NO: 7485204 NR Description: hypothetical protein - Arabidopsis thaliana hypothetical protein [Arabidopsis thaliana]
  misc_feature (219)..(374): Homolog of NCBI NO: 15229078 NR Description: calmodulin-binding heat-shock protein; protein id:
MANRALNRLLRNFFVESSPFRKRSGLYQGVVYNVIKRFQSHLSESGKVEKELEEQEAEKRRPSSVTSSRSGLEKRRQFESGIDNDSSSDEDTGDGKWKLDLAWLTKALEPAMQLRRWALPTGEKSLPGSRSLSEIIASIQRSRLGIEGWTFGDLTIGLYLIYLRQASLSPFEDVKGVEVVSESTVYDLIYNAELAKGCYRDSVSGLAKNTMLRENNILKFVKDSSVMRPGYYIGVDHRRKLVVFGIRGTHTIYDLITDIVSSSDEEVTFEGYSTHFGTAEAARWFLNHELQTIRRCLAKYEGYKLRLVGHSLGGAIASLMAIMLKKMPREELGFDAEIISAVGYATPPCVSKELAENCSEFVTTIVMQDDIIPRLSAASLARLRNEILQTDWTSVIEKEEWKNVLDLVTNAKQVVTSVQDVARKVSDYANFGNKKEVPEIPSSKNNQSGILISDSTTKDVVKLPEELYVPGAVYYLMRSLRGTPKSSAGKQVEYYSLWKRDPGQHFQRILLSGNFITDHKCDSHYYALRDVLKGFPSFINESIFKK

SEQ ID NO: 77199 - protein, 499 aa, Arabidopsis thaliana
  peptide (1)..(499): Ceres Seq. ID no. 12561807
  misc_feature (40)..(440): Pfam Name: Serine hydroxymethyltransferase Pfam Description: Serine hydroxymethyltransferase
  misc_feature (29)..(499): Homolog of NCBI NO: 15236375 NR Description: hydroxymethyltransferase; protein id: supported by cDNA: 29662., supported by cDNA: gi_13358183, by cDNA: gi_13605526, supported by cDNA: gi_20334773 [Arabidopsis
  misc_feature (29)..(499): Homolog of NCBI NO: 21592544 NR Description: hydroxymethyltransferase [Arabidopsis thaliana]
  misc_feature (29)..(499): Homolog of NCBI NO: 11762130 NR Description: AT4g13930 [Arabidopsis thaliana]
  misc_feature (29)..(496): Homolog of NCBI NO: 15236371 NR Description: glycine hydroxymethyltransferase - like protein; id: At4g13890.1 [Arabidopsis thaliana] >gi|7433549|pir||T05258
  misc_feature (32)..(492): Homolog of NCBI NO: 18400090 NR Description: putative hydroxymethyltransferase; protein id: supported by cDNA: 122515. [Arabidopsis thaliana]
  misc_feature (32)..(492): Homolog of NCBI NO: 25286207 NR Description: probable hydroxymethyltransferase, 49598-47322 - Arabidopsis thaliana >gi|12324475|gb|AAG52195.1|AC021199_1
  misc_feature (32)..(492): Homolog of NCBI NO: 21537165 NR Description: putative hydroxymethyltransferase [Arabidopsis
  misc_feature (32)..(490): Homolog of NCBI NO: 34907298 NR Description: putative hydroxymethyltransferase [Oryza sativa
  misc_feature (32)..(492): Homolog of NCBI NO: 15219182 NR Description: glycine hydroxymethyltransferase, putative; id: At1g22020.1 [Arabidopsis thaliana] F2E2.7 [Arabidopsis thaliana] >gi|21928157|gb|AAM78106.1|
  misc_feature (6)..(489): Homolog of NCBI NO: 18418028 NR Description: glycine hydroxymethyltransferase (EC 2.1.2.1) - protein; protein id: At4g32520.1, supported by cDNA: gi_14030718
SSHFSLSDLRSLPPSFSDLRSIQQSTKKMEPVSSWGNTSLVSVDPEIHDLIEKEKRRQCRGIELIASENFTSFAVIEALGSALTNKYSEGIPGNRYYGGNEFIDEIENLCRSRALEAFHCDPAAWGVNVQPYSGSPANFAAYTALLQPHDRIMGLDLPSGGHLTHGYYTSGGKKISATSIYFESLPYKVNFTTGYIDYDKLEEKALDFRPKLLICGGSAYPRDWDYARFRAIADKVGALLLCDMAHISGLVAAQEAANPFEYCDVVTTTTHKSLRGPRAGMIFYRKGPKPPKKGQPEGAVYDFEDKINFAVFPALQGGPHNHQIGALAVALKQANTPGFKVYAKQVKANAVALGNYLMSKGYQIVTNGTENHLVLWDLRPLGLTGNKVEKLCDLCSITLNKNAVFGDSSALAPGGVRIGAPAMTSRGLVEKDFEQIGEFLSRAVTLTLDIQKTYGKLLKDFNKGLVNNKDLDQLKADVEKFSASYEMPGFLMSEMKYKD

SEQ ID NO: 77200 - protein, 471 aa, Arabidopsis thaliana
  peptide (1)..(471): Ceres Seq. ID no. 12561808
  misc_feature (12)..(412): Pfam Name: Serine hydroxymethyltransferase Pfam Description: Serine hydroxymethyltransferase
  misc_feature (1)..(471): Homolog of NCBI NO: 15236375 NR Description: hydroxymethyltransferase; protein id: supported by cDNA: 29662., supported by cDNA: gi_13358183, by cDNA: gi_13605526, supported by cDNA: gi_20334773 [Arabidopsis
  misc_feature (1)..(471): Homolog of NCBI NO: 21592544 NR Description: hydroxymethyltransferase [Arabidopsis thaliana]
  misc_feature (1)..(471): Homolog of NCBI NO: 11762130 NR Description: AT4g13930 [Arabidopsis thaliana]
  misc_feature (1)..(468): Homolog of NCBI NO: 15236371 NR Description: glycine hydroxymethyltransferase - like protein; id: At4g13890.1 [Arabidopsis thaliana] >gi|7433549|pir||T05258
  misc_feature (4)..(464): Homolog of NCBI NO: 18400090 NR Description: putative hydroxymethyltransferase; protein id: supported by cDNA: 122515. [Arabidopsis thaliana]
  misc_feature (4)..(464): Homolog of NCBI NO: 25286207 NR Description: probable hydroxymethyltransferase, 49598-47322 - Arabidopsis thaliana >gi|12324475|gb|AAG52195.1|AC021199_1
  misc_feature (4)..(464): Homolog of NCBI NO: 21537165 NR Description: putative hydroxymethyltransferase [Arabidopsis
  misc_feature (4)..(462): Homolog of NCBI NO: 34907298 NR Description: putative hydroxymethyltransferase [Oryza sativa
  misc_feature (4)..(464): Homolog of NCBI NO: 15219182 NR Description: glycine hydroxymethyltransferase, putative; id: At1g22020.1 [Arabidopsis thaliana] F2E2.7 [Arabidopsis thaliana] >gi|21928157|gb|AAM78106.1|
  misc_feature (1)..(461): Homolog of NCBI NO: 18418028 NR Description: glycine hydroxymethyltransferase (EC 2.1.2.1) - protein; protein id: At4g32520.1, supported by cDNA: gi_14030718
MEPVSSWGNTSLVSVDPEIHDLIEKEKRRQCRGIELIASENFTSFAVIEALGSALTNKYSEGIPGNRYYGGNEFIDEIENLCRSRALEAFHCDPAAWGVNVQPYSGSPANFAAYTALLQPHDRIMGLDLPSGGHLTHGYYTSGGKKISATSIYFESLPYKVNFTTGYIDYDKLEEKALDFRPKLLICGGSAYPRDWDYARFRAIADKVGALLLCDMAHISGLVAAQEAANPFEYCDVVTTTTHKSLRGPRAGMIFYRKGPKPPKKGQPEGAVYDFEDKINFAVFPALQGGPHNHQIGALAVALKQANTPGFKVYAKQVKANAVALGNYLMSKGYQIVTNGTENHLVLWDLRPLGLTGNKVEKLCDLCSITLNKNAVFGDSSALAPGGVRIGAPAMTSRGLVEKDFEQIGEFLSRAVTLTLDIQKTYGKLLKDFNKGLVNNKDLDQLKADVEKFSASYEMPGFLMSEMKYKD

SEQ ID NO: 77201 - DNA, 943 bp, Arabidopsis thaliana
  misc_feature (1)..(943): Ceres Seq. ID no. 12561809
  misc_feature: MA Experiment ID: 20000227 Result: Up-regulated in Transcription
  misc_feature: MA Experiment 20000227 PARAMETER Experiment Name: At_Root-Tips-vs-Tops_P Parameter: Tissue Value: Root Tips vs. Root Tops
  misc_feature: MA Experiment ID: 20000234 Result: Down-regulated in Transcription
  misc_feature: MA Experiment 20000234 PARAMETER Experiment Name: At_Siliques_P Parameter: Age (day) Value: 21
  misc_feature: MA Experiment 20000234 PARAMETER Experiment Name: At_Siliques_P Parameter: Organism Value: A. thaliana
  misc_feature: MA Experiment 20000234 PARAMETER Experiment Name: At_Siliques_P Parameter: Plant Line Value: WS
  misc_feature: MA Experiment 20000234 PARAMETER Experiment Name: At_Siliques_P Parameter: Tissue Value: Less Than 5mm Siliques vs. Whole Plant
  misc_feature: MA Experiment ID: 20001248 Result: Up-regulated in Transcription
  misc_feature: MA Experiment 20001248 PARAMETER Experiment Name: At_Far-red-induction_P Parameter: Age (day) Value: 7
  misc_feature: MA Experiment 20001248 PARAMETER Experiment Name: At_Far-red-induction_P Parameter: Light Value: Far-red vs. White
  misc_feature: MA Experiment 20001248 PARAMETER Experiment Name: At_Far-red-induction_P Parameter: Organism Value: A. thaliana
  misc_feature: MA Experiment 20001248 PARAMETER Experiment Name: At_Far-red-induction_P Parameter: Plant Line Value: Columbia
  misc_feature: MA Experiment 20001248 PARAMETER Experiment Name: At_Far-red-induction_P Parameter: Timepoint (hr) Value: 4
  misc_feature: MA Experiment 20001248 PARAMETER Experiment Name: At_Far-red-induction_P Parameter: Tissue Value: Whole Plant
  misc_feature: MA Experiment ID: 20001450 Result: Up-regulated in Transcription
  misc_feature: MA Experiment 20001450 PARAMETER Experiment Name: At_Far-red-induction_P Parameter: Age (day) Value: 7
  misc_feature: MA Experiment 20001450 PARAMETER Experiment Name: At_Far-red-induction_P Parameter: Light Value: Far-red vs. White
  misc_feature: MA Experiment 20001450 PARAMETER Experiment Name: At_Far-red-induction_P Parameter: Organism Value: A. thaliana
  misc_feature: MA Experiment 20001450 PARAMETER Experiment Name: At_Far-red-induction_P Parameter: Plant Line Value: Columbia
  misc_feature: MA Experiment 20001450 PARAMETER Experiment Name: At_Far-red-induction_P Parameter: Timepoint (hr) Value: 8
  misc_feature: MA Experiment 20001450 PARAMETER Experiment Name: At_Far-red-induction_P Parameter: Tissue Value: Whole Plant
  misc_feature: MA Experiment ID: 20001451 Result: Up-regulated in Transcription
  misc_feature: MA Experiment 20001451 PARAMETER Experiment Name: At_Far-red-induction_P Parameter: Age (day) Value: 7
  misc_feature: MA Experiment 20001451 PARAMETER Experiment Name: At_Far-red-induction_P Parameter: Light Value: Far-red vs. White
  misc_feature: MA Experiment 20001451 PARAMETER Experiment Name: At_Far-red-induction_P Parameter: Organism Value: A. thaliana
  misc_feature: MA Experiment 20001451 PARAMETER Experiment Name: At_Far-red-induction_P Parameter: Plant Line Value: Columbia
  misc_feature: MA Experiment 20001451 PARAMETER Experiment Name: At_Far-red-induction_P Parameter: Timepoint (hr) Value: 24
  misc_feature: MA Experiment 20001451 PARAMETER Experiment Name: At_Far-red-induction_P Parameter: Tissue Value: Whole Plant
ctccgtctttatagagaaaaaaagattctcttctcttctcgttctcatcatcgtcttaaagaaggaattcgatttttcgcctgaacctgcggatttttcgattcttcaaattcaatgtcttatgcttatctcttcaagtatatcatcatcggcgatactggagtggggaaatcatgtcttctgcttcagttcaccgacaagaggtttcagccggtgcatgaccttaccattggtgttgaatttggggctaggatgatcaccatcgataacaaacctatcaagcttcagatctgggatacggctggtcaagaatcctttaggtctattacaaggtcatactatagaggagctgcaggggcattgcttgtctatgatatcacaaggagggagacatttaaccatctagctagctggctagaagatgcaaggcagcatgcaaatgcaaatatgacgataatgctcattgggaataagtgtgatcttgctcacagaagggcagtgagtacagaggaaggagagcagtttgcaaaggagcacggtcttatattcatggaggcctctgccaagactgctcagaatgttgaggaggcattcattaagacagctgcaacaatatacaagaagattcaagatggtgtgtttgatgtgtcaaatgagtcatatggaatcaaagttggatatggaggaattccaggaccatcaggtggaagagatggatcaacctcgcaaggaggagggtgctgcggctgagatgggaaaaatatgtctatgtcattatgtaaaaatgatcacatatgatatagcaaaaatgtctctgcttctttctatagttgtaaatcgttttggaattcgatttggtgactgtgttgtggttggttttggaacggtttgacaatacacgtgtatgcctattcatatatctaaaaattaagatgtgtttgcg

SEQ ID NO: 77202 - protein, 211 aa, Arabidopsis thaliana; identical to SEQ ID NO: 23858
  peptide (1)..(211): Ceres Seq. ID no. 12561810
  misc_feature (8)..(169): Pfam Name: Ras family Pfam Description: Ras family
  misc_feature (1)..(211): Homolog of NCBI NO: 15235981 NR Description: GTP-binding protein (At-RAB2); protein id:
  misc_feature (1)..(208): Homolog of NCBI NO: 7438379 NR Description: GTP-binding protein RAB2A - Arabidopsis thaliana
  misc_feature (1)..(210): Homolog of NCBI NO: 16755592 NR Description: small GTPase Rab2 [Nicotiana tabacum]
  misc_feature (1)..(210): Homolog of NCBI NO: 1370176 NR Description: RAB2A [Lotus japonicus]

SEQ ID NO: 77203 - protein, 165 aa, Arabidopsis thaliana; identical to SEQ ID NO: 23859
  peptide (1)..(165): Ceres Seq. ID no. 12561811
  misc_feature (1)..(123): Pfam Name: Ras family Pfam Description: Ras family
  misc_feature (1)..(165): Homolog of NCBI NO: 15235981 NR Description: GTP-binding protein (At-RAB2); protein id:
  misc_feature (1)..(162): Homolog of NCBI NO: 7438379 NR Description: GTP-binding protein RAB2A - Arabidopsis thaliana
  misc_feature (1)..(164): Homolog of NCBI NO: 16755592 NR Description: small GTPase Rab2 [Nicotiana tabacum]
  misc_feature (1)..(164): Homolog of NCBI NO: 1370176 NR Description: RAB2A [Lotus japonicus]

SEQ ID NO: 77204 - DNA, 1132 bp, Arabidopsis thaliana
  misc_feature (1)..(1132): Ceres Seq. ID no. 12561819
  misc_feature: MA Experiment ID: 108572 Result: Up-regulated in Transcription
  misc_feature: MA Experiment 108572 PARAMETER Experiment Name: At_Drought_cDNA_P Parameter: Timepoint (hr) Value: 1
  misc_feature: MA Experiment 108572 PARAMETER Experiment Name: At_Drought_cDNA_P Parameter: Tissue Value: Aerial
  misc_feature: MA Experiment 108572 PARAMETER Experiment Name: At_Drought_cDNA_P Parameter: Treatment Value: Drought vs. No Drought
  misc_feature: MA Experiment ID: 108573 Result: Up-regulated in Transcription
  misc_feature: MA Experiment 108573 PARAMETER Experiment Name: At_Drought_cDNA_P Parameter: Timepoint (hr) Value: 6
  misc_feature: MA Experiment 108573 PARAMETER Experiment Name: At_Drought_cDNA_P Parameter: Tissue Value: Aerial
  misc_feature: MA Experiment 108573 PARAMETER Experiment Name: At_Drought_cDNA_P Parameter: Treatment Value: Drought vs. No Drought
  misc_feature: MA Experiment ID: 108576 Result: Up-regulated in Transcription
  misc_feature: MA Experiment 108576 PARAMETER Experiment Name: At_42deg_Heat_cDNA_P Parameter: Temperature (deg C) Value: 42 vs. 22
  misc_feature: MA Experiment 108576 PARAMETER Experiment Name: At_42deg_Heat_cDNA_P Parameter: Timepoint (hr) Value: 1
  misc_feature: MA Experiment 108576 PARAMETER Experiment Name: At_42deg_Heat_cDNA_P Parameter: Tissue Value: Aerial
  misc_feature: MA Experiment ID: 108577 Result: Up-regulated in Transcription
  misc_feature: MA Experiment 108577 PARAMETER Experiment Name: At_42deg_Heat_cDNA_P Parameter: Temperature (deg C) Value: 42 vs. 22
  misc_feature: MA Experiment 108577 PARAMETER Experiment Name: At_42deg_Heat_cDNA_P Parameter: Timepoint (hr) Value: 6
  misc_feature: MA Experiment 108577 PARAMETER Experiment Name: At_42deg_Heat_cDNA_P Parameter: Tissue Value: Aerial
  misc_feature: MA Experiment ID: 108579 Result: Down-regulated in Transcription
  misc_feature: MA Experiment 108579 PARAMETER Experiment Name: At_4deg_Cold_cDNA_P Parameter: Temperature (deg C) Value: 4 vs. 22
  misc_feature: MA Experiment 108579 PARAMETER Experiment Name: At_4deg_Cold_cDNA_P Parameter: Timepoint (hr) Value: 6
  misc_feature: MA Experiment 108579 PARAMETER Experiment Name: At_4deg_Cold_cDNA_P Parameter: Tissue Value: Aerial
  misc_feature: MA Experiment ID: 108595 Result: Down-regulated in Transcription
  misc_feature: MA Experiment 108595 PARAMETER Experiment Name: At_Ler-pi_Ovule_cDNA_P Parameter: Plant Line Value: null
  misc_feature: MA Experiment ID: 20000093 Result: Up-regulated in Transcription
  misc_feature: MA Experiment 20000093 PARAMETER Experiment Name: At_42deg_Heat_cDNA_P Parameter: Temperature (deg C) Value: 42 vs. 22
  misc_feature: MA Experiment 20000093 PARAMETER Experiment Name: At_42deg_Heat_cDNA_P Parameter: Timepoint (hr) Value: 0.5
  misc_feature: MA Experiment 20000093 PARAMETER Experiment Name: At_42deg_Heat_cDNA_P Parameter: Tissue Value: Aerial
  misc_feature: MA Experiment ID: 20000111 Result: Up-regulated in Transcription
  misc_feature: MA Experiment 20000111 PARAMETER Experiment Name: At_42deg_Heat_cDNA_P Parameter: Temperature (deg C) Value: 42 vs. 22
  misc_feature: MA Experiment 20000111 PARAMETER Experiment Name: At_42deg_Heat_cDNA_P Parameter: Timepoint (hr) Value: 6
  misc_feature: MA Experiment 20000111 PARAMETER Experiment Name: At_42deg_Heat_cDNA_P Parameter: Tissue Value: Aerial
  misc_feature: MA Experiment ID: 20000112 Result: Up-regulated in Transcription
  misc_feature: MA Experiment 20000112 PARAMETER Experiment Name: At_42deg_Heat_cDNA_P Parameter: Temperature (deg C) Value: 42 vs. 22
  misc_feature: MA Experiment 20000112 PARAMETER Experiment Name: At_42deg_Heat_cDNA_P Parameter: Timepoint (hr) Value: 2
  misc_feature: MA Experiment 20000112 PARAMETER Experiment Name: At_42deg_Heat_cDNA_P Parameter: Tissue Value: Aerial
  misc_feature: MA Experiment ID: 20000113 Result: Up-regulated in Transcription
  misc_feature: MA Experiment 20000113 PARAMETER Experiment Name: At_42deg_Heat_cDNA_P Parameter: Temperature (deg C) Value: 42 vs. 22
  misc_feature: MA Experiment 20000113 PARAMETER Experiment Name: At_42deg_Heat_cDNA_P Parameter: Timepoint (hr) Value: 8
  misc_feature: MA Experiment 20000113 PARAMETER Experiment Name: At_42deg_Heat_cDNA_P Parameter: Tissue Value: Aerial
  misc_feature: MA Experiment ID: 20000144 Result: Up-regulated in Transcription
  misc_feature: MA Experiment 20000144 PARAMETER Experiment Name: At_42deg_Heat_cDNA_P Parameter: Temperature (deg C) Value: 42 vs. 22
  misc_feature: MA Experiment 20000144 PARAMETER Experiment Name: At_42deg_Heat_cDNA_P Parameter: Timepoint (hr) Value: 1
  misc_feature: MA Experiment 20000144 PARAMETER Experiment Name: At_42deg_Heat_cDNA_P Parameter: Tissue Value: Aerial
  misc_feature: MA Experiment ID: 20000171 Result: Up-regulated in Transcription
  misc_feature: MA Experiment 20000171 PARAMETER Experiment Name: At_42deg_Heat_P Parameter: Age (day) Value: 14
  misc_feature: MA Experiment 20000171 PARAMETER Experiment Name: At_42deg_Heat_P Parameter: Organism Value: A. thaliana
  misc_feature: MA Experiment 20000171 PARAMETER Experiment Name: At_42deg_Heat_P Parameter: Plant Line Value: WS
  misc_feature: MA Experiment 20000171 PARAMETER Experiment Name: At_42deg_Heat_P Parameter: Temperature (deg C) Value: 42 vs. 22
  misc_feature: MA Experiment 20000171 PARAMETER Experiment Name: At_42deg_Heat_P Parameter: Timepoint (hr) Value: 1
  misc_feature: MA Experiment 20000171 PARAMETER Experiment Name: At_42deg_Heat_P Parameter: Tissue Value: Aerial
  misc_feature: MA Experiment ID: 20000173 Result: Up-regulated in Transcription
  misc_feature: MA Experiment 20000173 PARAMETER Experiment Name: At_42deg_Heat_P Parameter: Age (day) Value: 14
  misc_feature: MA Experiment 20000173 PARAMETER Experiment Name: At_42deg_Heat_P Parameter: Organism Value: A. thaliana
  misc_feature: MA Experiment 20000173 PARAMETER Experiment Name: At_42deg_Heat_P Parameter: Plant Line Value: WS
  misc_feature: MA Experiment 20000173 PARAMETER Experiment Name: At_42deg_Heat_P Parameter: Temperature (deg C) Value: 42 vs. 22
  misc_feature: MA Experiment 20000173 PARAMETER Experiment Name: At_42deg_Heat_P Parameter: Timepoint (hr) Value: 6
  misc_feature: MA Experiment 20000173 PARAMETER Experiment Name: At_42deg_Heat_P Parameter: Tissue Value: Aerial
  misc_feature: MA Experiment ID: 20000224 Result: Down-regulated in Transcription
  misc_feature: MA Experiment ID: 20000227 Result: Down-regulated in Transcription
  misc_feature: MA Experiment 20000227 PARAMETER Experiment Name: At_Root-Tips-vs-Tops_P Parameter: Tissue Value: Root Tips vs. Root Tops
  misc_feature: MA Experiment ID: 20000234 Result: Down-regulated in Transcription
  misc_feature: MA Experiment 20000234 PARAMETER Experiment Name: At_Siliques_P Parameter: Age (day) Value: 21
  misc_feature: MA Experiment 20000234 PARAMETER Experiment Name: At_Siliques_P Parameter: Organism Value: A. thaliana
  misc_feature: MA Experiment 20000234 PARAMETER Experiment Name: At_Siliques_P Parameter: Plant Line Value: WS
  misc_feature: MA Experiment 20000234 PARAMETER Experiment Name: At_Siliques_P Parameter: Tissue Value: Less Than 5mm Siliques vs. Whole Plant
  misc_feature: MA Experiment ID: 20000264 Result: Down-regulated in Transcription
  misc_feature: MA Experiment 20000264 PARAMETER Experiment Name: At_Open_Flower_P Parameter: Age (day) Value: 21
  misc_feature: MA Experiment 20000264 PARAMETER Experiment Name: At_Open_Flower_P Parameter: Plant Line Value: WS
  misc_feature: MA Experiment 20000264 PARAMETER Experiment Name: At_Open_Flower_P Parameter: Tissue Value: Open Flower vs. Whole Plant
  misc_feature: MA Experiment ID: 20000265 Result: Down-regulated in Transcription
  misc_feature: MA Experiment 20000265 PARAMETER Experiment Name: At_Open_Flower_P Parameter: Age (day) Value: 21
  misc_feature: MA Experiment 20000265 PARAMETER Experiment Name: At_Open_Flower_P Parameter: Plant Line Value: WS
  misc_feature: MA Experiment 20000265 PARAMETER Experiment Name: At_Open_Flower_P Parameter: Tissue Value: Closed Flower vs. Whole Plant
aaattcatttcaacgtagaagcttctacagattcgatttgggtgtttttggttttggatttggtaaagcttctcggtcacttgctcggtgattgaaactgaatcgattgtgattgtgattgtgattgtgattgtgattgtgagggaattatggctcaagccgtagaagagtggtacaagcagatgccgattataacccggtcgtatctcacggcggctgtagtcaccaccgtcgggtgttcgctcgagattatatctccttataatctctacctaaatcctacccttgtggtgaagcaataccagttctggcgtcttgtcacaaatttcctttatttccgaaagatggatttggactttttgttccatatgttttttctagctcgatactgcaaactgctcgaagaaaactccttcaggggaaagaccacggatttcctttacatgctcttattcggggcaactgttctaactggtattgttctcattggcggaatgataccttatttgtctgtttcattctccaaaatcatcttcctcagcaattcattgactttcatgatggtctatgtatggagtaaacaaaatccttacatccacatgagtttccttggcctcttcactttcacagcagcttatttaccatgggtacttcttggattctctatccttgttggtgcaagtgcatggggggattttctgggaatgatagcgggccacgcatactacttcttggcatttgtgtatccccgaatgacggatcgacgtcccttgaaaactccatctttcctcaaggccctatttgctgatgagccagtcgtgattgcaaggccagaagatgtgagatttgctcatgcgccttttgatgaaatccaccaagactgaatcttgatcctccacaaaacaccagccacaacgcacagttcaagtgtactcagataatgttattgactcttgacctttatagttgtggataatgtggaagtgagatagtgttggctctgatttttttccctagttttctgtctgcttttcttgtccgatacaaatgtgtttcctccttgtgcatatgaactcaaattgtgtacaaagtcttcaaaagtgctagtttatagtttcgtcattagatcatt

SEQ ID NO: 77205 - protein, 244 aa, Arabidopsis thaliana
  peptide (1)..(244): Ceres Seq. ID no. 12561820
  misc_feature (12)..(212): Pfam Name: Der1-like family Pfam Description: Der1-like family
  misc_feature (1)..(244): Homolog of NCBI NO: 22328865 NR Description: putative protein; protein id: At4g21810.1,
  misc_feature (1)..(244): Homolog of NCBI NO: 17473759 NR Description: putative protein [Arabidopsis thaliana]
  misc_feature (1)..(244): Homolog of NCBI NO: 15234480 NR Description: unknown protein; protein id: At4g04860.1, by cDNA: gi_14488072, supported by cDNA: gi_20147126 [Arabidopsis >gi|25407297|pir||B85061 hypothetical protein AT4g04860
  misc_feature (15)..(244): Homolog of NCBI NO: 7487831 NR Description: hypothetical protein T8O5.20 - Arabidopsis >gi|2894559|emb|CAA17148.1| putative protein [Arabidopsis
  misc_feature (34)..(244): Homolog of NCBI NO: 25407582 NR Description: hypothetical protein AT4g21810 [imported] - thaliana >gi|7268978|emb|CAB81288.1| putative protein
  misc_feature (1)..(244): Homolog of NCBI NO: 27573354 NR Description: putative Der1-like protein [Oryza sativa
  misc_feature (1)..(239): Homolog of NCBI NO: 40352706 NR Description: Unknown (protein for MGC:63991) [Danio rerio]
  misc_feature (139)..(244): Homolog of NCBI NO: 4455289 NR Description: putative protein [Arabidopsis thaliana]
  misc_feature (3)..(222): Homolog of NCBI NO: 15808990 NR Description: carcinoma related gene [Mus musculus] Unknown (protein for MGC:11613) [Mus musculus] unnamed protein product [Mus musculus]
  misc_feature (3)..(237): Homolog of NCBI NO: 35505512 NR Description: FLJ43842 protein [Homo sapiens]
MAQAVEEWYKQMPIITRSYLTAAVVTTVGCSLEIISPYNLYLNPTLVVKQYQFWRLVTNFLYFRKMDLDFLFHMFFLARYCKLLEENSFRGKTTDFLYMLLFGATVLTGIVLIGGMIPYLSVSFSKIIFLSNSLTFMMVYVWSKQNPYIHMSFLGLFTFTAAYLPWVLLGFSILVGASAWGDFLGMIAGHAYYFLAFVYPRMTDRRPLKTPSFLKALFADEPVVIARPEDVRFAHAPFDEIHQD

SEQ ID NO: 77206 - protein, 233 aa, Arabidopsis thaliana
  peptide (1)..(233): Ceres Seq. ID no. 12561821
  misc_feature (1)..(201): Pfam Name: Der1-like family Pfam Description: Der1-like family
  misc_feature (1)..(233): Homolog of NCBI NO: 22328865 NR Description: putative protein; protein id: At4g21810.1,
  misc_feature (1)..(233): Homolog of NCBI NO: 17473759 NR Description: putative protein [Arabidopsis thaliana]
  misc_feature (1)..(233): Homolog of NCBI NO: 15234480 NR Description: unknown protein; protein id: At4g04860.1, by cDNA: gi_14488072, supported by cDNA: gi_20147126 [Arabidopsis >gi|25407297|pir||B85061 hypothetical protein AT4g04860
  misc_feature (4)..(233): Homolog of NCBI NO: 7487831 NR Description: hypothetical protein T8O5.20 - Arabidopsis >gi|2894559|emb|CAA17148.1| putative protein [Arabidopsis
  misc_feature (23)..(233): Homolog of NCBI NO: 25407582 NR Description: hypothetical protein AT4g21810 [imported] - thaliana >gi|7268978|emb|CAB81288.1| putative protein
  misc_feature (1)..(233): Homolog of NCBI NO: 27573354 NR Description: putative Der1-like protein [Oryza sativa
  misc_feature (1)..(228): Homolog of NCBI NO: 40352706 NR Description: Unknown (protein for MGC:63991) [Danio rerio]
  misc_feature (128)..(233): Homolog of NCBI NO: 4455289 NR Description: putative protein [Arabidopsis thaliana]
  misc_feature (1)..(211): Homolog of NCBI NO: 15808990 NR Description: carcinoma related gene [Mus musculus] Unknown (protein for MGC:11613) [Mus musculus] unnamed protein product [Mus musculus]
  misc_feature (1)..(226): Homolog of NCBI NO: 35505512 NR Description: FLJ43842 protein [Homo sapiens]
MPIITRSYLTAAVVTTVGCSLEIISPYNLYLNPTLVVKQYQFWRLVTNFLYFRKMDLDFLFHMFFLARYCKLLEENSFRGKTTDFLYMLLFGATVLTGIVLIGGMIPYLSVSFSKIIFLSNSLTFMMVYVWSKQNPYIHMSFLGLFTFTAAYLPWVLLGFSILVGASAWGDFLGMIAGHAYYFLAFVYPRMTDRRPLKTPSFLKALFADEPVVIARPEDVRFAHAPFDEIHQD

SEQ ID NO: 77207 - protein, 179 aa, Arabidopsis thaliana; identical to SEQ ID NO: 74570
  peptide (1)..(179): Ceres Seq. ID no. 12561822
  misc_feature (1)..(147): Pfam Name: Der1-like family Pfam Description: Der1-like family
  misc_feature (1)..(179): Homolog of NCBI NO: 22328865 NR Description: putative protein; protein id: At4g21810.1,
  misc_feature (1)..(179): Homolog of NCBI NO: 17473759 NR Description: putative protein [Arabidopsis thaliana]
  misc_feature (1)..(179): Homolog of NCBI NO: 15234480 NR Description: unknown protein; protein id: At4g04860.1, by cDNA: gi_14488072, supported by cDNA: gi_20147126 [Arabidopsis >gi|25407297|pir||B85061 hypothetical protein AT4g04860
  misc_feature (1)..(179): Homolog of NCBI NO: 7487831 NR Description: hypothetical protein T8O5.20 - Arabidopsis >gi|2894559|emb|CAA17148.1| putative protein [Arabidopsis
  misc_feature (1)..(179): Homolog of NCBI NO: 25407582 NR Description: hypothetical protein AT4g21810 [imported] - thaliana >gi|7268978|emb|CAB81288.1| putative protein
  misc_feature (1)..(179): Homolog of NCBI NO: 27573354 NR Description: putative Der1-like protein [Oryza sativa
  misc_feature (1)..(174): Homolog of NCBI NO: 40352706 NR Description: Unknown (protein for MGC:63991) [Danio rerio]
  misc_feature (74)..(179): Homolog of NCBI NO: 4455289 NR Description: putative protein [Arabidopsis thaliana]
  misc_feature (1)..(157): Homolog of NCBI NO: 15808990 NR Description: carcinoma related gene [Mus musculus] Unknown (protein for MGC:11613) [Mus musculus] unnamed protein product [Mus musculus]
  misc_feature (1)..(172): Homolog of NCBI NO: 35505512 NR Description: FLJ43842 protein [Homo sapiens]

SEQ ID NO: 77208 - DNA, 1384 bp, Arabidopsis thaliana
  misc_feature (1)..(1384): Ceres Seq. ID no. 12561906
  misc_feature: MA Experiment ID: 108463 Result: Up-regulated in Transcription
  misc_feature: MA Experiment 108463 PARAMETER Experiment Name: At_Germinating_Seeds_cDNA_P Parameter: Age (day) Value: 3 vs. 0
  misc_feature: MA Experiment 108463 PARAMETER Experiment Name: At_Germinating_Seeds_cDNA_P Parameter: Tissue Value: Germinating Seeds
  misc_feature: MA Experiment ID: 108464 Result: Up-regulated in Transcription
  misc_feature: MA Experiment 108464 PARAMETER Experiment Name: At_Germinating_Seeds_cDNA_P Parameter: Age (day) Value: 4 vs. 0
  misc_feature: MA Experiment 108464 PARAMETER Experiment Name: At_Germinating_Seeds_cDNA_P Parameter: Tissue Value: Germinating Seeds
  misc_feature: MA Experiment ID: 108573 Result: Up-regulated in Transcription
  misc_feature: MA Experiment 108573 PARAMETER Experiment Name: At_Drought_cDNA_P Parameter: Timepoint (hr) Value: 6
  misc_feature: MA Experiment 108573 PARAMETER Experiment Name: At_Drought_cDNA_P Parameter: Tissue Value: Aerial
  misc_feature: MA Experiment 108573 PARAMETER Experiment Name: At_Drought_cDNA_P Parameter: Treatment Value: Drought vs. No Drought
  misc_feature: MA Experiment ID: 108574 Result: Down-regulated in Transcription
  misc_feature: MA Experiment 108574 PARAMETER Experiment Name: At_Wounding__cDNA_P Parameter: Timepoint (hr) Value: 1
  misc_feature: MA Experiment 108574 PARAMETER Experiment Name: At_Wounding__cDNA_P Parameter: Tissue Value: Aerial
  misc_feature: MA Experiment 108574 PARAMETER Experiment Name: At_Wounding__cDNA_P Parameter: Treatment Value: Wounding vs. No Wounding
  misc_feature: MA Experiment ID: 108579 Result: Down-regulated in Transcription
  misc_feature: MA Experiment 108579 PARAMETER Experiment Name: At_4deg_Cold_cDNA_P Parameter: Temperature (deg C) Value: 4 vs. 22
  misc_feature: MA Experiment 108579 PARAMETER Experiment Name: At_4deg_Cold_cDNA_P Parameter: Timepoint (hr) Value: 6
  misc_feature: MA Experiment 108579 PARAMETER Experiment Name: At_4deg_Cold_cDNA_P Parameter: Tissue Value: Aerial
  misc_feature: MA Experiment ID: 20000087 Result: Down-regulated in Transcription
  misc_feature: MA Experiment 20000087 PARAMETER Experiment Name: At_100uM_ABA_Mutants_cDNA_P Parameter: Plant Line Value: WS
  misc_feature: MA Experiment 20000087 PARAMETER Experiment Name: At_100uM_ABA_Mutants_cDNA_P Parameter: Timepoint (hr) Value: 6
  misc_feature: MA Experiment 20000087 PARAMETER Experiment Name: At_100uM_ABA_Mutants_cDNA_P Parameter: Tissue Value: Aerial
  misc_feature: MA Experiment 20000087 PARAMETER Experiment Name: At_100uM_ABA_Mutants_cDNA_P Parameter: Treatment Value: 100uM ABA vs. No Treatment
  misc_feature: MA Experiment ID: 20000111 Result: Down-regulated in Transcription
  misc_feature: MA Experiment 20000111 PARAMETER Experiment Name: At_42deg_Heat_cDNA_P Parameter: Temperature (deg C) Value: 42 vs. 22
  misc_feature: MA Experiment 20000111 PARAMETER Experiment Name: At_42deg_Heat_cDNA_P Parameter: Timepoint (hr) Value: 6
  misc_feature: MA Experiment 20000111 PARAMETER Experiment Name: At_42deg_Heat_cDNA_P Parameter: Tissue Value: Aerial
  misc_feature: MA Experiment ID: 20000173 Result: Down-regulated in Transcription
  misc_feature: MA Experiment 20000173 PARAMETER Experiment Name: At_42deg_Heat_P Parameter: Age (day) Value: 14
  misc_feature: MA Experiment 20000173 PARAMETER Experiment Name: At_42deg_Heat_P Parameter: Organism Value: A. thaliana
  misc_feature: MA Experiment 20000173 PARAMETER Experiment Name: At_42deg_Heat_P Parameter: Plant Line Value: WS
  misc_feature: MA Experiment 20000173 PARAMETER Experiment Name: At_42deg_Heat_P Parameter: Temperature (deg C) Value: 42 vs. 22
  misc_feature: MA Experiment 20000173 PARAMETER Experiment Name: At_42deg_Heat_P Parameter: Timepoint (hr) Value: 6
  misc_feature: MA Experiment 20000173 PARAMETER Experiment Name: At_42deg_Heat_P Parameter: Tissue Value: Aerial
  misc_feature: MA Experiment ID: 20000179 Result: Up-regulated in Transcription
  misc_feature: MA Experiment 20000179 PARAMETER Experiment Name: At_Germinating_Seeds_P Parameter: Age (hr) Value: 6 vs. 0
  misc_feature: MA Experiment 20000179 PARAMETER Experiment Name: At_Germinating_Seeds_P Parameter: Tissue Value: Germinating Seeds
  misc_feature: MA Experiment ID: 20000180 Result: Up-regulated in Transcription
  misc_feature: MA Experiment 20000180 PARAMETER Experiment Name: At_Germinating_Seeds_P Parameter: Age (hr) Value: 24 vs. 0
  misc_feature: MA Experiment 20000180 PARAMETER Experiment Name: At_Germinating_Seeds_P Parameter: Tissue Value: Germinating Seeds
  misc_feature: MA Experiment ID: 20000184 Result: Down-regulated in Transcription
  misc_feature: MA Experiment 20000184 PARAMETER Experiment Name: At_Shoots__P Parameter: Age (day) Value: 7
  misc_feature: MA Experiment 20000184 PARAMETER Experiment Name: At_Shoots__P Parameter: Tissue Value: Shoots vs. Whole Plant
  misc_feature: MA Experiment ID: 20000234 Result: Down-regulated in Transcription
  misc_feature: MA Experiment 20000234 PARAMETER Experiment Name: At_Siliques_P Parameter: Age (day) Value: 21
  misc_feature: MA Experiment 20000234 PARAMETER Experiment Name: At_Siliques_P Parameter: Organism Value: A. thaliana
  misc_feature: MA Experiment 20000234 PARAMETER Experiment Name: At_Siliques_P Parameter: Plant Line Value: WS
  misc_feature: MA Experiment 20000234 PARAMETER Experiment Name: At_Siliques_P Parameter: Tissue Value: Less Than 5mm Siliques vs. Whole Plant
  misc_feature: MA Experiment ID: 20000235 Result: Down-regulated in Transcription
  misc_feature: MA Experiment 20000235 PARAMETER Experiment Name: At_Siliques_P Parameter: Age (day) Value: 21
  misc_feature: MA Experiment 20000235 PARAMETER Experiment Name: At_Siliques_P Parameter: Organism Value: A. thaliana
  misc_feature: MA Experiment 20000235 PARAMETER Experiment Name: At_Siliques_P Parameter: Plant Line Value: WS
  misc_feature: MA Experiment 20000235 PARAMETER Experiment Name: At_Siliques_P Parameter: Tissue Value: 5-10mm Siliques vs. Whole Plant
  misc_feature: MA Experiment ID: 20000264 Result: Down-regulated in Transcription
  misc_feature: MA Experiment 20000264 PARAMETER Experiment Name: At_Open_Flower_P Parameter: Age (day) Value: 21
  misc_feature: MA Experiment 20000264 PARAMETER Experiment Name: At_Open_Flower_P Parameter: Plant Line Value: WS
  misc_feature: MA Experiment 20000264 PARAMETER Experiment Name: At_Open_Flower_P Parameter: Tissue Value: Open Flower vs. Whole Plant
  misc_feature: MA Experiment ID: 20000265 Result: Down-regulated in Transcription
  misc_feature: MA Experiment 20000265 PARAMETER Experiment Name: At_Open_Flower_P Parameter: Age (day) Value: 21
  misc_feature: MA Experiment 20000265 PARAMETER Experiment Name: At_Open_Flower_P Parameter: Plant Line Value: WS
  misc_feature: MA Experiment 20000265 PARAMETER Experiment Name: At_Open_Flower_P Parameter: Tissue Value: Closed Flower vs. Whole Plant
  misc_feature: MA Experiment ID: 20000286 Result: Down-regulated in Transcription
  misc_feature: MA Experiment 20000286 PARAMETER Experiment Name: At_Open_Flower_P Parameter: Age (day) Value: 21
  misc_feature: MA Experiment 20000286 PARAMETER Experiment Name: At_Open_Flower_P Parameter: Plant Line Value: WS
  misc_feature: MA Experiment 20000286 PARAMETER Experiment Name: At_Open_Flower_P Parameter: Tissue Value: Half Open vs. Whole Plant
  misc_feature: MA Experiment ID: 20001248 Result: Up-regulated in Transcription
  misc_feature: MA Experiment 20001248 PARAMETER Experiment Name: At_Far-red-induction_P Parameter: Age (day) Value: 7
  misc_feature: MA Experiment 20001248 PARAMETER Experiment Name: At_Far-red-induction_P Parameter: Light Value: Far-red vs. White
  misc_feature: MA Experiment 20001248 PARAMETER Experiment Name: At_Far-red-induction_P Parameter: Organism Value: A. thaliana
  misc_feature: MA Experiment 20001248 PARAMETER Experiment Name: At_Far-red-induction_P Parameter: Plant Line Value: Columbia
  misc_feature: MA Experiment 20001248 PARAMETER Experiment Name: At_Far-red-induction_P Parameter: Timepoint (hr) Value: 4
  misc_feature: MA Experiment 20001248 PARAMETER Experiment Name: At_Far-red-induction_P Parameter: Tissue Value: Whole Plant
  misc_feature: MA Experiment ID: 20001450 Result: Up-regulated in Transcription
  misc_feature: MA Experiment 20001450 PARAMETER Experiment Name: At_Far-red-induction_P Parameter: Age (day) Value: 7
  misc_feature: MA Experiment 20001450 PARAMETER Experiment Name: At_Far-red-induction_P Parameter: Light Value: Far-red vs. White
  misc_feature: MA Experiment 20001450 PARAMETER Experiment Name: At_Far-red-induction_P Parameter: Organism Value: A. thaliana
  misc_feature: MA Experiment 20001450 PARAMETER Experiment Name: At_Far-red-induction_P Parameter: Plant Line Value: Columbia
  misc_feature: MA Experiment 20001450 PARAMETER Experiment Name: At_Far-red-induction_P Parameter: Timepoint (hr) Value: 8
  misc_feature: MA Experiment 20001450 PARAMETER Experiment Name: At_Far-red-induction_P Parameter: Tissue Value: Whole Plant
  misc_feature: MA Experiment ID: 20001451 Result: Up-regulated in Transcription
  misc_feature: MA Experiment 20001451 PARAMETER Experiment Name: At_Far-red-induction_P Parameter: Age (day) Value: 7
  misc_feature: MA Experiment 20001451 PARAMETER Experiment Name: At_Far-red-induction_P Parameter: Light Value: Far-red vs. White
  misc_feature: MA Experiment 20001451 PARAMETER Experiment Name: At_Far-red-induction_P Parameter: Organism Value: A. thaliana
  misc_feature: MA Experiment 20001451 PARAMETER Experiment Name: At_Far-red-induction_P Parameter: Plant Line Value: Columbia
  misc_feature: MA Experiment 20001451 PARAMETER Experiment Name: At_Far-red-induction_P Parameter: Timepoint (hr) Value: 24
  misc_feature: MA Experiment 20001451 PARAMETER Experiment Name: At_Far-red-induction_P Parameter: Tissue Value: Whole Plant
aaagtgccactttttcttcctaaatcctctctctctctctccgttcccgagacaagcaaaagcttcaatctcaaatctttcagcagctacaaaaatgttcttcatctaaaagagactgtgaagcagagagagagagagagagagagagagagagagatgggaggtgtgacgtcatcagttgcggcgaagttcgctttcttcccgccgagtccgtcgtcttacaagctggtttacgatgaactgaccggacttcttctgatgaacccatttcctcaccgtgaaaacgttgaaatccttaagcttccgacacgtagaggaacagagatcgtggctatgtacgtcagacatccgatggctacctctactctgctttattcccatggaaacgccgccgatctgggccagatgtatgagctcttcatcgaattgagcatccatcttaaggttaatctcatggggtacgattactccgggtatggacaatctactggaaagccaagtgagcaccatacatatgctgatatcgaagctgcttataaatgtcttgaggaaacctatggagcaaaacaggaagacataatcctttatggccaatccgttggaagtggacctacattagatcttgctgctcggttgcctcaattaagagctgctgttctccatagcccgattctttctggtctaagagtaatgtatccagtgaagaagacatactggttcgacatcttcaagaatatcgacaaaatacctcttgtgaattgcccggttctcgtcattcacggaacttgtgatgaagttgttgactgttctcatggaaaacaactatgggaactctctaaagagaaatatgaaccgctttggctcgaaggcggtaaccactgtgatctagaacactatcctgaatacattaaacaccttaagaagttcatcacaaccgtagagagagatctctcctcgagggcgagcacggcccaattagagaaacagagcagcgatttggaaatgccgaggcagagcgtagatagaagagagaagccgaggcaaagcgttgataaaagggagaaagagaaacctccaaagggtccttcaaagaagagtaagctgagaatcacgttcgagcagcacttagatcggactaggagaagcgttgacttccacgaaaaggcaaggaagagcgttgaccatcatcagcatcatcagaatcatcatcagattgagagaggaaggaagagtgttgatagattggatagagtacggtctgagtaaaccggagaaaatctaccacacgtacataagttgttacagaacaagaacatttgatcttgatcttgattggccattctaatgtttatggttttttgttttgatttgtgagttattctcc

SEQ ID NO: 77209 - protein, 421 aa, Arabidopsis thaliana
  peptide (1)..(421): Ceres Seq. ID no. 12561907
  misc_feature (152)..(220): Pfam Name: alpha/beta hydrolase fold Pfam Description: alpha/beta hydrolase fold
  misc_feature (53)..(421): Homolog of NCBI NO: 15241394 NR Description: putative protein; protein id: At5g14390.1, by cDNA: gi_17529313 [Arabidopsis thaliana]
  misc_feature (53)..(421): Homolog of NCBI NO: 15232168 NR Description: unknown protein; protein id: At3g01690.1 thaliana] >gi|6016726|gb|AAF01552.1|AC009325_22 unknown protein thaliana] >gi|6091713|gb|AAF03425.1|AC010797_1 unknown protein
  misc_feature (53)..(420): Homolog of NCBI NO: 15233975 NR Description: putative protein; protein id: At4g24760.1, by cDNA: 121159., supported by cDNA: gi_18175920 [Arabidopsis
  misc_feature (53)..(414): Homolog of NCBI NO: 15230760 NR Description: unknown protein; protein id: At3g30380.1 thaliana] >gi|9294341|dbj|BAB02238.1| contains similarity to
  misc_feature (53)..(370): Homolog of NCBI NO: 10177798 NR Description: emb|CAB87778.1~gene_id:MXA21.9~strong similarity unknown protein [Arabidopsis thaliana] unknown protein [Arabidopsis thaliana]
  misc_feature (53)..(282): Homolog of NCBI NO: 18175921 NR Description: unknown protein [Arabidopsis thaliana]
  misc_feature (89)..(394): Homolog of NCBI NO: 34911338 NR Description: P0519D04.38 [Oryza sativa (japonica
  misc_feature (53)..(85): Homolog of NCBI NO: 34911338 NR Description: P0519D04.38 [Oryza sativa (japonica
  misc_feature (53)..(323): Homolog of NCBI NO: 22330474 NR Description: hypothetical protein; protein id: At1g66900.1, by cDNA: gi_17979070 [Arabidopsis thaliana] unknown protein [Arabidopsis thaliana]
  misc_feature (53)..(370): Homolog of NCBI NO: 15240861 NR Description: putative protein; protein id: At5g38220.1
KVPLFLPKSSLSLSVPETSKSFNLKSFSSYKNVLHLKETVKQREREREREREMGGVTSSVAAKFAFFPPSPSSYKLVYDELTGLLLMNPFPHRENVEILKLPTRRGTEIVAMYVRHPMATSTLLYSHGNAADLGQMYELFIELSIHLKVNLMGYDYSGYGQSTGKPSEHHTYADIEAAYKCLEETYGAKQEDIILYGQSVGSGPTLDLAARLPQLRAAVLHSPILSGLRVMYPVKKTYWFDIFKNIDKIPLVNCPVLVIHGTCDEVVDCSHGKQLWELSKEKYEPLWLEGGNHCDLEHYPEYIKHLKKFITTVERDLSSRASTAQLEKQSSDLEMPRQSVDRREKPRQSVDKREKEKPPKGPSKKSKLRITFEQHLDRTRRSVDFHEKARKSVDHHQHHQNHHQIERGRKSVDRLDRVRSE

SEQ ID NO: 77210 - protein, 369 aa, Arabidopsis thaliana; identical to SEQ ID NO: 41674
  peptide (1)..(369): Ceres Seq. ID no. 12561908
  misc_feature (100)..(168): Pfam Name: alpha/beta hydrolase fold Pfam Description: alpha/beta hydrolase fold
  misc_feature (1)..(369): Homolog of NCBI NO: 15241394 NR Description: putative protein; protein id: At5g14390.1, by cDNA: gi_17529313 [Arabidopsis thaliana]
  misc_feature (1)..(369): Homolog of NCBI NO: 15232168 NR Description: unknown protein; protein id: At3g01690.1 thaliana] >gi|6016726|gb|AAF01552.1|AC009325_22 unknown protein thaliana] >gi|6091713|gb|AAF03425.1|AC010797_1 unknown protein
  misc_feature (1)..(368): Homolog of NCBI NO: 15233975 NR Description: putative protein; protein id: At4g24760.1, by cDNA: 121159., supported by cDNA: gi_18175920 [Arabidopsis
  misc_feature (1)..(362): Homolog of NCBI NO: 15230760 NR Description: unknown protein; protein id: At3g30380.1 thaliana] >gi|9294341|dbj|BAB02238.1| contains similarity to
  misc_feature (1)..(318): Homolog of NCBI NO: 10177798 NR Description: emb|CAB87778.1~gene_id:MXA21.9~strong similarity unknown protein [Arabidopsis thaliana] unknown protein [Arabidopsis thaliana]
  misc_feature (1)..(230): Homolog of NCBI NO: 18175921 NR Description: unknown protein [Arabidopsis thaliana]
  misc_feature (37)..(342): Homolog of NCBI NO: 34911338 NR Description: P0519D04.38 [Oryza sativa (japonica
  misc_feature (1)..(33): Homolog of NCBI NO: 34911338 NR Description: P0519D04.38 [Oryza sativa (japonica
  misc_feature (1)..(271): Homolog of NCBI NO: 22330474 NR Description: hypothetical protein; protein id: At1g66900.1, by cDNA: gi_17979070 [Arabidopsis thaliana] unknown protein [Arabidopsis thaliana]
  misc_feature (1)..(318): Homolog of NCBI NO: 15240861 NR Description: putative protein; protein id: At5g38220.1

SEQ ID NO: 77211 - protein, 335 aa, Arabidopsis thaliana; identical to SEQ ID NO: 41675
  peptide (1)..(335): Ceres Seq. ID no. 12561909
  misc_feature (66)..(134): Pfam Name: alpha/beta hydrolase fold Pfam Description: alpha/beta hydrolase fold
  misc_feature (1)..(335): Homolog of NCBI NO: 15241394 NR Description: putative protein; protein id: At5g14390.1, by cDNA: gi_17529313 [Arabidopsis thaliana]
  misc_feature (1)..(335): Homolog of NCBI NO: 15232168 NR Description: unknown protein; protein id: At3g01690.1 thaliana] >gi|6016726|gb|AAF01552.1|AC009325_22 unknown protein thaliana] >gi|6091713|gb|AAF03425.1|AC010797_1 unknown protein
  misc_feature (1)..(334): Homolog of NCBI NO: 15233975 NR Description: putative protein; protein id: At4g24760.1, by cDNA: 121159., supported by cDNA: gi_18175920 [Arabidopsis
  misc_feature (1)..(328): Homolog of NCBI NO: 15230760 NR Description: unknown protein; protein id: At3g30380.1 thaliana] >gi|9294341|dbj|BAB02238.1| contains similarity to
  misc_feature (1)..(284): Homolog of NCBI NO: 10177798 NR Description: emb|CAB87778.1~gene_id:MXA21.9~strong similarity unknown protein [Arabidopsis thaliana] unknown protein [Arabidopsis thaliana]
  misc_feature (1)..(196): Homolog of NCBI NO: 18175921 NR Description: unknown protein [Arabidopsis thaliana]
  misc_feature (3)..(308): Homolog of NCBI NO: 34911338 NR Description: P0519D04.38 [Oryza sativa (japonica
  misc_feature (1)..(237): Homolog of NCBI NO: 22330474 NR Description: hypothetical protein; protein id: At1g66900.1, by cDNA: gi_17979070 [Arabidopsis thaliana] unknown protein [Arabidopsis thaliana]
  misc_feature (1)..(284): Homolog of NCBI NO: 15240861 NR Description: putative protein; protein id: At5g38220.1
  misc_feature (1)..(248): Homolog of NCBI NO: 28393521 NR Description: unknown protein [Arabidopsis thaliana]

SEQ ID NO: 77212 - DNA, 977 bp, Arabidopsis thaliana
  misc_feature (1)..(977): Ceres Seq. ID no. 12561910
  misc_feature: MA Experiment ID: 108461 Result: Up-regulated in Transcription
  misc_feature: MA Experiment 108461 PARAMETER Experiment Name: At_Germinating_Seeds_cDNA_P Parameter: Age (day) Value: 1 vs. 0
  misc_feature: MA Experiment 108461 PARAMETER Experiment Name: At_Germinating_Seeds_cDNA_P Parameter: Tissue Value: Germinating Seeds
  misc_feature: MA Experiment ID: 108462 Result: Up-regulated in Transcription
  misc_feature: MA Experiment 108462 PARAMETER Experiment Name: At_Germinating_Seeds_cDNA_P Parameter: Age (day) Value: 2 vs. 0
  misc_feature: MA Experiment 108462 PARAMETER Experiment Name: At_Germinating_Seeds_cDNA_P Parameter: Tissue Value: Germinating Seeds
  misc_feature: MA Experiment ID: 108463 Result: Up-regulated in Transcription
  misc_feature: MA Experiment 108463 PARAMETER Experiment Name: At_Germinating_Seeds_cDNA_P Parameter: Age (day) Value: 3 vs. 0
  misc_feature: MA Experiment 108463 PARAMETER Experiment Name: At_Germinating_Seeds_cDNA_P Parameter: Tissue Value: Germinating Seeds
  misc_feature: MA Experiment ID: 108464 Result: Up-regulated in Transcription
  misc_feature: MA Experiment 108464 PARAMETER Experiment Name: At_Germinating_Seeds_cDNA_P Parameter: Age (day) Value: 4 vs. 0
  misc_feature: MA Experiment 108464 PARAMETER Experiment Name: At_Germinating_Seeds_cDNA_P Parameter: Tissue Value: Germinating Seeds
  misc_feature: MA Experiment ID: 108579 Result: Up-regulated in Transcription
  misc_feature: MA Experiment 108579 PARAMETER Experiment Name: At_4deg_Cold_cDNA_P Parameter: Temperature (deg C) Value: 4 vs. 22
  misc_feature: MA Experiment 108579 PARAMETER Experiment Name: At_4deg_Cold_cDNA_P Parameter: Timepoint (hr) Value: 6
  misc_feature: MA Experiment 108579 PARAMETER Experiment Name: At_4deg_Cold_cDNA_P Parameter: Tissue Value: Aerial
  misc_feature: MA Experiment ID: 20000086 Result: Down-regulated in Transcription
  misc_feature: MA Experiment 20000086 PARAMETER Experiment Name: At_100uM_ABA_Mutants_cDNA_P Parameter: Plant Line Value: CS22
  misc_feature: MA Experiment 20000086 PARAMETER Experiment Name: At_100uM_ABA_Mutants_cDNA_P Parameter: Timepoint (hr) Value: 6
  misc_feature: MA Experiment 20000086 PARAMETER Experiment Name: At_100uM_ABA_Mutants_cDNA_P Parameter: Tissue Value: Aerial
  misc_feature: MA Experiment 20000086 PARAMETER Experiment Name: At_100uM_ABA_Mutants_cDNA_P Parameter: Treatment Value: 100uM ABA vs. No Treatment
  misc_feature: MA Experiment ID: 20000090 Result: Down-regulated in Transcription
  misc_feature: MA Experiment ID: 20000180 Result: Up-regulated in Transcription
  misc_feature: MA Experiment 20000180 PARAMETER Experiment Name: At_Germinating_Seeds_P Parameter: Age (hr) Value: 24 vs. 0
  misc_feature: MA Experiment 20000180 PARAMETER Experiment Name: At_Germinating_Seeds_P Parameter: Tissue Value: Germinating Seeds
  misc_feature: MA Experiment ID: 20000184 Result: Up-regulated in Transcription
  misc_feature: MA Experiment 20000184 PARAMETER Experiment Name: At_Shoots__P Parameter: Age (day) Value: 7
  misc_feature: MA Experiment 20000184 PARAMETER Experiment Name: At_Shoots__P Parameter: Tissue Value: Shoots vs. Whole Plant
  misc_feature: MA Experiment ID: 20000185 Result: Up-regulated in Transcription
  misc_feature: MA Experiment 20000185 PARAMETER Experiment Name: At_Roots__P Parameter: Age (day) Value: 7 vs. 21
  misc_feature: MA Experiment 20000185 PARAMETER Experiment Name: At_Roots__P Parameter: Organism Value: A. thaliana
  misc_feature: MA Experiment 20000185 PARAMETER Experiment Name: At_Roots__P Parameter: Tissue Value: Roots vs. Whole Plant
  misc_feature: MA Experiment ID: 20000438 Result: Up-regulated in Transcription
  misc_feature: MA Experiment 20000438 PARAMETER Experiment Name: At_Shoots__P Parameter: Age (day) Value: 14
  misc_feature: MA Experiment 20000438 PARAMETER Experiment Name: At_Shoots__P Parameter: Tissue Value: Shoots vs. Whole Plant
  misc_feature: MA Experiment ID: 20001248 Result: Down-regulated in Transcription
  misc_feature: MA Experiment 20001248 PARAMETER Experiment Name: At_Far-red-induction_P Parameter: Age (day) Value: 7
  misc_feature: MA Experiment 20001248 PARAMETER Experiment Name: At_Far-red-induction_P Parameter: Light Value: Far-red vs. White
  misc_feature: MA Experiment 20001248 PARAMETER Experiment Name: At_Far-red-induction_P Parameter: Organism Value: A. thaliana
  misc_feature: MA Experiment 20001248 PARAMETER Experiment Name: At_Far-red-induction_P Parameter: Plant Line Value: Columbia
  misc_feature: MA Experiment 20001248 PARAMETER Experiment Name: At_Far-red-induction_P Parameter: Timepoint (hr) Value: 4
  misc_feature: MA Experiment 20001248 PARAMETER Experiment Name: At_Far-red-induction_P Parameter: Tissue Value: Whole Plant
attccgggagaaaaagtcgcgatacttgagctactcagctttagggtttaacatgttaaggtctctgatttggaaacgatcacaggcatattcttcagtcgtcacgatgtcttcaatcagtcagagaggaaatgaaaggcttttgtctgaagtcgctggttcacattcaagagataataagatattggttttgggaggaaatggttatgtaggttcacacatatgtaaggaggcactgagacaaggtttctctgtatctagtcttagcaggtctggaagatcttctcttcacgattcgtgggtcgatgatgtaacctggcatcaaggtgatttgctttcacccgattctctgaagcctgcactagaaggaattacatctgtgatttcatgtgttggtggttttggttccaactcacaaatggtcagaattaacggtactgcaaacatcaatgctgttaaagctgcagcagaacaaggtgtgaagagatttgtgtatatatcagctgcggattttggtgtcataaataacttgattcgaggatatttcgaagggaagagagcaaccgaagctgagattttggataaatttggaaacagaggttcggttttaaggccaggattcatacatgggactcgtcaggtcggtagcataaagctgccacttagtctcattggagctcctctcgaaatggttttgaagctgttgccaaaagaggtgacgaaaattcctgtgatcgggccacttttaatacctccggtcaatgtcaaatccgttgcagcaacagcggtaaaagctgcagttgatcccgagtttgcttctggagtcatcgatgtgtaccggattcttcaacatggtcactgaaaacaacacctgtcttaacaaagttctcctcaatacggttttaaatgtcaaattcaaatgtaaccaataaccatcgtctctggtcttctgctaccaaataaactatgactttcgc

SEQ ID NO: 77213 - protein, 286 aa, Arabidopsis thaliana
  peptide (1)..(286): Ceres Seq. ID no. 12561911
  misc_feature (60)..(221): Pfam Name: Isoflavone reductase Pfam Description: Isoflavone reductase
  misc_feature (18)..(286): Homolog of NCBI NO: 18417824 NR Description: putative protein; protein id: At5g15910.1, by cDNA: 22994., supported by cDNA: gi_15292960, supported by gi_21280840 [Arabidopsis thaliana] >gi|15292961|gb|AAK93591.1|
  misc_feature (36)..(286): Homolog of NCBI NO: 21592373 NR Description: unknown [Arabidopsis thaliana]
  misc_feature (60)..(286): Homolog of NCBI NO: 18416362 NR Description: putative protein; protein id: At5g10730.1, by cDNA: 10217., supported by cDNA: gi_13926272, supported by gi_16323237, supported by cDNA: gi_19698948 [Arabidopsis
  misc_feature (60)..(286): Homolog of NCBI NO: 10129651 NR Description: putative protein [Arabidopsis thaliana]
  misc_feature (140)..(286): Homolog of NCBI NO: 11346175 NR Description: hypothetical protein F1N13_50 - Arabidopsis >gi|9755637|emb|CAC01790.1| putative protein [Arabidopsis
  misc_feature (57)..(281): Homolog of NCBI NO: 38346147 NR Description: OSJNBb0118P14.7 [Oryza sativa (japonica
  misc_feature (57)..(281): Homolog of NCBI NO: 18398333 NR Description: expressed protein; protein id: At1g32220.1, by cDNA: 3464. [Arabidopsis thaliana] >gi|25403150|pir||G86446
  misc_feature (125)..(281): Homolog of NCBI NO: 8744993 NR Description: hypothetical protein P1295.07 [Leishmania major]
  misc_feature (60)..(249): Homolog of NCBI NO: 23037289 NR Description: hypothetical protein [Oenococcus oeni MCW]
  misc_feature (60)..(256): Homolog of NCBI NO: 22536918 NR Description: conserved domain protein [Streptococcus NEM316] >gi|22533770|gb|AAM99641.1|AE014226_1 conserved domain
FREKKSRYLSYSALGFNMLRSLIWKRSQAYSSVVTMSSISQRGNERLLSEVAGSHSRDNKILVLGGNGYVGSHICKEALRQGFSVSSLSRSGRSSLHDSWVDDVTWHQGDLLSPDSLKPALEGITSVISCVGGFGSNSQMVRINGTANINAVKAAAEQGVKRFVYISAADFGVINNLIRGYFEGKRATEAEILDKFGNRGSVLRPGFIHGTRQVGSIKLPLSLIGAPLEMVLKLLPKEVTKIPVIGPLLIPPVNVKSVAATAVKAAVDPEFASGVIDVYRILQHGH

SEQ ID NO: 77214 - protein, 269 aa, Arabidopsis thaliana; identical to SEQ ID NO: 35416
  peptide (1)..(269): Ceres Seq. ID no. 12561912
  misc_feature (43)..(204): Pfam Name: Isoflavone reductase Pfam Description: Isoflavone reductase
  misc_feature (1)..(269): Homolog of NCBI NO: 18417824 NR Description: putative protein; protein id: At5g15910.1, by cDNA: 22994., supported by cDNA: gi_15292960, supported by gi_21280840 [Arabidopsis thaliana] >gi|15292961|gb|AAK93591.1|
  misc_feature (19)..(269): Homolog of NCBI NO: 21592373 NR Description: unknown [Arabidopsis thaliana]
  misc_feature (43)..(269): Homolog of NCBI NO: 18416362 NR Description: putative protein; protein id: At5g10730.1, by cDNA: 10217., supported by cDNA: gi_13926272, supported by gi_16323237, supported by cDNA: gi_19698948 [Arabidopsis
  misc_feature (43)..(269): Homolog of NCBI NO: 10129651 NR Description: putative protein [Arabidopsis thaliana]
  misc_feature (123)..(269): Homolog of NCBI NO: 11346175 NR Description: hypothetical protein F1N13_50 - Arabidopsis >gi|9755637|emb|CAC01790.1| putative protein [Arabidopsis
  misc_feature (40)..(264): Homolog of NCBI NO: 38346147 NR Description: OSJNBb0118P14.7 [Oryza sativa (japonica
  misc_feature (40)..(264): Homolog of NCBI NO: 18398333 NR Description: expressed protein; protein id: At1g32220.1, by cDNA: 3464. [Arabidopsis thaliana] >gi|25403150|pir||G86446
  misc_feature (108)..(264): Homolog of NCBI NO: 8744993 NR Description: hypothetical protein P1295.07 [Leishmania major]
  misc_feature (43)..(232): Homolog of NCBI NO: 23037289 NR Description: hypothetical protein [Oenococcus oeni MCW]
  misc_feature (43)..(239): Homolog of NCBI NO: 22536918 NR Description: conserved domain protein [Streptococcus NEM316] >gi|22533770|gb|AAM99641.1|AE014226_1 conserved domain

SEQ ID NO: 77215 - protein, 251 aa, Arabidopsis thaliana; identical to SEQ ID NO: 35417
  peptide (1)..(251): Ceres Seq. ID no. 12561913
  misc_feature (25)..(186): Pfam Name: Isoflavone reductase Pfam Description: Isoflavone reductase
  misc_feature (1)..(251): Homolog of NCBI NO: 18417824 NR Description: putative protein; protein id: At5g15910.1, by cDNA: 22994., supported by cDNA: gi_15292960, supported by gi_21280840 [Arabidopsis thaliana] >gi|15292961|gb|AAK93591.1|
  misc_feature (1)..(251): Homolog of NCBI NO: 21592373 NR Description: unknown [Arabidopsis thaliana]
  misc_feature (25)..(251): Homolog of NCBI NO: 18416362 NR Description: putative protein; protein id: At5g10730.1, by cDNA: 10217., supported by cDNA: gi_13926272, supported by gi_16323237, supported by cDNA: gi_19698948 [Arabidopsis
  misc_feature (25)..(251): Homolog of NCBI NO: 10129651 NR Description: putative protein [Arabidopsis thaliana]
  misc_feature (105)..(251): Homolog of NCBI NO: 11346175 NR Description: hypothetical protein F1N13_50 - Arabidopsis >gi|9755637|emb|CAC01790.1| putative protein [Arabidopsis
  misc_feature (22)..(246): Homolog of NCBI NO: 38346147 NR Description: OSJNBb0118P14.7 [Oryza sativa (japonica
  misc_feature (22)..(246): Homolog of NCBI NO: 18398333 NR Description: expressed protein; protein id: At1g32220.1, by cDNA: 3464. [Arabidopsis thaliana] >gi|25403150|pir||G86446
  misc_feature (90)..(246): Homolog of NCBI NO: 8744993 NR Description: hypothetical protein P1295.07 [Leishmania major]
  misc_feature (25)..(214): Homolog of NCBI NO: 23037289 NR Description: hypothetical protein [Oenococcus oeni MCW]
  misc_feature (25)..(221): Homolog of NCBI NO: 22536918 NR Description: conserved domain protein [Streptococcus NEM316] >gi|22533770|gb|AAM99641.1|AE014226_1 conserved domain

SEQ ID NO: 77216 - DNA, 763 bp, Arabidopsis thaliana
  misc_feature (1)..(763): Ceres Seq. ID no. 12561924
  misc_feature: MA Experiment ID: 108595 Result: Up-regulated in Transcription
  misc_feature: MA Experiment 108595 PARAMETER Experiment Name: At_Ler-pi_Ovule_cDNA_P Parameter: Plant Line Value: null
  misc_feature: MA Experiment ID: 20000111 Result: Down-regulated in Transcription
  misc_feature: MA Experiment 20000111 PARAMETER Experiment Name: At_42deg_Heat_cDNA_P Parameter: Temperature (deg C) Value: 42 vs. 22
  misc_feature: MA Experiment 20000111 PARAMETER Experiment Name: At_42deg_Heat_cDNA_P Parameter: Timepoint (hr) Value: 6
  misc_feature: MA Experiment 20000111 PARAMETER Experiment Name: At_42deg_Heat_cDNA_P Parameter: Tissue Value: Aerial
  misc_feature: MA Experiment ID: 20000113 Result: Down-regulated in Transcription
  misc_feature: MA Experiment 20000113 PARAMETER Experiment Name: At_42deg_Heat_cDNA_P Parameter: Temperature (deg C) Value: 42 vs. 22
  misc_feature: MA Experiment 20000113 PARAMETER Experiment Name: At_42deg_Heat_cDNA_P Parameter: Timepoint (hr) Value: 8
  misc_feature: MA Experiment 20000113 PARAMETER Experiment Name: At_42deg_Heat_cDNA_P Parameter: Tissue Value: Aerial
  misc_feature: MA Experiment ID: 20000144 Result: Down-regulated in Transcription
  misc_feature: MA Experiment 20000144 PARAMETER Experiment Name: At_42deg_Heat_cDNA_P Parameter: Temperature (deg C) Value: 42 vs. 22
  misc_feature: MA Experiment 20000144 PARAMETER Experiment Name: At_42deg_Heat_cDNA_P Parameter: Timepoint (hr) Value: 1
  misc_feature: MA Experiment 20000144 PARAMETER Experiment Name: At_42deg_Heat_cDNA_P Parameter: Tissue Value: Aerial
  misc_feature: MA Experiment ID: 20000180 Result: Up-regulated in Transcription
  misc_feature: MA Experiment 20000180 PARAMETER Experiment Name: At_Germinating_Seeds_P Parameter: Age (hr) Value: 24 vs. 0
  misc_feature: MA Experiment 20000180 PARAMETER Experiment Name: At_Germinating_Seeds_P Parameter: Tissue Value: Germinating Seeds
  misc_feature: MA Experiment ID: 20000184 Result: Up-regulated in Transcription
  misc_feature: MA Experiment 20000184 PARAMETER Experiment Name: At_Shoots__P Parameter: Age (day) Value: 7
  misc_feature: MA Experiment 20000184 PARAMETER Experiment Name: At_Shoots__P Parameter: Tissue Value: Shoots vs. Whole Plant
  misc_feature: MA Experiment ID: 20000227 Result: Down-regulated in Transcription
  misc_feature: MA Experiment 20000227 PARAMETER Experiment Name: At_Root-Tips-vs-Tops_P Parameter: Tissue Value: Root Tips vs. Root Tops
  misc_feature: MA Experiment ID: 20000439 Result: Up-regulated in Transcription
  misc_feature: MA Experiment 20000439 PARAMETER Experiment Name: At_Roots__P Parameter: Age (day) Value: 14 vs. 21
  misc_feature: MA Experiment 20000439 PARAMETER Experiment Name: At_Roots__P Parameter: Organism Value: A. thaliana
  misc_feature: MA Experiment 20000439 PARAMETER Experiment Name: At_Roots__P Parameter: Tissue Value: Roots vs. Whole Plant
cccttctctctctctctctctctctcacacacacacacaaacgcacatacttgagcaaagtcatcacaatgagcttcttcatcgaagattctggtctcatagtcactcagcttctctacaaaatggctgttctcatcaccgtcttgagatggatcctcgcttggatcttacgctaccgatccagatccagatccacctcttcttccacttccgcctgtccttcgatttcctcacaggcgatcaaagaaagcctctccgtgacgacgttccgtgacgcagctgagagatctccggcgatgatcaacgacacctgcgctgtgtgtctcggagatctggaagatggagatgaggttagagaactcaggaactgtagccatatgtttcaccgtgagtgtattgaccggtggttggattatgaatgttgcggtggtgatgagaataacgaaggtgaggaggataatcaccgtacgtgtcctctttgtagaactccgctacttgctgctaatacgacgtcgtgtggtgattggccgacgaagaacgaacctagctgggccgttgaacggcttctctacctcttcggagatgatcttcacgtctgatttcatttttttttgtcttttccgatttttatttgattttttatttagtgggatcgattttgatcaattagaaatttaagtagtgagagtggttaatttttgtaaattgggggatttaatgtgttagattaggaaatataataataatatcatcgattaatttc

SEQ ID NO: 77217 - protein, 198 aa, Arabidopsis thaliana
  peptide (1)..(198): Ceres Seq. ID no. 12561925
  misc_feature (104)..(160): Pfam Name: Zinc finger, C3HC4 type (RING finger) Pfam Description: Zinc finger, C3HC4 type (RING finger)
  misc_feature (23)..(198): Homolog of NCBI NO: 18420336 NR Description: putative protein; protein id: At5g20885.1, by cDNA: gi_16209695 [Arabidopsis thaliana] AT5g20880/F22D1_50 [Arabidopsis thaliana]
  misc_feature (23)..(196): Homolog of NCBI NO: 15229284 NR Description: putative protein; protein id: At3g43430.1, by cDNA: 3137. [Arabidopsis thaliana] >gi|11358362|pir||T47385
  misc_feature (32)..(169): Homolog of NCBI NO: 23451086 NR Description: RING-H2 protein [Medicago sativa]
  misc_feature (76)..(165): Homolog of NCBI NO: 15233117 NR Description: RING finger protein; protein id: At3g61460.1, by cDNA: 25801., supported by cDNA: gi_17644156, supported by
  misc_feature (58)..(166): Homolog of NCBI NO: 15238072 NR Description: RING zinc finger protein-like; protein id: supported by cDNA: 207148. [Arabidopsis thaliana]
  misc_feature (63)..(165): Homolog of NCBI NO: 18411282 NR Description: similar to RING finger protein; protein id:
  misc_feature (58)..(166): Homolog of NCBI NO: 21554155 NR Description: RING zinc finger protein-like [Arabidopsis
  misc_feature (64)..(179): Homolog of NCBI NO: 15233350 NR Description: RING-H2 finger protein RHA1b; protein id: supported by cDNA: 37097., supported by cDNA: gi_3790566
  misc_feature (26)..(176): Homolog of NCBI NO: 15223041 NR Description: putative RING zinc finger protein; protein id: supported by cDNA: 27464. [Arabidopsis thaliana]
  misc_feature (32)..(175): Homolog of NCBI NO: 15233352 NR Description: RING-H2 finger protein RHA1a -like protein; id: At4g11370.1, supported by cDNA: 21591., supported by cDNA:
LLSLSLSLTHTHKRTYLSKVITMSFFIEDSGLIVTQLLYKMAVLITVLRWILAWILRYRSRSRSTSSSTSACPSISSQAIKESLSVTTFRDAAERSPAMINDTCAVCLGDLEDGDEVRELRNCSHMFHRECIDRWLDYECCGGDENNEGEEDNHRTCPLCRTPLLAANTTSCGDWPTKNEPSWAVERLLYLFGDDLHV

SEQ ID NO: 77218 - protein, 176 aa, Arabidopsis thaliana; identical to SEQ ID NO: 28245
  peptide (1)..(176): Ceres Seq. ID no. 12561926
  misc_feature (82)..(138): Pfam Name: Zinc finger, C3HC4 type (RING finger) Pfam Description: Zinc finger, C3HC4 type (RING finger)
  misc_feature (1)..(176): Homolog of NCBI NO: 18420336 NR Description: putative protein; protein id: At5g20885.1, by cDNA: gi_16209695 [Arabidopsis thaliana] AT5g20880/F22D1_50 [Arabidopsis thaliana]
  misc_feature (1)..(174): Homolog of NCBI NO: 15229284 NR Description: putative protein; protein id: At3g43430.1, by cDNA: 3137. [Arabidopsis thaliana] >gi|11358362|pir||T47385
  misc_feature (10)..(147): Homolog of NCBI NO: 23451086 NR Description: RING-H2 protein [Medicago sativa]
  misc_feature (54)..(143): Homolog of NCBI NO: 15233117 NR Description: RING finger protein; protein id: At3g61460.1, by cDNA: 25801., supported by cDNA: gi_17644156, supported by
  misc_feature (36)..(144): Homolog of NCBI NO: 15238072 NR Description: RING zinc finger protein-like; protein id: supported by cDNA: 207148. [Arabidopsis thaliana]
  misc_feature (41)..(143): Homolog of NCBI NO: 18411282 NR Description: similar to RING finger protein; protein id:
  misc_feature (36)..(144): Homolog of NCBI NO: 21554155 NR Description: RING zinc finger protein-like [Arabidopsis
  misc_feature (42)..(157): Homolog of NCBI NO: 15233350 NR Description: RING-H2 finger protein RHA1b; protein id: supported by cDNA: 37097., supported by cDNA: gi_3790566
  misc_feature (4)..(154): Homolog of NCBI NO: 15223041 NR Description: putative RING zinc finger protein; protein id: supported by cDNA: 27464. [Arabidopsis thaliana]
  misc_feature (10)..(153): Homolog of NCBI NO: 15233352 NR Description: RING-H2 finger protein RHA1a -like protein; id: At4g11370.1, supported by cDNA: 21591., supported by cDNA:

SEQ ID NO: 77219 - protein, 158 aa, Arabidopsis thaliana; identical to SEQ ID NO: 28246
  peptide (1)..(158): Ceres Seq. ID no. 12561927
  misc_feature (64)..(120): Pfam Name: Zinc finger, C3HC4 type (RING finger) Pfam Description: Zinc finger, C3HC4 type (RING finger)
  misc_feature (1)..(158): Homolog of NCBI NO: 18420336 NR Description: putative protein; protein id: At5g20885.1, by cDNA: gi_16209695 [Arabidopsis thaliana] AT5g20880/F22D1_50 [Arabidopsis thaliana]
  misc_feature (1)..(156): Homolog of NCBI NO: 15229284 NR Description: putative protein; protein id: At3g43430.1, by cDNA: 3137. [Arabidopsis thaliana] >gi|11358362|pir||T47385
  misc_feature (1)..(129): Homolog of NCBI NO: 23451086 NR Description: RING-H2 protein [Medicago sativa]
  misc_feature (36)..(125): Homolog of NCBI NO: 15233117 NR Description: RING finger protein; protein id: At3g61460.1, by cDNA: 25801., supported by cDNA: gi_17644156, supported by
  misc_feature (18)..(126): Homolog of NCBI NO: 15238072 NR Description: RING zinc finger protein-like; protein id: supported by cDNA: 207148. [Arabidopsis thaliana]
  misc_feature (23)..(125): Homolog of NCBI NO: 18411282 NR Description: similar to RING finger protein; protein id:
  misc_feature (18)..(126): Homolog of NCBI NO: 21554155 NR Description: RING zinc finger protein-like [Arabidopsis
  misc_feature (24)..(139): Homolog of NCBI NO: 15233350 NR Description: RING-H2 finger protein RHA1b; protein id: supported by cDNA: 37097., supported by cDNA: gi_3790566
  misc_feature (1)..(136): Homolog of NCBI NO: 15223041 NR Description: putative RING zinc finger protein; protein id: supported by cDNA: 27464. [Arabidopsis thaliana]
  misc_feature (1)..(135): Homolog of NCBI NO: 15233352 NR Description: RING-H2 finger protein RHA1a -like protein; id: At4g11370.1, supported by cDNA: 21591., supported by cDNA:

SEQ ID NO: 77220 - DNA, 3525 bp, Arabidopsis thaliana
  misc_feature (1)..(3525): Ceres Seq. ID no. 12562002
  misc_feature: MA Experiment ID: 108464 Result: Up-regulated in Transcription
  misc_feature: MA Experiment 108464 PARAMETER Experiment Name: At_Germinating_Seeds_cDNA_P Parameter: Age (day) Value: 4 vs. 0
  misc_feature: MA Experiment 108464 PARAMETER Experiment Name: At_Germinating_Seeds_cDNA_P Parameter: Tissue Value: Germinating Seeds
  misc_feature: MA Experiment ID: 20000437 Result: Up-regulated in Transcription
  misc_feature: MA Experiment 20000437 PARAMETER Experiment Name: At_Drought_P Parameter: Age (day) Value: 8
  misc_feature: MA Experiment 20000437 PARAMETER Experiment Name: At_Drought_P Parameter: Organism Value: A. thaliana
  misc_feature: MA Experiment 20000437 PARAMETER Experiment Name: At_Drought_P Parameter: Plant Line Value: WS
  misc_feature: MA Experiment 20000437 PARAMETER Experiment Name: At_Drought_P Parameter: Timepoint (hr) Value: 24
  misc_feature: MA Experiment 20000437 PARAMETER Experiment Name: At_Drought_P Parameter: Tissue Value: Whole Plant
  misc_feature: MA Experiment 20000437 PARAMETER Experiment Name: At_Drought_P Parameter: Treatment Value: Drought vs. No Drought
gtcgtcgtcgtctctctctctctctcttccccgatccaatcttctcctttgtctctcgacacaaacaaaggaaacagctgagaaaactattatcatcatcatcatctctctctatatcataaacccttctttttctctctatcctcttcttcttcttcctcatatatacttgtcttcttttttcaaattttaccaattcgtaatctcatcttctgtttcatctgcgaatctgagcttccttcttcgtttctttggagcttctggactcgtgatcgggtctctctacttgcttacctcttttctctttctattagtctctcgcatttgttctcgattcgattgcagcagaagaaacaatcactactgtttgttttcgtcggttctggaagatttttctggggctgcttgattgtttttgcaagtccatggtttaaatctcgggagcaagagattcgtgttttgcttcaaacccaacgatacgtggtcaaagttttagagtatctttgattgaattgcgtctgaattgaattcgacattttatttcgattttgaatattggtgaatgctccggcgagattattctctcagcccatcggcttgggcttagatctgtaaatcaaaaggaaccaataattgagaaatcagctatgacctcatcgccatcagtggagaatggcggctcaggctcctctggatcatctgctcttttaggctgtatgcaacaattcaagctcttcgagactcaagcgaatttctatatgattggttggaacggtagtggagtatatagaatacttaagatagaccggctcgaagcatctgagcttaatctcagagaggattcgactgcgtataccaaaaaagaatgctacgagttgcttaaacggatacacgaaggaaacaaggcgactggtggactgaaacttgtcactgtttgttatggaatcattgggttcattaagtttttgggaccatattacatgctgcttataactgaaagaagagagataggtgaaatttgtggtcacattgtttacgaagtgtcaaagagtgatatgattgcattgcaacattctagcgtgctttgcaacactgcaaatttaagagacgagaacaggtacaagagactcctgtgtatggtggaccttacgaaagacttctttttcagctattcttacaatataatgcgaagtttccagaagaatatatgcgaccatgagagtggaggtactctctataagaaaatgtttgtgtggaacgaattcttgactcggggaactcgacatcaccttcggaataccctgtggactgtagcattggtgtatgggttttttaagcagacaatactttccgaagctggacggaatttcaaactcactcttattgctaggcgttcccgccataatgctggaaccaggtacttgaaacgaggaataaacgaaagtggcaatgttgctaatgatgtggaaacagaacagatagtgtctgaggatgttccagtagaccgtcccatgcaaataagttctgttgtgcagaatcgtggctcaatccctctattctggtcacaggagacctcacggatgaaagttaagcctgatatagtattgtcaaaaagggacctgaactatgaggcaactagagttcactttgaaaatcttgtggagcgttatggagtccccatcattattctgaacttgatcaagaccaacgagaggaaacccagggagtcgattctccgggcagagtttgctaatgcaattgactttataaacaaagatctgccggaagaaaatcggcttagattcctccactgggacttgcacaaacattttcacagcaaaacagaaaatgtattggcacttcttggaaaagtagctgcctgtgctttgatgctaacaggtttcttttattatcaacttacaccagcaatgaagcttgagggttatatgagcttgtcttcgtctgatgccgacacgtctccacataatagttctgatgatgatagtagggattatgactcattagagaagaattgccgcccaagtaagaatgttgcaaatggtgattatgatgtcaagcctagcaggctccagagtggagtgctgcggaccaactgcatagattgccttgatcgtacaaatgttgcccaatatgcatatggttgggctgctctagggcaacagcttcatgctttaggaattagagatgctccaacaatagaacttgatgatcctttgtctagtactttaatggggttatacgagagaatgggagacacactagcttatcaatatggtggatctgcagcccacaataaggtttttagtgaaaggcgaggccagtggagagcagcaacccagtcacaagagttcttgaggactctgcaacgttattataataacgcatatatggatgcggataaacaagatgccattaatatatttcttggtactttccggcctgaacaagggagccaggcggtttgggagttgcgttcagattcccactctaatggacgaagtggagagataagcatgggggaagatgaaaagtttcttgtaaagaggtgcttatcagatgggaatattctccatgaaagtcacactccgatgtctgcaatgagtagaaagaatgaaagcatatcacatagaggttttgtgtcgtcacaccaagtgactcgtactcatataatttcagaatcatcaccagatatgccagctgccggtgatgtaacattatcgaggtgtactccgtcaatgcctagcacacatttttttggagatgtccaaaaagttcaacataatggtagtagctccatttacttgtccgagcaagaagatatgtctagtgtctcaaatttcgttgatattgagtggctttcgtcgtcagaaaatctatgtgagaacgatcacttgtccaggccgtcagcgcttacaatatattcaaccgcagagacgtcttcatcagagaatatcatcactgaagtaaaacaattgacgccagctatgagagagagtggatcaagcagcaggaagggaaaagaaccagtggaaaccgaactgtctgtacacacaaagattcgcgatgatttcccagatagcttcaaacaatgggtagcatacggggaagcactctgccattgaagatctctcaactttccatttccaacaaagaacatactttgctttcaccaaacttaaaagtcttctgaacatttgggtataacggtgcaaacatggagaagcgactggtggaaagatcctcagtaccatgtatatgaggcttcacggtgacgaccgaacggtcaaaagagatagaactattaagaggagcaaatactaaataagctgagaagtttgagtttgcagtcttgcagagaaaacgaaaatttcatctttatggagagaagaaattaaacttgtgataatctgagacttttgttagggtctttttttggggggtttgaagtctgttgtaaatatctgtatcatttgttaatccatctcgtaaggtctttactattcg

SEQ ID NO: 77221 - protein, 831 aa, Arabidopsis thaliana
  peptide (1)..(831): Ceres Seq. ID no. 12562003
  misc_feature (97)..(403): Pfam Name: SacI homology domain Pfam Description: SacI homology domain
  misc_feature (24)..(600): Homolog of NCBI NO: 20453210 NR Description: AT3g43220/F7K15_70 [Arabidopsis thaliana]
  misc_feature (24)..(806): Homolog of NCBI NO: 18400310 NR Description: Expressed protein; protein id: At3g14205.1, by cDNA: gi_15215805, supported by cDNA: gi_20334797 [Arabidopsis >gi|15215806|gb|AAK91448.1| At3g14201 [Arabidopsis thaliana]
  misc_feature (24)..(823): Homolog of NCBI NO: 9294649 NR Description: gb|AAC25523.1~gene_id:MAG2.20~similar to unknown
  misc_feature (24)..(453): Homolog of NCBI NO: 15217295 NR Description: Putative phosphoinositide phosphatase [Oryza
  misc_feature (478)..(762): Homolog of NCBI NO: 15217295 NR Description: Putative phosphoinositide phosphatase [Oryza
  misc_feature (24)..(628): Homolog of NCBI NO: 22329733 NR Description: unknown protein; protein id: At1g22620.1,
  misc_feature (21)..(669): Homolog of NCBI NO: 22329625 NR Description: unknown protein; protein id: At1g17340.1, by cDNA: gi_20147340 [Arabidopsis thaliana] At1g17340/F28G4_6 [Arabidopsis thaliana]
  misc_feature (24)..(458): Homolog of NCBI NO: 6587828 NR Description: Hypothetical protein [Arabidopsis thaliana]
  misc_feature (436)..(556): Homolog of NCBI NO: 6587828 NR Description: Hypothetical protein [Arabidopsis thaliana]
  misc_feature (126)..(669): Homolog of NCBI NO: 25513722 NR Description: F28G4.21 protein - Arabidopsis thaliana
MTSSPSVENGGSGSSGSSALLGCMQQFKLFETQANFYMIGWNGSGVYRILKIDRLEASELNLREDSTAYTKKECYELLKRIHEGNKATGGLKLVTVCYGIIGFIKFLGPYYMLLITERREIGEICGHIVYEVSKSDMIALQHSSVLCNTANLRDENRYKRLLCMVDLTKDFFFSYSYNIMRSFQKNICDHESGGTLYKKMFVWNEFLTRGTRHHLRNTLWTVALVYGFFKQTILSEAGRNFKLTLIARRSRHNAGTRYLKRGINESGNVANDVETEQIVSEDVPVDRPMQISSVVQNRGSIPLFWSQETSRMKVKPDIVLSKRDLNYEATRVHFENLVERYGVPIIILNLIKTNERKPRESILRAEFANAIDFINKDLPEENRLRFLHWDLHKHFHSKTENVLALLGKVAACALMLTGFFYYQLTPAMKLEGYMSLSSSDADTSPHNSSDDDSRDYDSLEKNCRPSKNVANGDYDVKPSRLQSGVLRTNCIDCLDRTNVAQYAYGWAALGQQLHALGIRDAPTIELDDPLSSTLMGLYERMGDTLAYQYGGSAAHNKVFSERRGQWRAATQSQEFLRTLQRYYNNAYMDADKQDAINIFLGTFRPEQGSQAVWELRSDSHSNGRSGEISMGEDEKFLVKRCLSDGNILHESHTPMSAMSRKNESISHRGFVSSHQVTRTHIISESSPDMPAAGDVTLSRCTPSMPSTHFFGDVQKVQHNGSSSIYLSEQEDMSSVSNFVDIEWLSSSENLCENDHLSRPSALTIYSTAETSSSENIITEVKQLTPAMRESGSSSRKGKEPVETELSVHTKIRDDFPDSFKQWVAYGEALCH

SEQ ID NO: 77222 - protein, 808 aa, Arabidopsis thaliana
  peptide (1)..(808): Ceres Seq. ID no. 12562004
  misc_feature (74)..(380): Pfam Name: SacI homology domain Pfam Description: SacI homology domain
  misc_feature (1)..(577): Homolog of NCBI NO: 20453210 NR Description: AT3g43220/F7K15_70 [Arabidopsis thaliana]
  misc_feature (1)..(783): Homolog of NCBI NO: 18400310 NR Description: Expressed protein; protein id: At3g14205.1, by cDNA: gi_15215805, supported by cDNA: gi_20334797 [Arabidopsis >gi|15215806|gb|AAK91448.1| At3g14201 [Arabidopsis thaliana]
  misc_feature (1)..(800): Homolog of NCBI NO: 9294649 NR Description: gb|AAC25523.1~gene_id:MAG2.20~similar to unknown
  misc_feature (1)..(430): Homolog of NCBI NO: 15217295 NR Description: Putative phosphoinositide phosphatase [Oryza
  misc_feature (455)..(739): Homolog of NCBI NO: 15217295 NR Description: Putative phosphoinositide phosphatase [Oryza
  misc_feature (1)..(605): Homolog of NCBI NO: 22329733 NR Description: unknown protein; protein id: At1g22620.1,
  misc_feature (1)..(646): Homolog of NCBI NO: 22329625 NR Description: unknown protein; protein id: At1g17340.1, by cDNA: gi_20147340 [Arabidopsis thaliana] At1g17340/F28G4_6 [Arabidopsis thaliana]
  misc_feature (1)..(435): Homolog of NCBI NO: 6587828 NR Description: Hypothetical protein [Arabidopsis thaliana]
  misc_feature (413)..(533): Homolog of NCBI NO: 6587828 NR Description: Hypothetical protein [Arabidopsis thaliana]
  misc_feature (103)..(646): Homolog of NCBI NO: 25513722 NR Description: F28G4.21 protein - Arabidopsis thaliana
MQQFKLFETQANFYMIGWNGSGVYRILKIDRLEASELNLREDSTAYTKKECYELLKRIHEGNKATGGLKLVTVCYGIIGFIKFLGPYYMLLITERREIGEICGHIVYEVSKSDMIALQHSSVLCNTANLRDENRYKRLLCMVDLTKDFFFSYSYNIMRSFQKNICDHESGGTLYKKMFVWNEFLTRGTRHHLRNTLWTVALVYGFFKQTILSEAGRNFKLTLIARRSRHNAGTRYLKRGINESGNVANDVETEQIVSEDVPVDRPMQISSVVQNRGSIPLFWSQETSRMKVKPDIVLSKRDLNYEATRVHFENLVERYGVPIIILNLIKTNERKPRESILRAEFANAIDFINKDLPEENRLRFLHWDLHKHFHSKTENVLALLGKVAACALMLTGFFYYQLTPAMKLEGYMSLSSSDADTSPHNSSDDDSRDYDSLEKNCRPSKNVANGDYDVKPSRLQSGVLRTNCIDCLDRTNVAQYAYGWAALGQQLHALGIRDAPTIELDDPLSSTLMGLYERMGDTLAYQYGGSAAHNKVFSERRGQWRAATQSQEFLRTLQRYYNNAYMDADKQDAINIFLGTFRPEQGSQAVWELRSDSHSNGRSGEISMGEDEKFLVKRCLSDGNILHESHTPMSAMSRKNESISHRGFVSSHQVTRTHIISESSPDMPAAGDVTLSRCTPSMPSTHFFGDVQKVQHNGSSSIYLSEQEDMSSVSNFVDIEWLSSSENLCENDHLSRPSALTIYSTAETSSSENIITEVKQLTPAMRESGSSSRKGKEPVETELSVHTKIRDDFPDSFKQWVAYGEALCH

SEQ ID NO: 77223 - protein, 794 aa, Arabidopsis thaliana
  peptide (1)..(794): Ceres Seq. ID no. 12562005
  misc_feature (60)..(366): Pfam Name: SacI homology domain Pfam Description: SacI homology domain
  misc_feature (1)..(563): Homolog of NCBI NO: 20453210 NR Description: AT3g43220/F7K15_70 [Arabidopsis thaliana]
  misc_feature (1)..(769): Homolog of NCBI NO: 18400310 NR Description: Expressed protein; protein id: At3g14205.1, by cDNA: gi_15215805, supported by cDNA: gi_20334797 [Arabidopsis >gi|15215806|gb|AAK91448.1| At3g14201 [Arabidopsis thaliana]
  misc_feature (1)..(786): Homolog of NCBI NO: 9294649 NR Description: gb|AAC25523.1~gene_id:MAG2.20~similar to unknown
  misc_feature (1)..(416): Homolog of NCBI NO: 15217295 NR Description: Putative phosphoinositide phosphatase [Oryza
  misc_feature (441)..(725): Homolog of NCBI NO: 15217295 NR Description: Putative phosphoinositide phosphatase [Oryza
  misc_feature (1)..(591): Homolog of NCBI NO: 22329733 NR Description: unknown protein; protein id: At1g22620.1,
  misc_feature (1)..(632): Homolog of NCBI NO: 22329625 NR Description: unknown protein; protein id: At1g17340.1, by cDNA: gi_20147340 [Arabidopsis thaliana] At1g17340/F28G4_6 [Arabidopsis thaliana]
  misc_feature (1)..(421): Homolog of NCBI NO: 6587828 NR Description: Hypothetical protein [Arabidopsis thaliana]
  misc_feature (399)..(519): Homolog of NCBI NO: 6587828 NR Description: Hypothetical protein [Arabidopsis thaliana]
  misc_feature (89)..(632): Homolog of NCBI NO: 25513722 NR Description: F28G4.21 protein - Arabidopsis thaliana
MIGWNGSGVYRILKIDRLEASELNLREDSTAYTKKECYELLKRIHEGNKATGGLKLVTVCYGIIGFIKFLGPYYMLLITERREIGEICGHIVYEVSKSDMIALQHSSVLCNTANLRDENRYKRLLCMVDLTKDFFFSYSYNIMRSFQKNICDHESGGTLYKKMFVWNEFLTRGTRHHLRNTLWTVALVYGFFKQTILSEAGRNFKLTLIARRSRHNAGTRYLKRGINESGNVANDVETEQIVSEDVPVDRPMQISSVVQNRGSIPLFWSQETSRMKVKPDIVLSKRDLNYEATRVHFENLVERYGVPIIILNLIKTNERKPRESILRAEFANAIDFINKDLPEENRLRFLHWDLHKHFHSKTENVLALLGKVAACALMLTGFFYYQLTPAMKLEGYMSLSSSDADTSPHNSSDDDSRDYDSLEKNCRPSKNVANGDYDVKPSRLQSGVLRTNCIDCLDRTNVAQYAYGWAALGQQLHALGIRDAPTIELDDPLSSTLMGLYERMGDTLAYQYGGSAAHNKVFSERRGQWRAATQSQEFLRTLQRYYNNAYMDADKQDAINIFLGTFRPEQGSQAVWELRSDSHSNGRSGEISMGEDEKFLVKRCLSDGNILHESHTPMSAMSRKNESISHRGFVSSHQVTRTHIISESSPDMPAAGDVTLSRCTPSMPSTHFFGDVQKVQHNGSSSIYLSEQEDMSSVSNFVDIEWLSSSENLCENDHLSRPSALTIYSTAETSSSENIITEVKQLTPAMRESGSSSRKGKEPVETELSVHTKIRDDFPDSFKQWVAYGEALCH

SEQ ID NO: 77224 - DNA, 1157 bp, Arabidopsis thaliana
  misc_feature (1)..(1157): Ceres Seq. ID no. 12562035
  misc_feature: MA Experiment ID: 20000185 Result: Down-regulated in Transcription
  misc_feature: MA Experiment 20000185 PARAMETER Experiment Name: At_Roots__P Parameter: Age (day) Value: 7 vs. 21
  misc_feature: MA Experiment 20000185 PARAMETER Experiment Name: At_Roots__P Parameter: Organism Value: A. thaliana
  misc_feature: MA Experiment 20000185 PARAMETER Experiment Name: At_Roots__P Parameter: Tissue Value: Roots vs. Whole Plant
  misc_feature: MA Experiment ID: 20000213 Result: Up-regulated in Transcription
  misc_feature: MA Experiment 20000213 PARAMETER Experiment Name: At_4deg_Cold_P Parameter: Timepoint (hr) Value: 2
  misc_feature: MA Experiment ID: 20000234 Result: Down-regulated in Transcription
  misc_feature: MA Experiment 20000234 PARAMETER Experiment Name: At_Siliques_P Parameter: Age (day) Value: 21
  misc_feature: MA Experiment 20000234 PARAMETER Experiment Name: At_Siliques_P Parameter: Organism Value: A. thaliana
  misc_feature: MA Experiment 20000234 PARAMETER Experiment Name: At_Siliques_P Parameter: Plant Line Value: WS
  misc_feature: MA Experiment 20000234 PARAMETER Experiment Name: At_Siliques_P Parameter: Tissue Value: Less Than 5mm Siliques vs. Whole Plant
  misc_feature: MA Experiment ID: 20000438 Result: Up-regulated in Transcription
  misc_feature: MA Experiment 20000438 PARAMETER Experiment Name: At_Shoots__P Parameter: Age (day) Value: 14
  misc_feature: MA Experiment 20000438 PARAMETER Experiment Name: At_Shoots__P Parameter: Tissue Value: Shoots vs. Whole Plant
  misc_feature: MA Experiment ID: 20000439 Result: Down-regulated in Transcription
  misc_feature: MA Experiment 20000439 PARAMETER Experiment Name: At_Roots__P Parameter: Age (day) Value: 14 vs. 21
  misc_feature: MA Experiment 20000439 PARAMETER Experiment Name: At_Roots__P Parameter: Organism Value: A. thaliana
  misc_feature: MA Experiment 20000439 PARAMETER Experiment Name: At_Roots__P Parameter: Tissue Value: Roots vs. Whole Plant
  misc_feature: MA Experiment ID: 20000441 Result: Up-regulated in Transcription
  misc_feature: MA Experiment 20000441 PARAMETER Experiment Name: At_1uM_BR-BRZ__P Parameter: Tissue Value: Shoot Apices
  misc_feature: MA Experiment 20000441 PARAMETER Experiment Name: At_1uM_BR-BRZ__P Parameter: Treatment Value: 1uM BR vs. No Treatment
  misc_feature: MA Experiment ID: 20000443 Result: Up-regulated in Transcription
  misc_feature: MA Experiment 20000443 PARAMETER Experiment Name: At_1uM_BR-BRZ__P Parameter: Tissue Value: Shoot Apices
  misc_feature: MA Experiment 20000443 PARAMETER Experiment Name: At_1uM_BR-BRZ__P Parameter: Treatment Value: 1uM BRZ vs. No Treatment
  misc_feature: MA Experiment ID: 20000445 Result: Down-regulated in Transcription
  misc_feature: MA Experiment 20000445 PARAMETER Experiment Name: At_100uM_NAA__P Parameter: Age (day) Value: 14
  misc_feature: MA Experiment 20000445 PARAMETER Experiment Name: At_100uM_NAA__P Parameter: Organism Value: A. thaliana
  misc_feature: MA Experiment 20000445 PARAMETER Experiment Name: At_100uM_NAA__P Parameter: Plant Line Value: WS
  misc_feature: MA Experiment 20000445 PARAMETER Experiment Name: At_100uM_NAA__P Parameter: Timepoint (hr) Value: 6
  misc_feature: MA Experiment 20000445 PARAMETER Experiment Name: At_100uM_NAA__P Parameter: Tissue Value: Aerial
  misc_feature: MA Experiment 20000445 PARAMETER Experiment Name: At_100uM_NAA__P Parameter: Treatment Value: 100uM NAA vs. No Treatment
  misc_feature: MA Experiment ID: 20000527 Result: Up-regulated in Transcription
  misc_feature: MA Experiment 20000527 PARAMETER Experiment Name: At_10percent_PEG_P Parameter: Age (day) Value: 20
  misc_feature: MA Experiment 20000527 PARAMETER Experiment Name: At_10percent_PEG_P Parameter: Organism Value: A. thaliana
  misc_feature: MA Experiment 20000527 PARAMETER Experiment Name: At_10percent_PEG_P Parameter: Plant Line Value: WS
  misc_feature: MA Experiment 20000527 PARAMETER Experiment Name: At_10percent_PEG_P Parameter: Timepoint (day) Value: 20
  misc_feature: MA Experiment 20000527 PARAMETER Experiment Name: At_10percent_PEG_P Parameter: Tissue Value: Whole Plant
  misc_feature: MA Experiment 20000527 PARAMETER Experiment Name: At_10percent_PEG_P Parameter: Treatment Value: 10percent PEG vs. No Treatment
  misc_feature: MA Experiment ID: 20000794 Result: Up-regulated in Transcription
  misc_feature: MA Experiment 20000794 PARAMETER Experiment Name: At_Petals_P Parameter: Age (day) Value: 23-25 days
  misc_feature: MA Experiment 20000794 PARAMETER Experiment Name: At_Petals_P Parameter: Plant Line Value: WS
  misc_feature: MA Experiment 20000794 PARAMETER Experiment Name: At_Petals_P Parameter: Tissue Value: Petals vs. Whole plant
  misc_feature: MA Experiment ID: 20001247 Result: Down-regulated in Transcription
  misc_feature: MA Experiment 20001247 PARAMETER Experiment Name: At_Far-red-induction_P Parameter: Age (day) Value: 7
  misc_feature: MA Experiment 20001247 PARAMETER Experiment Name: At_Far-red-induction_P Parameter: Light Value: Far-red vs. White
  misc_feature: MA Experiment 20001247 PARAMETER Experiment Name: At_Far-red-induction_P Parameter: Organism Value: A. thaliana
  misc_feature: MA Experiment 20001247 PARAMETER Experiment Name: At_Far-red-induction_P Parameter: Plant Line Value: Columbia
  misc_feature: MA Experiment 20001247 PARAMETER Experiment Name: At_Far-red-induction_P Parameter: Timepoint (hr) Value: 1
  misc_feature: MA Experiment 20001247 PARAMETER Experiment Name: At_Far-red-induction_P Parameter: Tissue Value: Whole Plant
  misc_feature: MA Experiment ID: 20001248 Result: Down-regulated in Transcription
  misc_feature: MA Experiment 20001248 PARAMETER Experiment Name: At_Far-red-induction_P Parameter: Age (day) Value: 7
  misc_feature: MA Experiment 20001248 PARAMETER Experiment Name: At_Far-red-induction_P Parameter: Light Value: Far-red vs. White
  misc_feature: MA Experiment 20001248 PARAMETER Experiment Name: At_Far-red-induction_P Parameter: Organism Value: A. thaliana
  misc_feature: MA Experiment 20001248 PARAMETER Experiment Name: At_Far-red-induction_P Parameter: Plant Line Value: Columbia
  misc_feature: MA Experiment 20001248 PARAMETER Experiment Name: At_Far-red-induction_P Parameter: Timepoint (hr) Value: 4
  misc_feature: MA Experiment 20001248 PARAMETER Experiment Name: At_Far-red-induction_P Parameter: Tissue Value: Whole Plant
  misc_feature: MA Experiment ID: 20001450 Result: Down-regulated in Transcription
  misc_feature: MA Experiment 20001450 PARAMETER Experiment Name: At_Far-red-induction_P Parameter: Age (day) Value: 7
  misc_feature: MA Experiment 20001450 PARAMETER Experiment Name: At_Far-red-induction_P Parameter: Light Value: Far-red vs. White
  misc_feature: MA Experiment 20001450 PARAMETER Experiment Name: At_Far-red-induction_P Parameter: Organism Value: A. thaliana
  misc_feature: MA Experiment 20001450 PARAMETER Experiment Name: At_Far-red-induction_P Parameter: Plant Line Value: Columbia
  misc_feature: MA Experiment 20001450 PARAMETER Experiment Name: At_Far-red-induction_P Parameter: Timepoint (hr) Value: 8
  misc_feature: MA Experiment 20001450 PARAMETER Experiment Name: At_Far-red-induction_P Parameter: Tissue Value: Whole Plant
  misc_feature: MA Experiment ID: 20001451 Result: Down-regulated in Transcription
  misc_feature: MA Experiment 20001451 PARAMETER Experiment Name: At_Far-red-induction_P Parameter: Age (day) Value: 7
  misc_feature: MA Experiment 20001451 PARAMETER Experiment Name: At_Far-red-induction_P Parameter: Light Value: Far-red vs. White
  misc_feature: MA Experiment 20001451 PARAMETER Experiment Name: At_Far-red-induction_P Parameter: Organism Value: A. thaliana
  misc_feature: MA Experiment 20001451 PARAMETER Experiment Name: At_Far-red-induction_P Parameter: Plant Line Value: Columbia
  misc_feature: MA Experiment 20001451 PARAMETER Experiment Name: At_Far-red-induction_P Parameter: Timepoint (hr) Value: 24
  misc_feature: MA Experiment 20001451 PARAMETER Experiment Name: At_Far-red-induction_P Parameter: Tissue Value: Whole Plant
  misc_feature: MA Experiment ID: 20001557 Result: Down-regulated in Transcription
  misc_feature: MA Experiment 20001557 PARAMETER Experiment Name: At_Drought_Soil_Dry_P Parameter: Age (day) Value: 27
  misc_feature: MA Experiment 20001557 PARAMETER Experiment Name: At_Drought_Soil_Dry_P Parameter: Organism Value: A. thaliana
  misc_feature: MA Experiment 20001557 PARAMETER Experiment Name: At_Drought_Soil_Dry_P Parameter: Plant Line Value: WS
  misc_feature: MA Experiment 20001557 PARAMETER Experiment Name: At_Drought_Soil_Dry_P Parameter: Post Timepoint (hr) Value: 3
  misc_feature: MA Experiment 20001557 PARAMETER Experiment Name: At_Drought_Soil_Dry_P Parameter: Post-Treatment Value: Re-Water vs. No Drought
  misc_feature: MA Experiment 20001557 PARAMETER Experiment Name: At_Drought_Soil_Dry_P Parameter: Timepoint (day) Value: 13
  misc_feature: MA Experiment 20001557 PARAMETER Experiment Name: At_Drought_Soil_Dry_P Parameter: Treatment Value: Drought vs. No Drought
  misc_feature: MA Experiment ID: 20001558 Result: Down-regulated in Transcription
  misc_feature: MA Experiment 20001558 PARAMETER Experiment Name: At_Drought_Soil_Dry_P Parameter: Age (day) Value: 27
  misc_feature: MA Experiment 20001558 PARAMETER Experiment Name: At_Drought_Soil_Dry_P Parameter: Organism Value: A. thaliana
  misc_feature: MA Experiment 20001558 PARAMETER Experiment Name: At_Drought_Soil_Dry_P Parameter: Plant Line Value: WS
  misc_feature: MA Experiment 20001558 PARAMETER Experiment Name: At_Drought_Soil_Dry_P Parameter: Post Timepoint (hr) Value: 6
  misc_feature: MA Experiment 20001558 PARAMETER Experiment Name: At_Drought_Soil_Dry_P Parameter: Post-Treatment Value: Re-Water vs. No Drought
  misc_feature: MA Experiment 20001558 PARAMETER Experiment Name: At_Drought_Soil_Dry_P Parameter: Timepoint (day) Value: 13
  misc_feature: MA Experiment 20001558 PARAMETER Experiment Name: At_Drought_Soil_Dry_P Parameter: Treatment Value: Drought vs. No Drought
gtatcaggtgctctgctccacttacctttaatcttcaatcaacggtactctcaggaacaggaatcagatcgagcaatgctcaggttaatcgttaattaccctctgattcccaagatatcccaccgggtttgtagtaacagtagtagtaagctcgggagttactatgattcttcgtcgatcataaaatatggcggaatcagcgatgttgttggtaagaagcaggagctttttctaagtgtttcggtgaaagcagtggaagacaaaggtaacaatggaggtggaagcatgagtttctcgggtcaaagctgggatcctagttccgagattgaagttccttcagaccaaagacccgtgaatgagtattcgtctctaaaggaaggaatgttgtattcatggggagaattgggtccaagcgaattctttattcgtctaggtggtctttggttggtcactttcactgttcttggagttcctgttgcagctgctagctttaatccttccagagagcctttgagatttattctagctgcagggactggaactttatttctcgtttctttgattgtcttgagaatttatctggggtggagctatgttggagatagactactttctgcagttataccttacgaagagagtggatggtatgatggacaaatgtgggtcaaaccacctgaggtgttggctcgcgacaggttgttgggttcttacaaggtgaagccagtgatcaagatgctcaaacaaacattaatcggaacaggagctttactcgtttcagcattcgtgctattcgttttcgcaacaccagtcgaggatttctttaaaaccactctaggatctacagaaaaccaaccagaagtttccatttcaagaaccagcaacaagttcaatataagaaaagaacaattgcttcgactacccgtagatgttgtgactgacgatgatctggcagcagccgcggctgaggctgcggatggaagacctgtctattgcagagaccggtactaccgtgcattagcaggtggtcaatactgcaaatgggaagatcttgttaaatagttgtcacactaatagaataccaacacacatactacagtatgtaatttttgcttaaaatggctttaaaagcctcatgaattatccactcattcatcact

SEQ ID NO: 77225 - protein, 352 aa, Arabidopsis thaliana
  peptide (1)..(352): Ceres Seq. ID no. 12562036
  misc_feature (26)..(352): Homolog of NCBI NO: 15240715 NR Description: putative protein; protein id: At5g67370.1, by cDNA: gi_13430429, supported by cDNA: gi_15293188 [Arabidopsis >gi|9758436|dbj|BAB09022.1| gb|AAC18972.1~gene_id:K8K14.9~similar
  misc_feature (94)..(351): Homolog of NCBI NO: 40736997 NR Description: expressed protein [Oryza sativa (japonica
  misc_feature (105)..(254): Homolog of NCBI NO: 3184557 NR Description: unknown [Synechococcus sp. PCC 7002]
  misc_feature (111)..(266): Homolog of NCBI NO: 17231662 NR Description: hypothetical protein [Nostoc sp. PCC 7120]
  misc_feature (109)..(250): Homolog of NCBI NO: 37520418 NR Description: hypothetical protein [Gloeobacter violaceus]
  misc_feature (106)..(249): Homolog of NCBI NO: 23040962 NR Description: hypothetical protein [Trichodesmium erythraeum
  misc_feature (105)..(276): Homolog of NCBI NO: 15239796 NR Description: putative protein; protein id: At5g11840.1
  misc_feature (111)..(251): Homolog of NCBI NO: 22298607 NR Description: ORF_ID:tll1063~hypothetical protein
  misc_feature (111)..(266): Homolog of NCBI NO: 16331827 NR Description: hypothetical protein [Synechocystis sp. PCC 6803]
  misc_feature (107)..(264): Homolog of NCBI NO: 23123845 NR Description: hypothetical protein [Nostoc punctiforme]
VSGALLHLPLIFNQRYSQEQESDRAMLRLIVNYPLIPKISHRVCSNSSSKLGSYYDSSSIIKYGGISDVVGKKQELFLSVSVKAVEDKGNNGGGSMSFSGQSWDPSSEIEVPSDQRPVNEYSSLKEGMLYSWGELGPSEFFIRLGGLWLVTFTVLGVPVAAASFNPSREPLRFILAAGTGTLFLVSLIVLRIYLGWSYVGDRLLSAVIPYEESGWYDGQMWVKPPEVLARDRLLGSYKVKPVIKMLKQTLIGTGALLVSAFVLFVFATPVEDFFKTTLGSTENQPEVSISRTSNKFNIRKEQLLRLPVDVVTDDDLAAAAAEAADGRPVYCRDRYYRALAGGQYCKWEDLVK

SEQ ID NO: 77226 - protein, 327 aa, Arabidopsis thaliana
  peptide (1)..(327): Ceres Seq. ID no. 12562037
  misc_feature (1)..(327): Homolog of NCBI NO: 15240715 NR Description: putative protein; protein id: At5g67370.1, by cDNA: gi_13430429, supported by cDNA: gi_15293188 [Arabidopsis >gi|9758436|dbj|BAB09022.1| gb|AAC18972.1~gene_id:K8K14.9~similar
  misc_feature (69)..(326): Homolog of NCBI NO: 40736997 NR Description: expressed protein [Oryza sativa (japonica
  misc_feature (80)..(229): Homolog of NCBI NO: 3184557 NR Description: unknown [Synechococcus sp. PCC 7002]
  misc_feature (86)..(241): Homolog of NCBI NO: 17231662 NR Description: hypothetical protein [Nostoc sp. PCC 7120]
  misc_feature (84)..(225): Homolog of NCBI NO: 37520418 NR Description: hypothetical protein [Gloeobacter violaceus]
  misc_feature (81)..(224): Homolog of NCBI NO: 23040962 NR Description: hypothetical protein [Trichodesmium erythraeum
  misc_feature (80)..(251): Homolog of NCBI NO: 15239796 NR Description: putative protein; protein id: At5g11840.1
  misc_feature (86)..(226): Homolog of NCBI NO: 22298607 NR Description: ORF_ID:tll1063~hypothetical protein
  misc_feature (86)..(241): Homolog of NCBI NO: 16331827 NR Description: hypothetical protein [Synechocystis sp. PCC 6803]
  misc_feature (82)..(239): Homolog of NCBI NO: 23123845 NR Description: hypothetical protein [Nostoc punctiforme]
MLRLIVNYPLIPKISHRVCSNSSSKLGSYYDSSSIIKYGGISDVVGKKQELFLSVSVKAVEDKGNNGGGSMSFSGQSWDPSSEIEVPSDQRPVNEYSSLKEGMLYSWGELGPSEFFIRLGGLWLVTFTVLGVPVAAASFNPSREPLRFILAAGTGTLFLVSLIVLRIYLGWSYVGDRLLSAVIPYEESGWYDGQMWVKPPEVLARDRLLGSYKVKPVIKMLKQTLIGTGALLVSAFVLFVFATPVEDFFKTTLGSTENQPEVSISRTSNKFNIRKEQLLRLPVDVVTDDDLAAAAAEAADGRPVYCRDRYYRALAGGQYCKWEDLVK

SEQ ID NO: 77227 - protein, 257 aa, Arabidopsis thaliana
  peptide (1)..(257): Ceres Seq. ID no. 12562038
  misc_feature (1)..(257): Homolog of NCBI NO: 15240715 NR Description: putative protein; protein id: At5g67370.1, by cDNA: gi_13430429, supported by cDNA: gi_15293188 [Arabidopsis >gi|9758436|dbj|BAB09022.1| gb|AAC18972.1~gene_id:K8K14.9~similar
  misc_feature (1)..(256): Homolog of NCBI NO: 40736997 NR Description: expressed protein [Oryza sativa (japonica
  misc_feature (10)..(159): Homolog of NCBI NO: 3184557 NR Description: unknown [Synechococcus sp. PCC 7002]
  misc_feature (16)..(171): Homolog of NCBI NO: 17231662 NR Description: hypothetical protein [Nostoc sp. PCC 7120]
  misc_feature (14)..(155): Homolog of NCBI NO: 37520418 NR Description: hypothetical protein [Gloeobacter violaceus]
  misc_feature (11)..(154): Homolog of NCBI NO: 23040962 NR Description: hypothetical protein [Trichodesmium erythraeum
  misc_feature (10)..(181): Homolog of NCBI NO: 15239796 NR Description: putative protein; protein id: At5g11840.1
  misc_feature (16)..(156): Homolog of NCBI NO: 22298607 NR Description: ORF_ID:tll1063~hypothetical protein
  misc_feature (16)..(171): Homolog of NCBI NO: 16331827 NR Description: hypothetical protein [Synechocystis sp. PCC 6803]
  misc_feature (12)..(169): Homolog of NCBI NO: 23123845 NR Description: hypothetical protein [Nostoc punctiforme]
MSFSGQSWDPSSEIEVPSDQRPVNEYSSLKEGMLYSWGELGPSEFFIRLGGLWLVTFTVLGVPVAAASFNPSREPLRFILAAGTGTLFLVSLIVLRIYLGWSYVGDRLLSAVIPYEESGWYDGQMWVKPPEVLARDRLLGSYKVKPVIKMLKQTLIGTGALLVSAFVLFVFATPVEDFFKTTLGSTENQPEVSISRTSNKFNIRKEQLLRLPVDVVTDDDLAAAAAEAADGRPVYCRDRYYRALAGGQYCKWEDLVK

SEQ ID NO: 77228 - DNA, 1499 bp, Arabidopsis thaliana
  misc_feature (1)..(1499): Ceres Seq. ID no. 12562043
  misc_feature: MA Experiment ID: 108488 Result: Down-regulated in Transcription
  misc_feature: MA Experiment ID: 108573 Result: Up-regulated in Transcription
  misc_feature: MA Experiment 108573 PARAMETER Experiment Name: At_Drought_cDNA_P Parameter: Timepoint (hr) Value: 6
  misc_feature: MA Experiment 108573 PARAMETER Experiment Name: At_Drought_cDNA_P Parameter: Tissue Value: Aerial
  misc_feature: MA Experiment 108573 PARAMETER Experiment Name: At_Drought_cDNA_P Parameter: Treatment Value: Drought vs. No Drought
  misc_feature: MA Experiment ID: 108576 Result: Up-regulated in Transcription
  misc_feature: MA Experiment 108576 PARAMETER Experiment Name: At_42deg_Heat_cDNA_P Parameter: Temperature (deg C) Value: 42 vs. 22
  misc_feature: MA Experiment 108576 PARAMETER Experiment Name: At_42deg_Heat_cDNA_P Parameter: Timepoint (hr) Value: 1
  misc_feature: MA Experiment 108576 PARAMETER Experiment Name: At_42deg_Heat_cDNA_P Parameter: Tissue Value: Aerial
  misc_feature: MA Experiment ID: 108577 Result: Up-regulated in Transcription
  misc_feature: MA Experiment 108577 PARAMETER Experiment Name: At_42deg_Heat_cDNA_P Parameter: Temperature (deg C) Value: 42 vs. 22
  misc_feature: MA Experiment 108577 PARAMETER Experiment Name: At_42deg_Heat_cDNA_P Parameter: Timepoint (hr) Value: 6
  misc_feature: MA Experiment 108577 PARAMETER Experiment Name: At_42deg_Heat_cDNA_P Parameter: Tissue Value: Aerial
  misc_feature: MA Experiment ID: 108579 Result: Up-regulated in Transcription
  misc_feature: MA Experiment 108579 PARAMETER Experiment Name: At_4deg_Cold_cDNA_P Parameter: Temperature (deg C) Value: 4 vs. 22
  misc_feature: MA Experiment 108579 PARAMETER Experiment Name: At_4deg_Cold_cDNA_P Parameter: Timepoint (hr) Value: 6
  misc_feature: MA Experiment 108579 PARAMETER Experiment Name: At_4deg_Cold_cDNA_P Parameter: Tissue Value: Aerial
  misc_feature: MA Experiment ID: 108594 Result: Up-regulated in Transcription
  misc_feature: MA Experiment 108594 PARAMETER Experiment Name: At_Ler-rhl_Root_cDNA_P Parameter: Plant Line Value: null
  misc_feature: MA Experiment ID: 108595 Result: Up-regulated in Transcription
  misc_feature: MA Experiment 108595 PARAMETER Experiment Name: At_Ler-pi_Ovule_cDNA_P Parameter: Plant Line Value: null
  misc_feature: MA Experiment ID: 108667 Result: Up-regulated in Transcription
  misc_feature: MA Experiment 108667 PARAMETER Experiment Name: At_2mM_SA_cDNA_P Parameter: Plant Line Value: WS
  misc_feature: MA Experiment 108667 PARAMETER Experiment Name: At_2mM_SA_cDNA_P Parameter: Timepoint (hr) Value: 1
  misc_feature: MA Experiment 108667 PARAMETER Experiment Name: At_2mM_SA_cDNA_P Parameter: Treatment Value: 2mM SA vs. No Treatment
  misc_feature: MA Experiment ID: 108668 Result: Up-regulated in Transcription
  misc_feature: MA Experiment 108668 PARAMETER Experiment Name: At_2mM_SA_cDNA_P Parameter: Plant Line Value: WS
  misc_feature: MA Experiment 108668 PARAMETER Experiment Name: At_2mM_SA_cDNA_P Parameter: Timepoint (hr) Value: 6
  misc_feature: MA Experiment 108668 PARAMETER Experiment Name: At_2mM_SA_cDNA_P Parameter: Treatment Value: 2mM SA vs. No Treatment
  misc_feature: MA Experiment ID: 20000093 Result: Up-regulated in Transcription
  misc_feature: MA Experiment 20000093 PARAMETER Experiment Name: At_42deg_Heat_cDNA_P Parameter: Temperature (deg C) Value: 42 vs. 22
  misc_feature: MA Experiment 20000093 PARAMETER Experiment Name: At_42deg_Heat_cDNA_P Parameter: Timepoint (hr) Value: 0.5
  misc_feature: MA Experiment 20000093 PARAMETER Experiment Name: At_42deg_Heat_cDNA_P Parameter: Tissue Value: Aerial
  misc_feature: MA Experiment ID: 20000111 Result: Up-regulated in Transcription
  misc_feature: MA Experiment 20000111 PARAMETER Experiment Name: At_42deg_Heat_cDNA_P Parameter: Temperature (deg C) Value: 42 vs. 22
  misc_feature: MA Experiment 20000111 PARAMETER Experiment Name: At_42deg_Heat_cDNA_P Parameter: Timepoint (hr) Value: 6
  misc_feature: MA Experiment 20000111 PARAMETER Experiment Name: At_42deg_Heat_cDNA_P Parameter: Tissue Value: Aerial
  misc_feature: MA Experiment ID: 20000112 Result: Up-regulated in Transcription
  misc_feature: MA Experiment 20000112 PARAMETER Experiment Name: At_42deg_Heat_cDNA_P Parameter: Temperature (deg C) Value: 42 vs. 22
  misc_feature: MA Experiment 20000112 PARAMETER Experiment Name: At_42deg_Heat_cDNA_P Parameter: Timepoint (hr) Value: 2
  misc_feature: MA Experiment 20000112 PARAMETER Experiment Name: At_42deg_Heat_cDNA_P Parameter: Tissue Value: Aerial
  misc_feature: MA Experiment ID: 20000113 Result: Up-regulated in Transcription
  misc_feature: MA Experiment 20000113 PARAMETER Experiment Name: At_42deg_Heat_cDNA_P Parameter: Temperature (deg C) Value: 42 vs. 22
  misc_feature: MA Experiment 20000113 PARAMETER Experiment Name: At_42deg_Heat_cDNA_P Parameter: Timepoint (hr) Value: 8
  misc_feature: MA Experiment 20000113 PARAMETER Experiment Name: At_42deg_Heat_cDNA_P Parameter: Tissue Value: Aerial
  misc_feature: MA Experiment ID: 20000144 Result: Up-regulated in Transcription
  misc_feature: MA Experiment 20000144 PARAMETER Experiment Name: At_42deg_Heat_cDNA_P Parameter: Temperature (deg C) Value: 42 vs. 22
  misc_feature: MA Experiment 20000144 PARAMETER Experiment Name: At_42deg_Heat_cDNA_P Parameter: Timepoint (hr) Value: 1
  misc_feature: MA Experiment 20000144 PARAMETER Experiment Name: At_42deg_Heat_cDNA_P Parameter: Tissue Value: Aerial
agattcgttttatttttcaatcgtttcaatttctaaaattctcctctctcaacgcaatcaccaaatccaaatttagggtttcttttctctttctgcgatcgatctctgaaaactcataactgttgtttaatcgtgaagatggcatcaaacggatctttctctgctcagagaaacgcaaacgctagaacaacgatgaagagaagaagcgacaatcgcggttacggtggcggaatcggaggttatcaagaggagacgaaccgttacgcgccgccgcaaaaacgtttcagatcacaagcgcaacagcaattccgatctggtcataatcctctgtatcatcatcatggtagtaataataataacgtgtctagggtttcttctcaatcatataacaattgcggtgttgatgtgattgcttctaattcaagttttgcattacgtaacaatgattctaacaccaacaattatcagaaaccctttgttgctggttatggaaaccctaatccccaaattgttcctcttccattaccttatcgtaagcttgatgacaatctctctttagattcgttacctgattgggttccgaattcaagaaccctaactccgaattatcctgttaggtcatcgaattttgtaccaaacactcctgtttttacgaatgttcaaaatccgatgaatcattcgaacatggtttcagttgtgtctcaatctatgcatcaaccaattgttttgagcaaagaattgactgatttgcttagtcttcttaacaatgagaaagagaagaaaactttagaagcaagtaatagtgattctttgcctgttggattaagctttgataatccatcgtcacttaatgttcgacatgaatctgtgattaagtctctgtattctgatatgccgagacaatgttcatcgtgtgggttgagattcaagtgtcaagaagagcatagtaaacacatggattggcatgtaaggaagaacaggtcggtgaaaaccactacaagactgggtcagcaaccgaagaaatcgaggggatggttagcaagtgcatctttatggctttgtgcagcgacgggaggagagacggtagaagtagcatcttttggaggagaaatgcagaagaagaaaggaaaggacgaagaaccaaaacaactcatggtgcctgcggatgaagatcagaagaattgcgcattatgcgtagagccgtttgaagagttctttagccatgaagatgatgattggatgtataaagatgcagtctacttaaccaagaatggtcgtatagttcatgttaagtgtatgcctgaaccccgacctgctaaggatttgagagagccttcgagggtaatgtctgttacagttccatcggttgcgaaagctatagcctgctgattgagatttttaagatctctgttttagtcattcgtttttttaagtaatgtactttacttgaacaagttgtaacacaaatacagttctatcaattgaatctcctattttac

SEQ ID NO: 77229 - protein, 416 aa, Arabidopsis thaliana
  peptide (1)..(416): Ceres Seq. ID no. 12562044
  misc_feature (1)..(416): Homolog of NCBI NO: 15219679 NR Description: hypothetical protein; protein id: At1g66500.1, by cDNA: gi_18086322 [Arabidopsis thaliana]
  misc_feature (1)..(416): Homolog of NCBI NO: 18086323 NR Description: At1g66500/F28G11_6 [Arabidopsis thaliana]
  misc_feature (1)..(416): Homolog of NCBI NO: 15239923 NR Description: S-locus protein 4-like; protein id: At5g43620.1
  misc_feature (2)..(416): Homolog of NCBI NO: 6069478 NR Description: S-locus protein 4 [Brassica rapa]
  misc_feature (100)..(416): Homolog of NCBI NO: 18642418 NR Description: putative PCF11 protein [Brassica napus]
  misc_feature (226)..(401): Homolog of NCBI NO: 30679905 NR Description: S-locus protein 4-related [Arabidopsis thaliana]
  misc_feature (226)..(397): Homolog of NCBI NO: 4115937 NR Description: contains similarity to human PCF11p homolog
  misc_feature (147)..(390): Homolog of NCBI NO: 38637067 NR Description: putative S-locus protein 4 [Oryza sativa
  misc_feature (161)..(387): Homolog of NCBI NO: 18404146 NR Description: hypothetical protein; protein id: At2g36480.1 thaliana] >gi|20197927|gb|AAD24632.2| hypothetical protein
  misc_feature (161)..(387): Homolog of NCBI NO: 25408479 NR Description: hypothetical protein At2g36480 [imported] -
MASNGSFSAQRNANARTTMKRRSDNRGYGGGIGGYQEETNRYAPPQKRFRSQAQQQFRSGHNPLYHHHGSNNNNVSRVSSQSYNNCGVDVIASNSSFALRNNDSNTNNYQKPFVAGYGNPNPQIVPLPLPYRKLDDNLSLDSLPDWVPNSRTLTPNYPVRSSNFVPNTPVFTNVQNPMNHSNMVSVVSQSMHQPIVLSKELTDLLSLLNNEKEKKTLEASNSDSLPVGLSFDNPSSLNVRHESVIKSLYSDMPRQCSSCGLRFKCQEEHSKHMDWHVRKNRSVKTTTRLGQQPKKSRGWLASASLWLCAATGGETVEVASFGGEMQKKKGKDEEPKQLMVPADEDQKNCALCVEPFEEFFSHEDDDWMYKDAVYLTKNGRIVHVKCMPEPRPAKDLREPSRVMSVTVPSVAKAIAC

SEQ ID NO: 77230 - protein, 398 aa, Arabidopsis thaliana
  peptide (1)..(398): Ceres Seq. ID no. 12562045
  misc_feature (1)..(398): Homolog of NCBI NO: 15219679 NR Description: hypothetical protein; protein id: At1g66500.1, by cDNA: gi_18086322 [Arabidopsis thaliana]
  misc_feature (1)..(398): Homolog of NCBI NO: 18086323 NR Description: At1g66500/F28G11_6 [Arabidopsis thaliana]
  misc_feature (1)..(398): Homolog of NCBI NO: 15239923 NR Description: S-locus protein 4-like; protein id: At5g43620.1
  misc_feature (1)..(398): Homolog of NCBI NO: 6069478 NR Description: S-locus protein 4 [Brassica rapa]
  misc_feature (82)..(398): Homolog of NCBI NO: 18642418 NR Description: putative PCF11 protein [Brassica napus]
  misc_feature (208)..(383): Homolog of NCBI NO: 30679905 NR Description: S-locus protein 4-related [Arabidopsis thaliana]
  misc_feature (208)..(379): Homolog of NCBI NO: 4115937 NR Description: contains similarity to human PCF11p homolog
  misc_feature (129)..(372): Homolog of NCBI NO: 38637067 NR Description: putative S-locus protein 4 [Oryza sativa
  misc_feature (143)..(369): Homolog of NCBI NO: 18404146 NR Description: hypothetical protein; protein id: At2g36480.1 thaliana] >gi|20197927|gb|AAD24632.2| hypothetical protein
  misc_feature (143)..(369): Homolog of NCBI NO: 25408479 NR Description: hypothetical protein At2g36480 [imported] -
MKRRSDNRGYGGGIGGYQEETNRYAPPQKRFRSQAQQQFRSGHNPLYHHHGSNNNNVSRVSSQSYNNCGVDVIASNSSFALRNNDSNTNNYQKPFVAGYGNPNPQIVPLPLPYRKLDDNLSLDSLPDWVPNSRTLTPNYPVRSSNFVPNTPVFTNVQNPMNHSNMVSVVSQSMHQPIVLSKELTDLLSLLNNEKEKKTLEASNSDSLPVGLSFDNPSSLNVRHESVIKSLYSDMPRQCSSCGLRFKCQEEHSKHMDWHVRKNRSVKTTTRLGQQPKKSRGWLASASLWLCAATGGETVEVASFGGEMQKKKGKDEEPKQLMVPADEDQKNCALCVEPFEEFFSHEDDDWMYKDAVYLTKNGRIVHVKCMPEPRPAKDLREPSRVMSVTVPSVAKAIAC

SEQ ID NO: 77231 - protein, 239 aa, Arabidopsis thaliana
  peptide (1)..(239): Ceres Seq. ID no. 12562046
  misc_feature (1)..(239): Homolog of NCBI NO: 15219679 NR Description: hypothetical protein; protein id: At1g66500.1, by cDNA: gi_18086322 [Arabidopsis thaliana]
  misc_feature (1)..(239): Homolog of NCBI NO: 18086323 NR Description: At1g66500/F28G11_6 [Arabidopsis thaliana]
  misc_feature (1)..(239): Homolog of NCBI NO: 15239923 NR Description: S-locus protein 4-like; protein id: At5g43620.1
  misc_feature (1)..(239): Homolog of NCBI NO: 6069478 NR Description: S-locus protein 4 [Brassica rapa]
  misc_feature (1)..(239): Homolog of NCBI NO: 18642418 NR Description: putative PCF11 protein [Brassica napus]
  misc_feature (49)..(224): Homolog of NCBI NO: 30679905 NR Description: S-locus protein 4-related [Arabidopsis thaliana]
  misc_feature (49)..(220): Homolog of NCBI NO: 4115937 NR Description: contains similarity to human PCF11p homolog
  misc_feature (1)..(213): Homolog of NCBI NO: 38637067 NR Description: putative S-locus protein 4 [Oryza sativa
  misc_feature (1)..(210): Homolog of NCBI NO: 18404146 NR Description: hypothetical protein; protein id: At2g36480.1 thaliana] >gi|20197927|gb|AAD24632.2| hypothetical protein
  misc_feature (1)..(210): Homolog of NCBI NO: 25408479 NR Description: hypothetical protein At2g36480 [imported] -
MNHSNMVSVVSQSMHQPIVLSKELTDLLSLLNNEKEKKTLEASNSDSLPVGLSFDNPSSLNVRHESVIKSLYSDMPRQCSSCGLRFKCQEEHSKHMDWHVRKNRSVKTTTRLGQQPKKSRGWLASASLWLCAATGGETVEVASFGGEMQKKKGKDEEPKQLMVPADEDQKNCALCVEPFEEFFSHEDDDWMYKDAVYLTKNGRIVHVKCMPEPRPAKDLREPSRVMSVTVPSVAKAIAC

SEQ ID NO: 77232 - DNA, 1680 bp, Arabidopsis thaliana
  misc_feature (1)..(1680): Ceres Seq. ID no. 12562049
  misc_feature: MA Experiment ID: 108434 Result: Down-regulated in Transcription
  misc_feature: MA Experiment 108434 PARAMETER Experiment Name: At_Root_Tips_cDNA_P Parameter: Tissue Value: Root Tips
  misc_feature: MA Experiment ID: 108576 Result: Down-regulated in Transcription
  misc_feature: MA Experiment 108576 PARAMETER Experiment Name: At_42deg_Heat_cDNA_P Parameter: Temperature (deg C) Value: 42 vs. 22
  misc_feature: MA Experiment 108576 PARAMETER Experiment Name: At_42deg_Heat_cDNA_P Parameter: Timepoint (hr) Value: 1
  misc_feature: MA Experiment 108576 PARAMETER Experiment Name: At_42deg_Heat_cDNA_P Parameter: Tissue Value: Aerial
  misc_feature: MA Experiment ID: 108577 Result: Down-regulated in Transcription
  misc_feature: MA Experiment 108577 PARAMETER Experiment Name: At_42deg_Heat_cDNA_P Parameter: Temperature (deg C) Value: 42 vs. 22
  misc_feature: MA Experiment 108577 PARAMETER Experiment Name: At_42deg_Heat_cDNA_P Parameter: Timepoint (hr) Value: 6
  misc_feature: MA Experiment 108577 PARAMETER Experiment Name: At_42deg_Heat_cDNA_P Parameter: Tissue Value: Aerial
  misc_feature: MA Experiment ID: 108579 Result: Up-regulated in Transcription
  misc_feature: MA Experiment 108579 PARAMETER Experiment Name: At_4deg_Cold_cDNA_P Parameter: Temperature (deg C) Value: 4 vs. 22
  misc_feature: MA Experiment 108579 PARAMETER Experiment Name: At_4deg_Cold_cDNA_P Parameter: Timepoint (hr) Value: 6
  misc_feature: MA Experiment 108579 PARAMETER Experiment Name: At_4deg_Cold_cDNA_P Parameter: Tissue Value: Aerial
  misc_feature: MA Experiment ID: 108595 Result: Down-regulated in Transcription
  misc_feature: MA Experiment 108595 PARAMETER Experiment Name: At_Ler-pi_Ovule_cDNA_P Parameter: Plant Line Value: null
  misc_feature: MA Experiment ID: 20000069 Result: Down-regulated in Transcription
  misc_feature: MA Experiment 20000069 PARAMETER Experiment Name: At_100uM_ABA_Mutants_cDNA_P Parameter: Plant Line Value: CS23
  misc_feature: MA Experiment 20000069 PARAMETER Experiment Name: At_100uM_ABA_Mutants_cDNA_P Parameter: Timepoint (hr) Value: 6
  misc_feature: MA Experiment 20000069 PARAMETER Experiment Name: At_100uM_ABA_Mutants_cDNA_P Parameter: Tissue Value: Aerial
  misc_feature: MA Experiment 20000069 PARAMETER Experiment Name: At_100uM_ABA_Mutants_cDNA_P Parameter: Treatment Value: 100uM ABA vs. No Treatment
  misc_feature: MA Experiment ID: 20000087 Result: Down-regulated in Transcription
  misc_feature: MA Experiment 20000087 PARAMETER Experiment Name: At_100uM_ABA_Mutants_cDNA_P Parameter: Plant Line Value: WS
  misc_feature: MA Experiment 20000087 PARAMETER Experiment Name: At_100uM_ABA_Mutants_cDNA_P Parameter: Timepoint (hr) Value: 6
  misc_feature: MA Experiment 20000087 PARAMETER Experiment Name: At_100uM_ABA_Mutants_cDNA_P Parameter: Tissue Value: Aerial
  misc_feature: MA Experiment 20000087 PARAMETER Experiment Name: At_100uM_ABA_Mutants_cDNA_P Parameter: Treatment Value: 100uM ABA vs. No Treatment
  misc_feature: MA Experiment ID: 20000089 Result: Down-regulated in Transcription
  misc_feature: MA Experiment ID: 20000113 Result: Down-regulated in Transcription
  misc_feature: MA Experiment 20000113 PARAMETER Experiment Name: At_42deg_Heat_cDNA_P Parameter: Temperature (deg C) Value: 42 vs. 22
  misc_feature: MA Experiment 20000113 PARAMETER Experiment Name: At_42deg_Heat_cDNA_P Parameter: Timepoint (hr) Value: 8
  misc_feature: MA Experiment 20000113 PARAMETER Experiment Name: At_42deg_Heat_cDNA_P Parameter: Tissue Value: Aerial
  misc_feature: MA Experiment ID: 20000171 Result: Down-regulated in Transcription
  misc_feature: MA Experiment 20000171 PARAMETER Experiment Name: At_42deg_Heat_P Parameter: Age (day) Value: 14
  misc_feature: MA Experiment 20000171 PARAMETER Experiment Name: At_42deg_Heat_P Parameter: Organism Value: A. thaliana
  misc_feature: MA Experiment 20000171 PARAMETER Experiment Name: At_42deg_Heat_P Parameter: Plant Line Value: WS
  misc_feature: MA Experiment 20000171 PARAMETER Experiment Name: At_42deg_Heat_P Parameter: Temperature (deg C) Value: 42 vs. 22
  misc_feature: MA Experiment 20000171 PARAMETER Experiment Name: At_42deg_Heat_P Parameter: Timepoint (hr) Value: 1
  misc_feature: MA Experiment 20000171 PARAMETER Experiment Name: At_42deg_Heat_P Parameter: Tissue Value: Aerial
  misc_feature: MA Experiment ID: 20000173 Result: Down-regulated in Transcription
  misc_feature: MA Experiment 20000173 PARAMETER Experiment Name: At_42deg_Heat_P Parameter: Age (day) Value: 14
  misc_feature: MA Experiment 20000173 PARAMETER Experiment Name: At_42deg_Heat_P Parameter: Organism Value: A. thaliana
  misc_feature: MA Experiment 20000173 PARAMETER Experiment Name: At_42deg_Heat_P Parameter: Plant Line Value: WS
  misc_feature: MA Experiment 20000173 PARAMETER Experiment Name: At_42deg_Heat_P Parameter: Temperature (deg C) Value: 42 vs. 22
  misc_feature: MA Experiment 20000173 PARAMETER Experiment Name: At_42deg_Heat_P Parameter: Timepoint (hr) Value: 6
  misc_feature: MA Experiment 20000173 PARAMETER Experiment Name: At_42deg_Heat_P Parameter: Tissue Value: Aerial
  misc_feature: MA Experiment ID: 20000182 Result: Down-regulated in Transcription
  misc_feature: MA Experiment 20000182 PARAMETER Experiment Name: At_2mM_SA_P Parameter: Age (day) Value: 14
  misc_feature: MA Experiment 20000182 PARAMETER Experiment Name: At_2mM_SA_P Parameter: Organism Value: A. thaliana
  misc_feature: MA Experiment 20000182 PARAMETER Experiment Name: At_2mM_SA_P Parameter: Plant Line Value: WS
  misc_feature: MA Experiment 20000182 PARAMETER Experiment Name: At_2mM_SA_P Parameter: Timepoint (hr) Value: 6
  misc_feature: MA Experiment 20000182 PARAMETER Experiment Name: At_2mM_SA_P Parameter: Tissue Value: Aerial
  misc_feature: MA Experiment 20000182 PARAMETER Experiment Name: At_2mM_SA_P Parameter: Treatment Value: 2mM SA vs. No Treatment
  misc_feature: MA Experiment ID: 20000184 Result: Up-regulated in Transcription
  misc_feature: MA Experiment 20000184 PARAMETER Experiment Name: At_Shoots__P Parameter: Age (day) Value: 7
  misc_feature: MA Experiment 20000184 PARAMETER Experiment Name: At_Shoots__P Parameter: Tissue Value: Shoots vs. Whole Plant
  misc_feature: MA Experiment ID: 20000438 Result: Up-regulated in Transcription
  misc_feature: MA Experiment 20000438 PARAMETER Experiment Name: At_Shoots__P Parameter: Age (day) Value: 14
  misc_feature: MA Experiment 20000438 PARAMETER Experiment Name: At_Shoots__P Parameter: Tissue Value: Shoots vs. Whole Plant
  misc_feature: MA Experiment ID: 20001248 Result: Down-regulated in Transcription
  misc_feature: MA Experiment 20001248 PARAMETER Experiment Name: At_Far-red-induction_P Parameter: Age (day) Value: 7
  misc_feature: MA Experiment 20001248 PARAMETER Experiment Name: At_Far-red-induction_P Parameter: Light Value: Far-red vs. White
  misc_feature: MA Experiment 20001248 PARAMETER Experiment Name: At_Far-red-induction_P Parameter: Organism Value: A. thaliana
  misc_feature: MA Experiment 20001248 PARAMETER Experiment Name: At_Far-red-induction_P Parameter: Plant Line Value: Columbia
  misc_feature: MA Experiment 20001248 PARAMETER Experiment Name: At_Far-red-induction_P Parameter: Timepoint (hr) Value: 4
  misc_feature: MA Experiment 20001248 PARAMETER Experiment Name: At_Far-red-induction_P Parameter: Tissue Value: Whole Plant
atcgcttcttcctcctcctgcttcttcaactccaaacctcaccctctcaatttccctccttcgccggtccacggcgtcatttcacggtggcgcttcacctctctccgtcacctactctcctaaaaatccaatctttacaaaatccagaccaatatagaaatgactttaatcgcttctctgtctctcccaccaccagctatacaaagacaatcactttctgaatttcataatcttcccgctaaatctcaatccttcaattgtcaattccggtcttctagttcacctttatcttctctccattcttcatcgcttagtaactttctagattttagactaaggcggagaaacagcggattggttccagtggtggcgtgttcaacgacgccgtttatgggcagagttggattacattggagagatgggaatatgtctctgttatcgttttgtggtggaactgatgttacagagaaagctgattcgtctcagttttggtctgctttgcttccatttgttgttgctctcactgccgttgctgctctctcttacccacctagtttcacttgggtatctaaagacctctatgctcctgctcttggagggattatgttatctattggaattcagctttcagttgacgattttgctcttgcattcaaaagaccagtgccgttatctgttgggtttgttgctcagtacgttttgaaaccgcttctcggggttttagttgctaatgcatttgggatgccgaggaccttctacgctggttttatactcacgtgttgtgtggctggggctcagttgtctagttacgcgagttctctgagtaaagctgatgtggccatgagcattcttctcactagttctacaactattgcttctgtaatctttacacctttgcttagtggtcttctaattggatcagtagttcctgttgatgcagttgccatgtcgaagtctatacttcaggtggtacttgttccaatcactcttggccttgtgttaaatacttatgcgaagcctgtggtcactcttcttcaacctgtgatgccgtttgttgctatggtatgcacttcgttgtgcattggaagcccactttcgattaatcgcagtcagattctgtcagctgaaggtcttggattgattgttccaattgttacattccatgccgtagcatttgccttaggatattggttctctaagatcccaggcttacgacaagaggaagaagtaagccggactatctccctttgcacgggaatgcaaagctccacattagccgggcttcttgcaagccagttccttggtagcagccaagccgtgccagcagcttgctctgtagttgtaatggccataatgggtctatgccttgcctctttctggggcaatgggtttcgaatcagggacgttctatcgctatcaacaccgcaaagcactggctacaccgctgaatcatgagcaagaattcagcagcaacaaacctgtaaagcaagggaaccacaccttgggacattgattgcacaagtactttccggtttttaatttgatgtacaaacagcatttgggaagtaaagataaggtttagaggggatggtataggtagtgtagacaaaatggtattcatcaatcatcttgtatgtagtctgctaattcatggtataaaaggttatcttttgttgcctc

SEQ ID NO: 77233 - protein, 431 aa, Arabidopsis thaliana
  peptide (1)..(431): Ceres Seq. ID no. 12562050
  misc_feature (142)..(322): Pfam Name: Sodium Bile acid symporter family Pfam Description: Sodium Bile acid symporter family
  misc_feature (1)..(431): Homolog of NCBI NO: 18404505 NR Description: expressed protein; protein id: At3g25410.1, by cDNA: 26683., supported by cDNA: gi_19698908 [Arabidopsis >gi|19698909|gb|AAL91190.1| unknown protein [Arabidopsis
  misc_feature (1)..(431): Homolog of NCBI NO: 21554890 NR Description: unknown [Arabidopsis thaliana]
  misc_feature (1)..(395): Homolog of NCBI NO: 9279722 NR Description: contains similarity to transporter
  misc_feature (85)..(407): Homolog of NCBI NO: 18416020 NR Description: similar to putative transport protein; protein At4g22840.1, supported by cDNA: 9746., supported by cDNA: [Arabidopsis thaliana] >gi|17529350|gb|AAL38902.1| unknown
  misc_feature (50)..(409): Homolog of NCBI NO: 20269901 NR Description: putative sodium-dependent bile acid symporter
  misc_feature (112)..(409): Homolog of NCBI NO: 34911708 NR Description: P0707D10.18 [Oryza sativa (japonica
  misc_feature (50)..(409): Homolog of NCBI NO: 30683305 NR Description: bile acid:sodium symporter family [Arabidopsis
  misc_feature (112)..(407): Homolog of NCBI NO: 7486890 NR Description: hypothetical protein T12H17.230 - Arabidopsis >gi|2827561|emb|CAA16569.1| predicted protein [Arabidopsis >gi|3292809|emb|CAA19799.1| putative protein [Arabidopsis
  misc_feature (129)..(398): Homolog of NCBI NO: 7485401 NR Description: hypothetical protein At2g26900 [imported] - thaliana >gi|3426051|gb|AAC32250.1| putative Na+ dependent ileal
  misc_feature (149)..(409): Homolog of NCBI NO: 28393076 NR Description: putative Na+ dependent ileal bile acid
MTLIASLSLPPPAIQRQSLSEFHNLPAKSQSFNCQFRSSSSPLSSLHSSSLSNFLDFRLRRRNSGLVPVVACSTTPFMGRVGLHWRDGNMSLLSFCGGTDVTEKADSSQFWSALLPFVVALTAVAALSYPPSFTWVSKDLYAPALGGIMLSIGIQLSVDDFALAFKRPVPLSVGFVAQYVLKPLLGVLVANAFGMPRTFYAGFILTCCVAGAQLSSYASSLSKADVAMSILLTSSTTIASVIFTPLLSGLLIGSVVPVDAVAMSKSILQVVLVPITLGLVLNTYAKPVVTLLQPVMPFVAMVCTSLCIGSPLSINRSQILSAEGLGLIVPIVTFHAVAFALGYWFSKIPGLRQEEEVSRTISLCTGMQSSTLAGLLASQFLGSSQAVPAACSVVVMAIMGLCLASFWGNGFRIRDVLSLSTPQSTGYTAES

SEQ ID NO: 77234 - protein, 354 aa, Arabidopsis thaliana
  peptide (1)..(354): Ceres Seq. ID no. 12562051
  misc_feature (65)..(245): Pfam Name: Sodium Bile acid symporter family Pfam Description: Sodium Bile acid symporter family
  misc_feature (1)..(354): Homolog of NCBI NO: 18404505 NR Description: expressed protein; protein id: At3g25410.1, by cDNA: 26683., supported by cDNA: gi_19698908 [Arabidopsis >gi|19698909|gb|AAL91190.1| unknown protein [Arabidopsis
  misc_feature (1)..(354): Homolog of NCBI NO: 21554890 NR Description: unknown [Arabidopsis thaliana]
  misc_feature (1)..(318): Homolog of NCBI NO: 9279722 NR Description: contains similarity to transporter
  misc_feature (8)..(330): Homolog of NCBI NO: 18416020 NR Description: similar to putative transport protein; protein At4g22840.1, supported by cDNA: 9746., supported by cDNA: [Arabidopsis thaliana] >gi|17529350|gb|AAL38902.1| unknown
  misc_feature (1)..(332): Homolog of NCBI NO: 20269901 NR Description: putative sodium-dependent bile acid symporter
  misc_feature (35)..(332): Homolog of NCBI NO: 34911708 NR Description: P0707D10.18 [Oryza sativa (japonica
  misc_feature (1)..(332): Homolog of NCBI NO: 30683305 NR Description: bile acid:sodium symporter family [Arabidopsis
  misc_feature (35)..(330): Homolog of NCBI NO: 7486890 NR Description: hypothetical protein T12H17.230 - Arabidopsis >gi|2827561|emb|CAA16569.1| predicted protein [Arabidopsis >gi|3292809|emb|CAA19799.1| putative protein [Arabidopsis
  misc_feature (52)..(321): Homolog of NCBI NO: 7485401 NR Description: hypothetical protein At2g26900 [imported] - thaliana >gi|3426051|gb|AAC32250.1| putative Na+ dependent ileal
  misc_feature (72)..(332): Homolog of NCBI NO: 28393076 NR Description: putative Na+ dependent ileal bile acid
MGRVGLHWRDGNMSLLSFCGGTDVTEKADSSQFWSALLPFVVALTAVAALSYPPSFTWVSKDLYAPALGGIMLSIGIQLSVDDFALAFKRPVPLSVGFVAQYVLKPLLGVLVANAFGMPRTFYAGFILTCCVAGAQLSSYASSLSKADVAMSILLTSSTTIASVIFTPLLSGLLIGSVVPVDAVAMSKSILQVVLVPITLGLVLNTYAKPVVTLLQPVMPFVAMVCTSLCIGSPLSINRSQILSAEGLGLIVPIVTFHAVAFALGYWFSKIPGLRQEEEVSRTISLCTGMQSSTLAGLLASQFLGSSQAVPAACSVVVMAIMGLCLASFWGNGFRIRDVLSLSTPQSTGYTAES

SEQ ID NO: 77235 - protein, 342 aa, Arabidopsis thaliana
  peptide (1)..(342): Ceres Seq. ID no. 12562052
  misc_feature (53)..(233): Pfam Name: Sodium Bile acid symporter family Pfam Description: Sodium Bile acid symporter family
  misc_feature (1)..(342): Homolog of NCBI NO: 18404505 NR Description: expressed protein; protein id: At3g25410.1, by cDNA: 26683., supported by cDNA: gi_19698908 [Arabidopsis >gi|19698909|gb|AAL91190.1| unknown protein [Arabidopsis
  misc_feature (1)..(342): Homolog of NCBI NO: 21554890 NR Description: unknown [Arabidopsis thaliana]
  misc_feature (1)..(306): Homolog of NCBI NO: 9279722 NR Description: contains similarity to transporter
  misc_feature (1)..(318): Homolog of NCBI NO: 18416020 NR Description: similar to putative transport protein; protein At4g22840.1, supported by cDNA: 9746., supported by cDNA: [Arabidopsis thaliana] >gi|17529350|gb|AAL38902.1| unknown
  misc_feature (1)..(320): Homolog of NCBI NO: 20269901 NR Description: putative sodium-dependent bile acid symporter
  misc_feature (23)..(320): Homolog of NCBI NO: 34911708 NR Description: P0707D10.18 [Oryza sativa (japonica
  misc_feature (1)..(320): Homolog of NCBI NO: 30683305 NR Description: bile acid:sodium symporter family [Arabidopsis
  misc_feature (23)..(318): Homolog of NCBI NO: 7486890 NR Description: hypothetical protein T12H17.230 - Arabidopsis >gi|2827561|emb|CAA16569.1| predicted protein [Arabidopsis >gi|3292809|emb|CAA19799.1| putative protein [Arabidopsis
  misc_feature (40)..(309): Homolog of NCBI NO: 7485401 NR Description: hypothetical protein At2g26900 [imported] - thaliana >gi|3426051|gb|AAC32250.1| putative Na+ dependent ileal
  misc_feature (60)..(320): Homolog of NCBI NO: 28393076 NR Description: putative Na+ dependent ileal bile acid
MSLLSFCGGTDVTEKADSSQFWSALLPFVVALTAVAALSYPPSFTWVSKDLYAPALGGIMLSIGIQLSVDDFALAFKRPVPLSVGFVAQYVLKPLLGVLVANAFGMPRTFYAGFILTCCVAGAQLSSYASSLSKADVAMSILLTSSTTIASVIFTPLLSGLLIGSVVPVDAVAMSKSILQVVLVPITLGLVLNTYAKPVVTLLQPVMPFVAMVCTSLCIGSPLSINRSQILSAEGLGLIVPIVTFHAVAFALGYWFSKIPGLRQEEEVSRTISLCTGMQSSTLAGLLASQFLGSSQAVPAACSVVVMAIMGLCLASFWGNGFRIRDVLSLSTPQSTGYTAES

SEQ ID NO: 77236 - DNA, 1449 bp, Arabidopsis thaliana
  misc_feature (1)..(1449): Ceres Seq. ID no. 12562301
  misc_feature: MA Experiment ID: 108462 Result: Up-regulated in Transcription
  misc_feature: MA Experiment 108462 PARAMETER Experiment Name: At_Germinating_Seeds_cDNA_P Parameter: Age (day) Value: 2 vs. 0
  misc_feature: MA Experiment 108462 PARAMETER Experiment Name: At_Germinating_Seeds_cDNA_P Parameter: Tissue Value: Germinating Seeds
  misc_feature: MA Experiment ID: 108488 Result: Down-regulated in Transcription
  misc_feature: MA Experiment ID: 108573 Result: Up-regulated in Transcription
  misc_feature: MA Experiment 108573 PARAMETER Experiment Name: At_Drought_cDNA_P Parameter: Timepoint (hr) Value: 6
  misc_feature: MA Experiment 108573 PARAMETER Experiment Name: At_Drought_cDNA_P Parameter: Tissue Value: Aerial
  misc_feature: MA Experiment 108573 PARAMETER Experiment Name: At_Drought_cDNA_P Parameter: Treatment Value: Drought vs. No Drought
  misc_feature: MA Experiment ID: 108577 Result: Down-regulated in Transcription
  misc_feature: MA Experiment 108577 PARAMETER Experiment Name: At_42deg_Heat_cDNA_P Parameter: Temperature (deg C) Value: 42 vs. 22
  misc_feature: MA Experiment 108577 PARAMETER Experiment Name: At_42deg_Heat_cDNA_P Parameter: Timepoint (hr) Value: 6
  misc_feature: MA Experiment 108577 PARAMETER Experiment Name: At_42deg_Heat_cDNA_P Parameter: Tissue Value: Aerial
  misc_feature: MA Experiment ID: 108585 Result: Up-regulated in Transcription
  misc_feature: MA Experiment 108585 PARAMETER Experiment Name: At_5mM_NaNP_cDNA_P Parameter: Timepoint (hr) Value: 6
  misc_feature: MA Experiment 108585 PARAMETER Experiment Name: At_5mM_NaNP_cDNA_P Parameter: Tissue Value: Aerial
  misc_feature: MA Experiment 108585 PARAMETER Experiment Name: At_5mM_NaNP_cDNA_P Parameter: Treatment Value: null
  misc_feature: MA Experiment ID: 108595 Result: Down-regulated in Transcription
  misc_feature: MA Experiment 108595 PARAMETER Experiment Name: At_Ler-pi_Ovule_cDNA_P Parameter: Plant Line Value: null
  misc_feature: MA Experiment ID: 20000224 Result: Down-regulated in Transcription
  misc_feature: MA Experiment ID: 20000306 Result: Up-regulated in Transcription
  misc_feature: MA Experiment 20000306 PARAMETER Experiment Name: At_Germinating_Seeds_Sub_P Parameter: Age (hr) Value: 6 vs. 0
  misc_feature: MA Experiment 20000306 PARAMETER Experiment Name: At_Germinating_Seeds_Sub_P Parameter: Organism Value: A. thaliana
  misc_feature: MA Experiment 20000306 PARAMETER Experiment Name: At_Germinating_Seeds_Sub_P Parameter: Plant Line Value: WS
  misc_feature: MA Experiment 20000306 PARAMETER Experiment Name: At_Germinating_Seeds_Sub_P Parameter: Tissue Value: Germinating Seeds
  misc_feature: MA Experiment ID: 20000307 Result: Up-regulated in Transcription
  misc_feature: MA Experiment 20000307 PARAMETER Experiment Name: At_Germinating_Seeds_Sub_P Parameter: Age (hr) Value: 24 vs. 0
  misc_feature: MA Experiment 20000307 PARAMETER Experiment Name: At_Germinating_Seeds_Sub_P Parameter: Organism Value: A. thaliana
  misc_feature: MA Experiment 20000307 PARAMETER Experiment Name: At_Germinating_Seeds_Sub_P Parameter: Plant Line Value: WS
  misc_feature: MA Experiment 20000307 PARAMETER Experiment Name: At_Germinating_Seeds_Sub_P Parameter: Tissue Value: Germinating Seeds
  misc_feature: MA Experiment ID: 20000327 Result: Down-regulated in Transcription
  misc_feature: MA Experiment 20000327 PARAMETER Experiment Name: At_42deg_Heat_Sub_P Parameter: Age (day) Value: 14
  misc_feature: MA Experiment 20000327 PARAMETER Experiment Name: At_42deg_Heat_Sub_P Parameter: Organism Value: A. thaliana
  misc_feature: MA Experiment 20000327 PARAMETER Experiment Name: At_42deg_Heat_Sub_P Parameter: Plant Line Value: WS
  misc_feature: MA Experiment 20000327 PARAMETER Experiment Name: At_42deg_Heat_Sub_P Parameter: Temperature (deg C) Value: 42 vs. 22
  misc_feature: MA Experiment 20000327 PARAMETER Experiment Name: At_42deg_Heat_Sub_P Parameter: Timepoint (hr) Value: 1
  misc_feature: MA Experiment 20000327 PARAMETER Experiment Name: At_42deg_Heat_Sub_P Parameter: Tissue Value: Aerial
  misc_feature: MA Experiment ID: 20000328 Result: Down-regulated in Transcription
  misc_feature: MA Experiment 20000328 PARAMETER Experiment Name: At_42deg_Heat_Sub_P Parameter: Age (day) Value: 14
  misc_feature: MA Experiment 20000328 PARAMETER Experiment Name: At_42deg_Heat_Sub_P Parameter: Organism Value: A. thaliana
  misc_feature: MA Experiment 20000328 PARAMETER Experiment Name: At_42deg_Heat_Sub_P Parameter: Plant Line Value: WS
  misc_feature: MA Experiment 20000328 PARAMETER Experiment Name: At_42deg_Heat_Sub_P Parameter: Temperature (deg C) Value: 42 vs. 22
  misc_feature: MA Experiment 20000328 PARAMETER Experiment Name: At_42deg_Heat_Sub_P Parameter: Timepoint (hr) Value: 6
  misc_feature: MA Experiment 20000328 PARAMETER Experiment Name: At_42deg_Heat_Sub_P Parameter: Tissue Value: Aerial
ctccgatgtttcaaaaacaaagtcgattacgctagaatccatggtcacgacatcttctacagcaattctcttcttcatccgaagatgaattcgtattgggcgaaacttccggtggttaaagctgcgatgcttgctcacccatttatggattgaagctttagagagaaaatgggtgatgaggcagagatcaaggaacatttaaagccacaagcttcatctgaaacaatagacaagaaacataatgtgaaagggaagaggttatggcagaaagtcaagtatcaattggtggagtttcattcattgcctgcttatttaagagacaatgagtacatcattggtcattaccgatccgaatggccgatcaaacagattcttctcagcatctttaccattcataatgagactttgaatgtttggacgcatttgattgggtttttcctgtttttggcactcactatatacactgcaacgaaagtaccgagtgtcgtggatcttcattcgcttcaacaccgtttacccgatttgttgaggaaaacagatctccacaaacttcattctgagctcatgtctcgccttccttctagtccatctagttggcatgtgatggaccttctttataactgtttgcctgaaagattttctcatggcaactacactgacatgtgtgttctgcattctgtgagggaagatcttgcaaacttgatagctcctttgatcttcaggccaattactcgatggccgttttatgcatttctaggtggtgctatattctgtctattagcaagcagcacgtgccacctcctctcatgtcactccgagcgagtctcctacataatgcttaggcttgattacgccggcatcgcagctctaatagcgacttccttctaccctccggtttattactccttcatgtgtgatcctttcttctgcaacctctacttaggattcataaccatcttaggaatcgccactgtgcttgtttctctcctcccggttttccaaagcctggagtttcgggtggtgagggcgtctctgttctttggaatgggattctctggcttagctccgattcttcacaagctgatcatcttttgggaccaacctgaagcccttcacatgacaggttatgagattttgatgggtttgctttatgggttaggagctgtggtttatgcaactaggatcccagagagatggatgccgggtaaattcgatatagcaggacatagccatcagttgtttcatgttctggttgttgctggtgcgttaacgcactatagagctgggctatgagagatattgaaggatgttgaagatgaagattgaagattagatggaatctttgatgttttaaatcttgtttgtagtagcttcatataaaagttggattatgtaaagtcttatctgtaatcaaacgtttaattgtttcttttattcaacaaaggattc

SEQ ID NO: 77237 - protein, 374 aa, Arabidopsis thaliana
  peptide (1)..(374): Ceres Seq. ID no. 12562302
  misc_feature (73)..(374): Pfam Name: Uncharacterised protein family (Hly-III / UPF0073) Pfam Description: Uncharacterised protein family (Hly-III /
  misc_feature (1)..(374): Homolog of NCBI NO: 15233813 NR Description: putative protein; protein id: At4g38320.1
  misc_feature (1)..(374): Homolog of NCBI NO: 15235657 NR Description: expressed protein; protein id: At4g37680.1, by cDNA: 262351., supported by cDNA: gi_13430521, supported by
  misc_feature (108)..(334): Homolog of NCBI NO: 20330770 NR Description: Hypothetical protein [Oryza sativa (japonica
  misc_feature (187)..(374): Homolog of NCBI NO: 15241302 NR Description: putative protein; protein id: At5g20270.1, by cDNA: 24749., supported by cDNA: gi_15982833 [Arabidopsis >gi|15982834|gb|AAL09764.1| AT5g20270/F5O24_160 [Arabidopsis
  misc_feature (9)..(97): Homolog of NCBI NO: 15241302 NR Description: putative protein; protein id: At5g20270.1, by cDNA: 24749., supported by cDNA: gi_15982833 [Arabidopsis >gi|15982834|gb|AAL09764.1| AT5g20270/F5O24_160 [Arabidopsis
  misc_feature (187)..(369): Homolog of NCBI NO: 13272399 NR Description: hypothetical protein [Arabidopsis thaliana]
  misc_feature (187)..(369): Homolog of NCBI NO: 18400468 NR Description: expressed protein; protein id: At2g24150.1, by cDNA: gi_13877832 [Arabidopsis thaliana] unknown protein [Arabidopsis thaliana]
  misc_feature (34)..(106): Homolog of NCBI NO: 13272399 NR Description: hypothetical protein [Arabidopsis thaliana]
  misc_feature (34)..(106): Homolog of NCBI NO: 18400468 NR Description: expressed protein; protein id: At2g24150.1, by cDNA: gi_13877832 [Arabidopsis thaliana] unknown protein [Arabidopsis thaliana]
  misc_feature (164)..(374): Homolog of NCBI NO: 18377749 NR Description: unknown protein [Arabidopsis thaliana]
MGDEAEIKEHLKPQASSETIDKKHNVKGKRLWQKVKYQLVEFHSLPAYLRDNEYIIGHYRSEWPIKQILLSIFTIHNETLNVWTHLIGFFLFLALTIYTATKVPSVVDLHSLQHRLPDLLRKTDLHKLHSELMSRLPSSPSSWHVMDLLYNCLPERFSHGNYTDMCVLHSVREDLANLIAPLIFRPITRWPFYAFLGGAIFCLLASSTCHLLSCHSERVSYIMLRLDYAGIAALIATSFYPPVYYSFMCDPFFCNLYLGFITILGIATVLVSLLPVFQSLEFRVVRASLFFGMGFSGLAPILHKLIIFWDQPEALHMTGYEILMGLLYGLGAVVYATRIPERWMPGKFDIAGHSHQLFHVLVVAGALTHYRAGL

SEQ ID NO: 77238 - protein, 242 aa, Arabidopsis thaliana
  peptide (1)..(242): Ceres Seq. ID no. 12562303
  misc_feature (1)..(242): Pfam Name: Uncharacterised protein family (Hly-III / UPF0073) Pfam Description: Uncharacterised protein family (Hly-III /
  misc_feature (1)..(242): Homolog of NCBI NO: 15233813 NR Description: putative protein; protein id: At4g38320.1
  misc_feature (1)..(242): Homolog of NCBI NO: 15235657 NR Description: expressed protein; protein id: At4g37680.1, by cDNA: 262351., supported by cDNA: gi_13430521, supported by
  misc_feature (1)..(202): Homolog of NCBI NO: 20330770 NR Description: Hypothetical protein [Oryza sativa (japonica
  misc_feature (55)..(242): Homolog of NCBI NO: 15241302 NR Description: putative protein; protein id: At5g20270.1, by cDNA: 24749., supported by cDNA: gi_15982833 [Arabidopsis >gi|15982834|gb|AAL09764.1| AT5g20270/F5O24_160 [Arabidopsis
  misc_feature (55)..(237): Homolog of NCBI NO: 13272399 NR Description: hypothetical protein [Arabidopsis thaliana]
  misc_feature (55)..(237): Homolog of NCBI NO: 18400468 NR Description: expressed protein; protein id: At2g24150.1, by cDNA: gi_13877832 [Arabidopsis thaliana] unknown protein [Arabidopsis thaliana]
  misc_feature (32)..(242): Homolog of NCBI NO: 18377749 NR Description: unknown protein [Arabidopsis thaliana]
  misc_feature (32)..(242): Homolog of NCBI NO: 30688829 NR Description: expressed protein [Arabidopsis thaliana]
  misc_feature (74)..(237): Homolog of NCBI NO: 25309925 NR Description: hypothetical protein At2g24150 [imported] -
  misc_feature (60)..(242): Homolog of NCBI NO: 24649047 NR Description: CG5315-PA [Drosophila melanogaster]
MSRLPSSPSSWHVMDLLYNCLPERFSHGNYTDMCVLHSVREDLANLIAPLIFRPITRWPFYAFLGGAIFCLLASSTCHLLSCHSERVSYIMLRLDYAGIAALIATSFYPPVYYSFMCDPFFCNLYLGFITILGIATVLVSLLPVFQSLEFRVVRASLFFGMGFSGLAPILHKLIIFWDQPEALHMTGYEILMGLLYGLGAVVYATRIPERWMPGKFDIAGHSHQLFHVLVVAGALTHYRAGL

SEQ ID NO: 77239 - protein, 229 aa, Arabidopsis thaliana
  peptide (1)..(229): Ceres Seq. ID no. 12562304
  misc_feature (1)..(229): Pfam Name: Uncharacterised protein family (Hly-III / UPF0073) Pfam Description: Uncharacterised protein family (Hly-III /
  misc_feature (1)..(229): Homolog of NCBI NO: 15233813 NR Description: putative protein; protein id: At4g38320.1
  misc_feature (1)..(229): Homolog of NCBI NO: 15235657 NR Description: expressed protein; protein id: At4g37680.1, by cDNA: 262351., supported by cDNA: gi_13430521, supported by
  misc_feature (1)..(189): Homolog of NCBI NO: 20330770 NR Description: Hypothetical protein [Oryza sativa (japonica
  misc_feature (42)..(229): Homolog of NCBI NO: 15241302 NR Description: putative protein; protein id: At5g20270.1, by cDNA: 24749., supported by cDNA: gi_15982833 [Arabidopsis >gi|15982834|gb|AAL09764.1| AT5g20270/F5O24_160 [Arabidopsis
  misc_feature (42)..(224): Homolog of NCBI NO: 13272399 NR Description: hypothetical protein [Arabidopsis thaliana]
  misc_feature (42)..(224): Homolog of NCBI NO: 18400468 NR Description: expressed protein; protein id: At2g24150.1, by cDNA: gi_13877832 [Arabidopsis thaliana] unknown protein [Arabidopsis thaliana]
  misc_feature (19)..(229): Homolog of NCBI NO: 18377749 NR Description: unknown protein [Arabidopsis thaliana]
  misc_feature (19)..(229): Homolog of NCBI NO: 30688829 NR Description: expressed protein [Arabidopsis thaliana]
  misc_feature (61)..(224): Homolog of NCBI NO: 25309925 NR Description: hypothetical protein At2g24150 [imported] -
  misc_feature (47)..(229): Homolog of NCBI NO: 24649047 NR Description: CG5315-PA [Drosophila melanogaster]
MDLLYNCLPERFSHGNYTDMCVLHSVREDLANLIAPLIFRPITRWPFYAFLGGAIFCLLASSTCHLLSCHSERVSYIMLRLDYAGIAALIATSFYPPVYYSFMCDPFFCNLYLGFITILGIATVLVSLLPVFQSLEFRVVRASLFFGMGFSGLAPILHKLIIFWDQPEALHMTGYEILMGLLYGLGAVVYATRIPERWMPGKFDIAGHSHQLFHVLVVAGALTHYRAGL

SEQ ID NO: 77240 - DNA, 1510 bp, Arabidopsis thaliana
  misc_feature (1)..(1510): Ceres Seq. ID no. 12562660
  misc_feature: MA Experiment ID: 108433 Result: Down-regulated in Transcription
  misc_feature: MA Experiment 108433 PARAMETER Experiment Name: At_rhl_Mutant2_cDNA_P Parameter: Age (day) Value: 7
  misc_feature: MA Experiment 108433 PARAMETER Experiment Name: At_rhl_Mutant2_cDNA_P Parameter: Organism Value: A. thaliana
  misc_feature: MA Experiment 108433 PARAMETER Experiment Name: At_rhl_Mutant2_cDNA_P Parameter: Plant Line Value: rhl Mutant vs. wt landsburg
  misc_feature: MA Experiment 108433 PARAMETER Experiment Name: At_rhl_Mutant2_cDNA_P Parameter: Tissue Value: Roots
  misc_feature: MA Experiment ID: 108434 Result: Down-regulated in Transcription
  misc_feature: MA Experiment 108434 PARAMETER Experiment Name: At_Root_Tips_cDNA_P Parameter: Tissue Value: Root Tips
  misc_feature: MA Experiment ID: 108461 Result: Up-regulated in Transcription
  misc_feature: MA Experiment 108461 PARAMETER Experiment Name: At_Germinating_Seeds_cDNA_P Parameter: Age (day) Value: 1 vs. 0
  misc_feature: MA Experiment 108461 PARAMETER Experiment Name: At_Germinating_Seeds_cDNA_P Parameter: Tissue Value: Germinating Seeds
  misc_feature: MA Experiment ID: 108462 Result: Up-regulated in Transcription
  misc_feature: MA Experiment 108462 PARAMETER Experiment Name: At_Germinating_Seeds_cDNA_P Parameter: Age (day) Value: 2 vs. 0
  misc_feature: MA Experiment 108462 PARAMETER Experiment Name: At_Germinating_Seeds_cDNA_P Parameter: Tissue Value: Germinating Seeds
  misc_feature: MA Experiment ID: 108464 Result: Up-regulated in Transcription
  misc_feature: MA Experiment 108464 PARAMETER Experiment Name: At_Germinating_Seeds_cDNA_P Parameter: Age (day) Value: 4 vs. 0
  misc_feature: MA Experiment 108464 PARAMETER Experiment Name: At_Germinating_Seeds_cDNA_P Parameter: Tissue Value: Germinating Seeds
  misc_feature: MA Experiment ID: 108488 Result: Up-regulated in Transcription
  misc_feature: MA Experiment ID: 108594 Result: Down-regulated in Transcription
  misc_feature: MA Experiment 108594 PARAMETER Experiment Name: At_Ler-rhl_Root_cDNA_P Parameter: Plant Line Value: null
  misc_feature: MA Experiment ID: 20000185 Result: Down-regulated in Transcription
  misc_feature: MA Experiment 20000185 PARAMETER Experiment Name: At_Roots__P Parameter: Age (day) Value: 7 vs. 21
  misc_feature: MA Experiment 20000185 PARAMETER Experiment Name: At_Roots__P Parameter: Organism Value: A. thaliana
  misc_feature: MA Experiment 20000185 PARAMETER Experiment Name: At_Roots__P Parameter: Tissue Value: Roots vs. Whole Plant
  misc_feature: MA Experiment ID: 20000227 Result: Down-regulated in Transcription
  misc_feature: MA Experiment 20000227 PARAMETER Experiment Name: At_Root-Tips-vs-Tops_P Parameter: Tissue Value: Root Tips vs. Root Tops
  misc_feature: MA Experiment ID: 20000234 Result: Down-regulated in Transcription
  misc_feature: MA Experiment 20000234 PARAMETER Experiment Name: At_Siliques_P Parameter: Age (day) Value: 21
  misc_feature: MA Experiment 20000234 PARAMETER Experiment Name: At_Siliques_P Parameter: Organism Value: A. thaliana
  misc_feature: MA Experiment 20000234 PARAMETER Experiment Name: At_Siliques_P Parameter: Plant Line Value: WS
  misc_feature: MA Experiment 20000234 PARAMETER Experiment Name: At_Siliques_P Parameter: Tissue Value: Less Than 5mm Siliques vs. Whole Plant
  misc_feature: MA Experiment ID: 20000264 Result: Down-regulated in Transcription
  misc_feature: MA Experiment 20000264 PARAMETER Experiment Name: At_Open_Flower_P Parameter: Age (day) Value: 21
  misc_feature: MA Experiment 20000264 PARAMETER Experiment Name: At_Open_Flower_P Parameter: Plant Line Value: WS
  misc_feature: MA Experiment 20000264 PARAMETER Experiment Name: At_Open_Flower_P Parameter: Tissue Value: Open Flower vs. Whole Plant
  misc_feature: MA Experiment ID: 20000265 Result: Down-regulated in Transcription
  misc_feature: MA Experiment 20000265 PARAMETER Experiment Name: At_Open_Flower_P Parameter: Age (day) Value: 21
  misc_feature: MA Experiment 20000265 PARAMETER Experiment Name: At_Open_Flower_P Parameter: Plant Line Value: WS
  misc_feature: MA Experiment 20000265 PARAMETER Experiment Name: At_Open_Flower_P Parameter: Tissue Value: Closed Flower vs. Whole Plant
  misc_feature: MA Experiment ID: 20000286 Result: Down-regulated in Transcription
  misc_feature: MA Experiment 20000286 PARAMETER Experiment Name: At_Open_Flower_P Parameter: Age (day) Value: 21
  misc_feature: MA Experiment 20000286 PARAMETER Experiment Name: At_Open_Flower_P Parameter: Plant Line Value: WS
  misc_feature: MA Experiment 20000286 PARAMETER Experiment Name: At_Open_Flower_P Parameter: Tissue Value: Half Open vs. Whole Plant
  misc_feature: MA Experiment ID: 20000439 Result: Down-regulated in Transcription
  misc_feature: MA Experiment 20000439 PARAMETER Experiment Name: At_Roots__P Parameter: Age (day) Value: 14 vs. 21
  misc_feature: MA Experiment 20000439 PARAMETER Experiment Name: At_Roots__P Parameter: Organism Value: A. thaliana
  misc_feature: MA Experiment 20000439 PARAMETER Experiment Name: At_Roots__P Parameter: Tissue Value: Roots vs. Whole Plant
  misc_feature: MA Experiment ID: 20000794 Result: Down-regulated in Transcription
  misc_feature: MA Experiment 20000794 PARAMETER Experiment Name: At_Petals_P Parameter: Age (day) Value: 23-25 days
  misc_feature: MA Experiment 20000794 PARAMETER Experiment Name: At_Petals_P Parameter: Plant Line Value: WS
  misc_feature: MA Experiment 20000794 PARAMETER Experiment Name: At_Petals_P Parameter: Tissue Value: Petals vs. Whole plant
  misc_feature: MA Experiment ID: 20001904 Result: Down-regulated in Transcription
  misc_feature: MA Experiment 20001904 PARAMETER Experiment Name: At_Drought_Reproduction_P Parameter: Age (day) Value: 37
  misc_feature: MA Experiment 20001904 PARAMETER Experiment Name: At_Drought_Reproduction_P Parameter: Organism Value: A. thaliana
  misc_feature: MA Experiment 20001904 PARAMETER Experiment Name: At_Drought_Reproduction_P Parameter: Plant Line Value: WS
  misc_feature: MA Experiment 20001904 PARAMETER Experiment Name: At_Drought_Reproduction_P Parameter: Timepoint (day) Value: 7
  misc_feature: MA Experiment 20001904 PARAMETER Experiment Name: At_Drought_Reproduction_P Parameter: Tissue Value: Rosettes
  misc_feature: MA Experiment 20001904 PARAMETER Experiment Name: At_Drought_Reproduction_P Parameter: Treatment Value: Drought vs. No Drought
  misc_feature: MA Experiment ID: 20001905 Result: Down-regulated in Transcription
  misc_feature: MA Experiment 20001905 PARAMETER Experiment Name: At_Drought_Reproduction_P Parameter: Age (day) Value: 40
  misc_feature: MA Experiment 20001905 PARAMETER Experiment Name: At_Drought_Reproduction_P Parameter: Organism Value: A. thaliana
  misc_feature: MA Experiment 20001905 PARAMETER Experiment Name: At_Drought_Reproduction_P Parameter: Plant Line Value: WS
  misc_feature: MA Experiment 20001905 PARAMETER Experiment Name: At_Drought_Reproduction_P Parameter: Timepoint (day) Value: 10
  misc_feature: MA Experiment 20001905 PARAMETER Experiment Name: At_Drought_Reproduction_P Parameter: Tissue Value: Rosettes
  misc_feature: MA Experiment 20001905 PARAMETER Experiment Name: At_Drought_Reproduction_P Parameter: Treatment Value: Drought vs. No Drought
atcagcatcactaaactcgaaccctaaagaaaaacaaaaatggctgccatagcttctactctctctctttcttcaaccaaacctcagagacttttcgattcttccttccatggctcagccatctccgcagctcctatctccatcggtctcaaaccacgatctttctccgttcgcgccacaaccgctggttacgacttgaacgctttcacgttcgacccgatcaaggaatcgatcgtgtcacgtgagatgacgagaaggtacatgacggatatgatcacttatgctgagactgatgtcgtcgtcgttggtgctggatctgctggtttatctgctgcttatgagatcagtaagaaccctaatgttcaagttgccattattgagcaatctgttagtcctggtggtggtgcttggctcggtggtcagcttttctccgccatgattgttcgcaaaccagctcacttgttccttgacgagattggtgtggcttacgatgagcaagacacctacgttgtggttaagcacgcggctctgttcacatcaaccatcatgagcaagcttttggctcgtcctaatgtgaagctcttcaacgctgtggctgctgaggatttgattgtgaaaggaaacagagttggtggtgtggtgactaactgggctcttgtggctcagaaccaccacacacaatcgtgtatggaccctaatgttatggaagcgaagattgtggttagctcttgtggtcatgatggtccttttggagctactggtgttaagaggttgaagagtattgggatgattgatcatgttcctgggatgaaagctttggacatgaacactgctgaggacgctattgtgaggttgaccagagaggttgttcctggtatgattgttaccggtatggaagttgctgagatcgatggtgcaccgagaatgggaccaacttttggtgctatgatgatatcgggacaaaaggcgggacaacttgctcttaaggctttggggctaccgaatgctattgacggaactctcgttggaaacctaagcccggagctggtcttagccgcagcagattcagctgaaaccgtagatgcttaaaatcaaaaggttttaacgttaagaaaagtttcccttgatccttcggatgttgaaggagtgcaataaaaggagtttaggtgtttaatatgtcttgaacttttctggtgtctttgtttctctcttctgaacttctgtgtaaaatatcgtatccgttcattcgtaatgcgtatgttctcgttcttctccttctttatggctctagtacaagcagctttctcgttgtcgttggcaatacaaaatctgtctaaatttgagggatgagattagtgttggatgtcggattcttgtcttcaattctgattcttatccttgaagaaattatgtatagatagagctattcaatgtctatagtttctctgctgatgaaagaacgaagagttttatgattttagattcagagaacagaggaaaactgtgaaat

SEQ ID NO: 77241 - protein, 349 aa, Arabidopsis thaliana; identical to SEQ ID NO: 76367
  peptide (1)..(349): Ceres Seq. ID no. 12562661
  misc_feature (57)..(300): Pfam Name: Thi4 family Pfam Description: Thi4 family
  misc_feature (1)..(349): Homolog of NCBI NO: 15239735 NR Description: thiazole biosynthetic enzyme precursor (ARA6) (sp protein id: At5g54770.1, supported by cDNA: gi_1113782, supported cDNA: gi_15809896, supported by cDNA: gi_16226383, supported by
  misc_feature (1)..(349): Homolog of NCBI NO: 6094476 NR Description: Thiazole biosynthetic enzyme, chloroplast
  misc_feature (4)..(349): Homolog of NCBI NO: 2501187 NR Description: Thiazole biosynthetic enzyme, chloroplast (AG6) >gi|1289204|emb|CAA66064.1| thaizole biosynthetic enzmye
  misc_feature (1)..(349): Homolog of NCBI NO: 30013665 NR Description: putative chloroplast thiazole biosynthetic

SEQ ID NO: 77242 - protein, 280 aa, Arabidopsis thaliana; identical to SEQ ID NO: 76368
  peptide (1)..(280): Ceres Seq. ID no. 12562662
  misc_feature (1)..(231): Pfam Name: Thi4 family Pfam Description: Thi4 family
  misc_feature (1)..(280): Homolog of NCBI NO: 15239735 NR Description: thiazole biosynthetic enzyme precursor (ARA6) (sp protein id: At5g54770.1, supported by cDNA: gi_1113782, supported cDNA: gi_15809896, supported by cDNA: gi_16226383, supported by
  misc_feature (1)..(280): Homolog of NCBI NO: 6094476 NR Description: Thiazole biosynthetic enzyme, chloroplast
  misc_feature (1)..(280): Homolog of NCBI NO: 2501187 NR Description: Thiazole biosynthetic enzyme, chloroplast (AG6) >gi|1289204|emb|CAA66064.1| thaizole biosynthetic enzmye
  misc_feature (1)..(280): Homolog of NCBI NO: 30013665 NR Description: putative chloroplast thiazole biosynthetic

SEQ ID NO: 77243 - protein, 275 aa, Arabidopsis thaliana
  peptide (1)..(275): Ceres Seq. ID no. 12562663
  misc_feature (1)..(226): Pfam Name: Thi4 family Pfam Description: Thi4 family
  misc_feature (1)..(275): Homolog of NCBI NO: 15239735 NR Description: thiazole biosynthetic enzyme precursor (ARA6) (sp protein id: At5g54770.1, supported by cDNA: gi_1113782, supported cDNA: gi_15809896, supported by cDNA: gi_16226383, supported by
  misc_feature (1)..(275): Homolog of NCBI NO: 6094476 NR Description: Thiazole biosynthetic enzyme, chloroplast
  misc_feature (1)..(275): Homolog of NCBI NO: 2501187 NR Description: Thiazole biosynthetic enzyme, chloroplast (AG6) >gi|1289204|emb|CAA66064.1| thaizole biosynthetic enzmye
  misc_feature (1)..(275): Homolog of NCBI NO: 30013665 NR Description: putative chloroplast thiazole biosynthetic
MTDMITYAETDVVVVGAGSAGLSAAYEISKNPNVQVAIIEQSVSPGGGAWLGGQLFSAMIVRKPAHLFLDEIGVAYDEQDTYVVVKHAALFTSTIMSKLLARPNVKLFNAVAAEDLIVKGNRVGGVVTNWALVAQNHHTQSCMDPNVMEAKIVVSSCGHDGPFGATGVKRLKSIGMIDHVPGMKALDMNTAEDAIVRLTREVVPGMIVTGMEVAEIDGAPRMGPTFGAMMISGQKAGQLALKALGLPNAIDGTLVGNLSPELVLAAADSAETVDA

SEQ ID NO: 77244 - DNA, 1973 bp, Arabidopsis thaliana
  misc_feature (1)..(1973): Ceres Seq. ID no. 12562687
  misc_feature: MA Experiment ID: 108462 Result: Up-regulated in Transcription
  misc_feature: MA Experiment 108462 PARAMETER Experiment Name: At_Germinating_Seeds_cDNA_P Parameter: Age (day) Value: 2 vs. 0
  misc_feature: MA Experiment 108462 PARAMETER Experiment Name: At_Germinating_Seeds_cDNA_P Parameter: Tissue Value: Germinating Seeds
  misc_feature: MA Experiment ID: 108463 Result: Up-regulated in Transcription
  misc_feature: MA Experiment 108463 PARAMETER Experiment Name: At_Germinating_Seeds_cDNA_P Parameter: Age (day) Value: 3 vs. 0
  misc_feature: MA Experiment 108463 PARAMETER Experiment Name: At_Germinating_Seeds_cDNA_P Parameter: Tissue Value: Germinating Seeds
  misc_feature: MA Experiment ID: 108464 Result: Up-regulated in Transcription
  misc_feature: MA Experiment 108464 PARAMETER Experiment Name: At_Germinating_Seeds_cDNA_P Parameter: Age (day) Value: 4 vs. 0
  misc_feature: MA Experiment 108464 PARAMETER Experiment Name: At_Germinating_Seeds_cDNA_P Parameter: Tissue Value: Germinating Seeds
  misc_feature: MA Experiment ID: 108561 Result: Up-regulated in Transcription
  misc_feature: MA Experiment 108561 PARAMETER Experiment Name: At_100uM_ABA_cDNA_P Parameter: Timepoint (hr) Value: 6
  misc_feature: MA Experiment 108561 PARAMETER Experiment Name: At_100uM_ABA_cDNA_P Parameter: Tissue Value: Aerial
  misc_feature: MA Experiment 108561 PARAMETER Experiment Name: At_100uM_ABA_cDNA_P Parameter: Treatment Value: 100uM ABA vs. No Treatment
  misc_feature: MA Experiment ID: 108572 Result: Up-regulated in Transcription
  misc_feature: MA Experiment 108572 PARAMETER Experiment Name: At_Drought_cDNA_P Parameter: Timepoint (hr) Value: 1
  misc_feature: MA Experiment 108572 PARAMETER Experiment Name: At_Drought_cDNA_P Parameter: Tissue Value: Aerial
  misc_feature: MA Experiment 108572 PARAMETER Experiment Name: At_Drought_cDNA_P Parameter: Treatment Value: Drought vs. No Drought
  misc_feature: MA Experiment ID: 108573 Result: Up-regulated in Transcription
  misc_feature: MA Experiment 108573 PARAMETER Experiment Name: At_Drought_cDNA_P Parameter: Timepoint (hr) Value: 6
  misc_feature: MA Experiment 108573 PARAMETER Experiment Name: At_Drought_cDNA_P Parameter: Tissue Value: Aerial
  misc_feature: MA Experiment 108573 PARAMETER Experiment Name: At_Drought_cDNA_P Parameter: Treatment Value: Drought vs. No Drought
  misc_feature: MA Experiment ID: 108595 Result: Down-regulated in Transcription
  misc_feature: MA Experiment 108595 PARAMETER Experiment Name: At_Ler-pi_Ovule_cDNA_P Parameter: Plant Line Value: null
  misc_feature: MA Experiment ID: 108605 Result: Up-regulated in Transcription
  misc_feature: MA Experiment 108605 PARAMETER Experiment Name: At_100uM_ABA_cDNA_P Parameter: Timepoint (hr) Value: 6
  misc_feature: MA Experiment 108605 PARAMETER Experiment Name: At_100uM_ABA_cDNA_P Parameter: Tissue Value: Aerial
  misc_feature: MA Experiment 108605 PARAMETER Experiment Name: At_100uM_ABA_cDNA_P Parameter: Treatment Value: 100uM ABA vs. No Treatment
  misc_feature: MA Experiment ID: 108607 Result: Up-regulated in Transcription
  misc_feature: MA Experiment 108607 PARAMETER Experiment Name: At_100uM_ABA_cDNA_P Parameter: Timepoint (hr) Value: 4
  misc_feature: MA Experiment 108607 PARAMETER Experiment Name: At_100uM_ABA_cDNA_P Parameter: Tissue Value: Aerial
  misc_feature: MA Experiment 108607 PARAMETER Experiment Name: At_100uM_ABA_cDNA_P Parameter: Treatment Value: 100uM ABA vs. No Treatment
  misc_feature: MA Experiment ID: 108609 Result: Up-regulated in Transcription
  misc_feature: MA Experiment 108609 PARAMETER Experiment Name: At_100uM_ABA_cDNA_P Parameter: Timepoint (hr) Value: 24
  misc_feature: MA Experiment 108609 PARAMETER Experiment Name: At_100uM_ABA_cDNA_P Parameter: Tissue Value: Aerial
  misc_feature: MA Experiment 108609 PARAMETER Experiment Name: At_100uM_ABA_cDNA_P Parameter: Treatment Value: 100uM ABA vs. No Treatment
  misc_feature: MA Experiment ID: 20000069 Result: Up-regulated in Transcription
  misc_feature: MA Experiment 20000069 PARAMETER Experiment Name: At_100uM_ABA_Mutants_cDNA_P Parameter: Plant Line Value: CS23
  misc_feature: MA Experiment 20000069 PARAMETER Experiment Name: At_100uM_ABA_Mutants_cDNA_P Parameter: Timepoint (hr) Value: 6
  misc_feature: MA Experiment 20000069 PARAMETER Experiment Name: At_100uM_ABA_Mutants_cDNA_P Parameter: Tissue Value: Aerial
  misc_feature: MA Experiment 20000069 PARAMETER Experiment Name: At_100uM_ABA_Mutants_cDNA_P Parameter: Treatment Value: 100uM ABA vs. No Treatment
  misc_feature: MA Experiment ID: 20000070 Result: Up-regulated in Transcription
  misc_feature: MA Experiment 20000070 PARAMETER Experiment Name: At_100uM_ABA_Mutants_cDNA_P Parameter: Plant Line Value: CS24
  misc_feature: MA Experiment 20000070 PARAMETER Experiment Name: At_100uM_ABA_Mutants_cDNA_P Parameter: Timepoint (hr) Value: 6
  misc_feature: MA Experiment 20000070 PARAMETER Experiment Name: At_100uM_ABA_Mutants_cDNA_P Parameter: Tissue Value: Aerial
  misc_feature: MA Experiment 20000070 PARAMETER Experiment Name: At_100uM_ABA_Mutants_cDNA_P Parameter: Treatment Value: 100uM ABA vs. No Treatment
  misc_feature: MA Experiment ID: 20000071 Result: Up-regulated in Transcription
  misc_feature: MA Experiment 20000071 PARAMETER Experiment Name: At_100uM_ABA_Mutants_cDNA_P Parameter: Plant Line Value: CS8104
  misc_feature: MA Experiment 20000071 PARAMETER Experiment Name: At_100uM_ABA_Mutants_cDNA_P Parameter: Timepoint (hr) Value: 6
  misc_feature: MA Experiment 20000071 PARAMETER Experiment Name: At_100uM_ABA_Mutants_cDNA_P Parameter: Tissue Value: Aerial
  misc_feature: MA Experiment 20000071 PARAMETER Experiment Name: At_100uM_ABA_Mutants_cDNA_P Parameter: Treatment Value: 100uM ABA vs. No Treatment
  misc_feature: MA Experiment ID: 20000072 Result: Up-regulated in Transcription
  misc_feature: MA Experiment 20000072 PARAMETER Experiment Name: At_100uM_ABA_Mutants_cDNA_P Parameter: Plant Line Value: CS8105
  misc_feature: MA Experiment 20000072 PARAMETER Experiment Name: At_100uM_ABA_Mutants_cDNA_P Parameter: Timepoint (hr) Value: 6
  misc_feature: MA Experiment 20000072 PARAMETER Experiment Name: At_100uM_ABA_Mutants_cDNA_P Parameter: Tissue Value: Aerial
  misc_feature: MA Experiment 20000072 PARAMETER Experiment Name: At_100uM_ABA_Mutants_cDNA_P Parameter: Treatment Value: 100uM ABA vs. No Treatment
  misc_feature: MA Experiment ID: 20000086 Result: Up-regulated in Transcription
  misc_feature: MA Experiment 20000086 PARAMETER Experiment Name: At_100uM_ABA_Mutants_cDNA_P Parameter: Plant Line Value: CS22
  misc_feature: MA Experiment 20000086 PARAMETER Experiment Name: At_100uM_ABA_Mutants_cDNA_P Parameter: Timepoint (hr) Value: 6
  misc_feature: MA Experiment 20000086 PARAMETER Experiment Name: At_100uM_ABA_Mutants_cDNA_P Parameter: Tissue Value: Aerial
  misc_feature: MA Experiment 20000086 PARAMETER Experiment Name: At_100uM_ABA_Mutants_cDNA_P Parameter: Treatment Value: 100uM ABA vs. No Treatment
  misc_feature: MA Experiment ID: 20000087 Result: Up-regulated in Transcription
  misc_feature: MA Experiment 20000087 PARAMETER Experiment Name: At_100uM_ABA_Mutants_cDNA_P Parameter: Plant Line Value: WS
  misc_feature: MA Experiment 20000087 PARAMETER Experiment Name: At_100uM_ABA_Mutants_cDNA_P Parameter: Timepoint (hr) Value: 6
  misc_feature: MA Experiment 20000087 PARAMETER Experiment Name: At_100uM_ABA_Mutants_cDNA_P Parameter: Tissue Value: Aerial
  misc_feature: MA Experiment 20000087 PARAMETER Experiment Name: At_100uM_ABA_Mutants_cDNA_P Parameter: Treatment Value: 100uM ABA vs. No Treatment
  misc_feature: MA Experiment ID: 20000088 Result: Up-regulated in Transcription
  misc_feature: MA Experiment 20000088 PARAMETER Experiment Name: At_100uM_ABA_Mutants_cDNA_P Parameter: Plant Line Value: Landsberg
  misc_feature: MA Experiment 20000088 PARAMETER Experiment Name: At_100uM_ABA_Mutants_cDNA_P Parameter: Timepoint (hr) Value: 6
  misc_feature: MA Experiment 20000088 PARAMETER Experiment Name: At_100uM_ABA_Mutants_cDNA_P Parameter: Tissue Value: Aerial
  misc_feature: MA Experiment 20000088 PARAMETER Experiment Name: At_100uM_ABA_Mutants_cDNA_P Parameter: Treatment Value: 100uM ABA vs. No Treatment
  misc_feature: MA Experiment ID: 20000113 Result: Down-regulated in Transcription
  misc_feature: MA Experiment 20000113 PARAMETER Experiment Name: At_42deg_Heat_cDNA_P Parameter: Temperature (deg C) Value: 42 vs. 22
  misc_feature: MA Experiment 20000113 PARAMETER Experiment Name: At_42deg_Heat_cDNA_P Parameter: Timepoint (hr) Value: 8
  misc_feature: MA Experiment 20000113 PARAMETER Experiment Name: At_42deg_Heat_cDNA_P Parameter: Tissue Value: Aerial
  misc_feature: MA Experiment ID: 20000117 Result: Up-regulated in Transcription
  misc_feature: MA Experiment 20000117 PARAMETER Experiment Name: At_100uM_ABA_Mutants_cDNA_P Parameter: Plant Line Value: Columbia
  misc_feature: MA Experiment 20000117 PARAMETER Experiment Name: At_100uM_ABA_Mutants_cDNA_P Parameter: Timepoint (hr) Value: 6
  misc_feature: MA Experiment 20000117 PARAMETER Experiment Name: At_100uM_ABA_Mutants_cDNA_P Parameter: Tissue Value: Aerial
  misc_feature: MA Experiment 20000117 PARAMETER Experiment Name: At_100uM_ABA_Mutants_cDNA_P Parameter: Treatment Value: 100uM ABA vs. No Treatment
  misc_feature: MA Experiment ID: 20000169 Result: Up-regulated in Transcription
  misc_feature: MA Experiment 20000169 PARAMETER Experiment Name: At_100uM_ABA_P Parameter: Age (day) Value: 14
  misc_feature: MA Experiment 20000169 PARAMETER Experiment Name: At_100uM_ABA_P Parameter: Organism Value: A. thaliana
  misc_feature: MA Experiment 20000169 PARAMETER Experiment Name: At_100uM_ABA_P Parameter: Plant Line Value: WS
  misc_feature: MA Experiment 20000169 PARAMETER Experiment Name: At_100uM_ABA_P Parameter: Timepoint (hr) Value: 6
  misc_feature: MA Experiment 20000169 PARAMETER Experiment Name: At_100uM_ABA_P Parameter: Tissue Value: Aerial
  misc_feature: MA Experiment 20000169 PARAMETER Experiment Name: At_100uM_ABA_P Parameter: Treatment Value: 100uM ABA vs. No Treatment
  misc_feature: MA Experiment ID: 20000180 Result: Up-regulated in Transcription
  misc_feature: MA Experiment 20000180 PARAMETER Experiment Name: At_Germinating_Seeds_P Parameter: Age (hr) Value: 24 vs. 0
  misc_feature: MA Experiment 20000180 PARAMETER Experiment Name: At_Germinating_Seeds_P Parameter: Tissue Value: Germinating Seeds
  misc_feature: MA Experiment ID: 20000184 Result: Down-regulated in Transcription
  misc_feature: MA Experiment 20000184 PARAMETER Experiment Name: At_Shoots__P Parameter: Age (day) Value: 7
  misc_feature: MA Experiment 20000184 PARAMETER Experiment Name: At_Shoots__P Parameter: Tissue Value: Shoots vs. Whole Plant
  misc_feature: MA Experiment ID: 20000224 Result: Up-regulated in Transcription
  misc_feature: MA Experiment ID: 20000234 Result: Down-regulated in Transcription
  misc_feature: MA Experiment 20000234 PARAMETER Experiment Name: At_Siliques_P Parameter: Age (day) Value: 21
  misc_feature: MA Experiment 20000234 PARAMETER Experiment Name: At_Siliques_P Parameter: Organism Value: A. thaliana
  misc_feature: MA Experiment 20000234 PARAMETER Experiment Name: At_Siliques_P Parameter: Plant Line Value: WS
  misc_feature: MA Experiment 20000234 PARAMETER Experiment Name: At_Siliques_P Parameter: Tissue Value: Less Than 5mm Siliques vs. Whole Plant
  misc_feature: MA Experiment ID: 20000267 Result: Up-regulated in Transcription
  misc_feature: MA Experiment 20000267 PARAMETER Experiment Name: At_Drought_P Parameter: Age (day) Value: 7
  misc_feature: MA Experiment 20000267 PARAMETER Experiment Name: At_Drought_P Parameter: Organism Value: A. thaliana
  misc_feature: MA Experiment 20000267 PARAMETER Experiment Name: At_Drought_P Parameter: Plant Line Value: WS
  misc_feature: MA Experiment 20000267 PARAMETER Experiment Name: At_Drought_P Parameter: Timepoint (hr) Value: 6
  misc_feature: MA Experiment 20000267 PARAMETER Experiment Name: At_Drought_P Parameter: Tissue Value: Whole Plant
  misc_feature: MA Experiment 20000267 PARAMETER Experiment Name: At_Drought_P Parameter: Treatment Value: Drought vs. No Drought
  misc_feature: MA Experiment ID: 20000268 Result: Up-regulated in Transcription
  misc_feature: MA Experiment 20000268 PARAMETER Experiment Name: At_100mM_NaCl__P Parameter: Age (day) Value: 14
  misc_feature: MA Experiment 20000268 PARAMETER Experiment Name: At_100mM_NaCl__P Parameter: Organism Value: A. thaliana
  misc_feature: MA Experiment 20000268 PARAMETER Experiment Name: At_100mM_NaCl__P Parameter: Plant Line Value: WS
  misc_feature: MA Experiment 20000268 PARAMETER Experiment Name: At_100mM_NaCl__P Parameter: Timepoint (hr) Value: 6
  misc_feature: MA Experiment 20000268 PARAMETER Experiment Name: At_100mM_NaCl__P Parameter: Tissue Value: Whole Plant
  misc_feature: MA Experiment 20000268 PARAMETER Experiment Name: At_100mM_NaCl__P Parameter: Treatment Value: 100mM NaCl vs. No Treatment
  misc_feature: MA Experiment ID: 20000436 Result: Up-regulated in Transcription
  misc_feature: MA Experiment 20000436 PARAMETER Experiment Name: At_Drought_P Parameter: Age (day) Value: 7
  misc_feature: MA Experiment 20000436 PARAMETER Experiment Name: At_Drought_P Parameter: Organism Value: A. thaliana
  misc_feature: MA Experiment 20000436 PARAMETER Experiment Name: At_Drought_P Parameter: Plant Line Value: WS
  misc_feature: MA Experiment 20000436 PARAMETER Experiment Name: At_Drought_P Parameter: Timepoint (hr) Value: 12
  misc_feature: MA Experiment 20000436 PARAMETER Experiment Name: At_Drought_P Parameter: Tissue Value: Whole Plant
  misc_feature: MA Experiment 20000436 PARAMETER Experiment Name: At_Drought_P Parameter: Treatment Value: Drought vs. No Drought
  misc_feature: MA Experiment ID: 20000437 Result: Up-regulated in Transcription
  misc_feature: MA Experiment 20000437 PARAMETER Experiment Name: At_Drought_P Parameter: Age (day) Value: 8
  misc_feature: MA Experiment 20000437 PARAMETER Experiment Name: At_Drought_P Parameter: Organism Value: A. thaliana
  misc_feature: MA Experiment 20000437 PARAMETER Experiment Name: At_Drought_P Parameter: Plant Line Value: WS
  misc_feature: MA Experiment 20000437 PARAMETER Experiment Name: At_Drought_P Parameter: Timepoint (hr) Value: 24
  misc_feature: MA Experiment 20000437 PARAMETER Experiment Name: At_Drought_P Parameter: Tissue Value: Whole Plant
  misc_feature: MA Experiment 20000437 PARAMETER Experiment Name: At_Drought_P Parameter: Treatment Value: Drought vs. No Drought
  misc_feature: MA Experiment ID: 20000439 Result: Down-regulated in Transcription
  misc_feature: MA Experiment 20000439 PARAMETER Experiment Name: At_Roots__P Parameter: Age (day) Value: 14 vs. 21
  misc_feature: MA Experiment 20000439 PARAMETER Experiment Name: At_Roots__P Parameter: Organism Value: A. thaliana
  misc_feature: MA Experiment 20000439 PARAMETER Experiment Name: At_Roots__P Parameter: Tissue Value: Roots vs. Whole Plant
  misc_feature: MA Experiment ID: 20000453 Result: Up-regulated in Transcription
  misc_feature: MA Experiment 20000453 PARAMETER Experiment Name: At_100uM_ABA_P Parameter: Age (day) Value: 15
  misc_feature: MA Experiment 20000453 PARAMETER Experiment Name: At_100uM_ABA_P Parameter: Organism Value: A. thaliana
  misc_feature: MA Experiment 20000453 PARAMETER Experiment Name: At_100uM_ABA_P Parameter: Plant Line Value: WS
  misc_feature: MA Experiment 20000453 PARAMETER Experiment Name: At_100uM_ABA_P Parameter: Timepoint (hr) Value: 24
  misc_feature: MA Experiment 20000453 PARAMETER Experiment Name: At_100uM_ABA_P Parameter: Tissue Value: Aerial
  misc_feature: MA Experiment 20000453 PARAMETER Experiment Name: At_100uM_ABA_P Parameter: Treatment Value: 100uM ABA vs. No Treatment
  misc_feature: MA Experiment ID: 20000495 Result: Down-regulated in Transcription
  misc_feature: MA Experiment 20000495 PARAMETER Experiment Name: At_Guard_Cells_P Parameter: Harvest Date Value: 8/2/2002
  misc_feature: MA Experiment 20000495 PARAMETER Experiment Name: At_Guard_Cells_P Parameter: Organism Value: A. thaliana
  misc_feature: MA Experiment 20000495 PARAMETER Experiment Name: At_Guard_Cells_P Parameter: Tissue Value: Guard Cells vs. Leaves
  misc_feature: MA Experiment ID: 20001451 Result: Down-regulated in Transcription
  misc_feature: MA Experiment 20001451 PARAMETER Experiment Name: At_Far-red-induction_P Parameter: Age (day) Value: 7
  misc_feature: MA Experiment 20001451 PARAMETER Experiment Name: At_Far-red-induction_P Parameter: Light Value: Far-red vs. White
  misc_feature: MA Experiment 20001451 PARAMETER Experiment Name: At_Far-red-induction_P Parameter: Organism Value: A. thaliana
  misc_feature: MA Experiment 20001451 PARAMETER Experiment Name: At_Far-red-induction_P Parameter: Plant Line Value: Columbia
  misc_feature: MA Experiment 20001451 PARAMETER Experiment Name: At_Far-red-induction_P Parameter: Timepoint (hr) Value: 24
  misc_feature: MA Experiment 20001451 PARAMETER Experiment Name: At_Far-red-induction_P Parameter: Tissue Value: Whole Plant
  misc_feature: MA Experiment ID: 20001554 Result: Up-regulated in Transcription
  misc_feature: MA Experiment 20001554 PARAMETER Experiment Name: At_Drought_Soil_Dry_P Parameter: Age (day) Value: 21
  misc_feature: MA Experiment 20001554 PARAMETER Experiment Name: At_Drought_Soil_Dry_P Parameter: Organism Value: A. thaliana
  misc_feature: MA Experiment 20001554 PARAMETER Experiment Name: At_Drought_Soil_Dry_P Parameter: Plant Line Value: WS
  misc_feature: MA Experiment 20001554 PARAMETER Experiment Name: At_Drought_Soil_Dry_P Parameter: Post Timepoint (hr) Value: None
  misc_feature: MA Experiment 20001554 PARAMETER Experiment Name: At_Drought_Soil_Dry_P Parameter: Post-Treatment Value: None
  misc_feature: MA Experiment 20001554 PARAMETER Experiment Name: At_Drought_Soil_Dry_P Parameter: Timepoint (day) Value: 7
  misc_feature: MA Experiment 20001554 PARAMETER Experiment Name: At_Drought_Soil_Dry_P Parameter: Treatment Value: Drought vs. No Drought
  misc_feature: MA Experiment ID: 20001555 Result: Up-regulated in Transcription
  misc_feature: MA Experiment 20001555 PARAMETER Experiment Name: At_Drought_Soil_Dry_P Parameter: Age (day) Value: 24
  misc_feature: MA Experiment 20001555 PARAMETER Experiment Name: At_Drought_Soil_Dry_P Parameter: Organism Value: A. thaliana
  misc_feature: MA Experiment 20001555 PARAMETER Experiment Name: At_Drought_Soil_Dry_P Parameter: Plant Line Value: WS
  misc_feature: MA Experiment 20001555 PARAMETER Experiment Name: At_Drought_Soil_Dry_P Parameter: Post Timepoint (hr) Value: None
  misc_feature: MA Experiment 20001555 PARAMETER Experiment Name: At_Drought_Soil_Dry_P Parameter: Post-Treatment Value: None
  misc_feature: MA Experiment 20001555 PARAMETER Experiment Name: At_Drought_Soil_Dry_P Parameter: Timepoint (day) Value: 10
  misc_feature: MA Experiment 20001555 PARAMETER Experiment Name: At_Drought_Soil_Dry_P Parameter: Treatment Value: Drought vs. No Drought
  misc_feature: MA Experiment ID: 20001558 Result: Down-regulated in Transcription
  misc_feature: MA Experiment 20001558 PARAMETER Experiment Name: At_Drought_Soil_Dry_P Parameter: Age (day) Value: 27
  misc_feature: MA Experiment 20001558 PARAMETER Experiment Name: At_Drought_Soil_Dry_P Parameter: Organism Value: A. thaliana
  misc_feature: MA Experiment 20001558 PARAMETER Experiment Name: At_Drought_Soil_Dry_P Parameter: Plant Line Value: WS
  misc_feature: MA Experiment 20001558 PARAMETER Experiment Name: At_Drought_Soil_Dry_P Parameter: Post Timepoint (hr) Value: 6
  misc_feature: MA Experiment 20001558 PARAMETER Experiment Name: At_Drought_Soil_Dry_P Parameter: Post-Treatment Value: Re-Water vs. No Drought
  misc_feature: MA Experiment 20001558 PARAMETER Experiment Name: At_Drought_Soil_Dry_P Parameter: Timepoint (day) Value: 13
  misc_feature: MA Experiment 20001558 PARAMETER Experiment Name: At_Drought_Soil_Dry_P Parameter: Treatment Value: Drought vs. No Drought
  misc_feature: MA Experiment ID: 20001559 Result: Up-regulated in Transcription
  misc_feature: MA Experiment 20001559 PARAMETER Experiment Name: At_Drought_Soil_Dry_P Parameter: Age (day) Value: 28
  misc_feature: MA Experiment 20001559 PARAMETER Experiment Name: At_Drought_Soil_Dry_P Parameter: Organism Value: A. thaliana
  misc_feature: MA Experiment 20001559 PARAMETER Experiment Name: At_Drought_Soil_Dry_P Parameter: Plant Line Value: WS
  misc_feature: MA Experiment 20001559 PARAMETER Experiment Name: At_Drought_Soil_Dry_P Parameter: Post Timepoint (hr) Value: 29
  misc_feature: MA Experiment 20001559 PARAMETER Experiment Name: At_Drought_Soil_Dry_P Parameter: Post-Treatment Value: Re-Water vs. No Drought
  misc_feature: MA Experiment 20001559 PARAMETER Experiment Name: At_Drought_Soil_Dry_P Parameter: Timepoint (day) Value: 14
  misc_feature: MA Experiment 20001559 PARAMETER Experiment Name: At_Drought_Soil_Dry_P Parameter: Treatment Value: Drought vs. No Drought
  misc_feature: MA Experiment ID: 20001904 Result: Up-regulated in Transcription
  misc_feature: MA Experiment 20001904 PARAMETER Experiment Name: At_Drought_Reproduction_P Parameter: Age (day) Value: 37
  misc_feature: MA Experiment 20001904 PARAMETER Experiment Name: At_Drought_Reproduction_P Parameter: Organism Value: A. thaliana
  misc_feature: MA Experiment 20001904 PARAMETER Experiment Name: At_Drought_Reproduction_P Parameter: Plant Line Value: WS
  misc_feature: MA Experiment 20001904 PARAMETER Experiment Name: At_Drought_Reproduction_P Parameter: Timepoint (day) Value: 7
  misc_feature: MA Experiment 20001904 PARAMETER Experiment Name: At_Drought_Reproduction_P Parameter: Tissue Value: Rosettes
  misc_feature: MA Experiment 20001904 PARAMETER Experiment Name: At_Drought_Reproduction_P Parameter: Treatment Value: Drought vs. No Drought
  misc_feature: MA Experiment ID: 20001905 Result: Up-regulated in Transcription
  misc_feature: MA Experiment 20001905 PARAMETER Experiment Name: At_Drought_Reproduction_P Parameter: Age (day) Value: 40
  misc_feature: MA Experiment 20001905 PARAMETER Experiment Name: At_Drought_Reproduction_P Parameter: Organism Value: A. thaliana
  misc_feature: MA Experiment 20001905 PARAMETER Experiment Name: At_Drought_Reproduction_P Parameter: Plant Line Value: WS
  misc_feature: MA Experiment 20001905 PARAMETER Experiment Name: At_Drought_Reproduction_P Parameter: Timepoint (day) Value: 10
  misc_feature: MA Experiment 20001905 PARAMETER Experiment Name: At_Drought_Reproduction_P Parameter: Tissue Value: Rosettes
  misc_feature: MA Experiment 20001905 PARAMETER Experiment Name: At_Drought_Reproduction_P Parameter: Treatment Value: Drought vs. No Drought
attttaaatagtctctttcgtttatgtatatcacaaatacatatcacaacgttcatatttgcaatgtgccaaaatcctccacgtgttaaatccatttgttcatagtttctcgttacaagacaacaaatggtatcaatgtccacggaaaaattgcatacttgcacgcaatctcttcttcttcttcttcgttcttctcgtagcttgaaataagattcatcagaagagtaaataaacatcaaaatccaacaaaccaaactagaaaaatgtcagtagttttactctcttctacttctgcaacaatcaccaaatcccaatccaaaaagattccctttttatctcccaccacaaaattcccattaaaggtctcaatttctccatcaagatcgaaacttttccacaaccctttacgcgtggcggcgccgccgtctgtacccacttcggattcgacggaggagaagcggatcgaagaagaatacggcggagataaggaagaagaagggtctgagtttaagtggagagatcattggtatccagtttctttggttgaggatttggatccgaatgtgccaaccccgttccagctcttgggtcgagaccttgtactctggtttgatcggaatgatcagaaatgggcagcctttgatgatctctgccctcaccggctcgctcctttatctgaaggaaggttggatgagaatggacacttgcaatgttcgtatcatggatggtcatttggtgggtgtggatcttgcactaggattcctcaggctgctacttcaggtcctgaagctcgtgctgttaaatccccgagagcttgtgctattaagttcccgacaatggtgtctcaaggtcttctctttgtgtggcctgatgaaaatggttgggatagagccaattcaattgaaccccctaggttgccggatgatttcgataaaccggaattttcgacggtgacaattcaaagggatcttttctatggatatgatactctcatggaaaatgtatctgatccttcccatatagattttgctcatcacaaggttacaggaagaagagacagagccaaaccattgccgttcaaggtggagtcaagtgggccttggggtttccaaggtgcgaatgatgacagtccaaggataaccgcaaaatttgttgctccgtgctattctatgaacaaaattgagttagatgcgaaactaccaatcgtcggtaatcaaaaatgggtcatttggatttgctcattcaatataccaatggctccaggaaagacccgttccatcgtttgcagcgcccgtaacttctttcagttctctgtaccaggaccagcttggtggcaggttgtaccaagatggtatgaacactggacttcgaacttagtctatgacggagacatgatcgtacttcaaggacaagagaaagtattcctcgctaaatcaatggagtcaccagactacgacgtgaacaaacagtacacaaagctcacattcactccaacccaggcagaccgttttgttctagcattcagaaactggctcagacggcatggtaagagtcagcctgaatggttcggctccaccccgtctaaccaacctctcccttccactgtcttaaccaagcgtcagatgctagatagatttgatcagcatacacaagtatgctcttcctgcaaaggagcttacaacagtttccaaatcctcaagaagtttctcgttggcgcgacggttttctgggccgccacggctggtgttccttctgatgttcagattcgactggttcttgctggtttatcactgatatcagctgcttctgcatatgctttacatgaacaagagaagaactttgtgtttagagattatgtacattctgaaatcgagtagatttgttgtgtatatgtataatcatcatacaaagtacaaacattgtaaatcaaaatccagaggaacttttagcactataaaaccgatttaaccgtt

SEQ ID NO: 77245 - protein, 537 aa, Arabidopsis thaliana; identical to SEQ ID NO: 28578
  peptide (1)..(537): Ceres Seq. ID no. 12562688
  misc_feature (87)..(196): Pfam Name: Rieske [2Fe-2S] domain Pfam Description: Rieske [2Fe-2S] domain
  misc_feature (1)..(537): Homolog of NCBI NO: 15230543 NR Description: lethal leaf-spot 1 homolog Lls1; protein id: supported by cDNA: gi_20260385 [Arabidopsis thaliana]
  misc_feature (1)..(537): Homolog of NCBI NO: 37962886 NR Description: accelerated cell death 1 [Arabidopsis thaliana]
  misc_feature (29)..(537): Homolog of NCBI NO: 1935914 NR Description: lethal leaf-spot 1 homolog [Arabidopsis thaliana]
  misc_feature (2)..(537): Homolog of NCBI NO: 16973465 NR Description: lethal leaf spot 1-like protein [Lycopersicon
  misc_feature (2)..(537): Homolog of NCBI NO: 30088964 NR Description: lethal leaf spot 1-like protein [Vigna
  misc_feature (21)..(537): Homolog of NCBI NO: 7489721 NR Description: cell death suppressor protein lls1 - maize
  misc_feature (77)..(537): Homolog of NCBI NO: 1935909 NR Description: lethal leaf-spot 1 [Zea mays]
  misc_feature (48)..(537): Homolog of NCBI NO: 15451611 NR Description: Putative cell death suppressor protein [Oryza
  misc_feature (21)..(521): Homolog of NCBI NO: 1935912 NR Description: lethal leaf-spot 1 [Zea mays]
  misc_feature (24)..(534): Homolog of NCBI NO: 30102998 NR Description: putative cell death suppressor protein [Oryza

SEQ ID NO: 77246 - protein, 346 aa, Arabidopsis thaliana; identical to SEQ ID NO: 28579
  peptide (1)..(346): Ceres Seq. ID no. 12562689
  misc_feature (1)..(346): Homolog of NCBI NO: 15230543 NR Description: lethal leaf-spot 1 homolog Lls1; protein id: supported by cDNA: gi_20260385 [Arabidopsis thaliana]
  misc_feature (1)..(346): Homolog of NCBI NO: 37962886 NR Description: accelerated cell death 1 [Arabidopsis thaliana]
  misc_feature (1)..(346): Homolog of NCBI NO: 1935914 NR Description: lethal leaf-spot 1 homolog [Arabidopsis thaliana]
  misc_feature (1)..(346): Homolog of NCBI NO: 16973465 NR Description: lethal leaf spot 1-like protein [Lycopersicon
  misc_feature (1)..(346): Homolog of NCBI NO: 30088964 NR Description: lethal leaf spot 1-like protein [Vigna
  misc_feature (1)..(346): Homolog of NCBI NO: 7489721 NR Description: cell death suppressor protein lls1 - maize
  misc_feature (1)..(346): Homolog of NCBI NO: 1935909 NR Description: lethal leaf-spot 1 [Zea mays]
  misc_feature (1)..(346): Homolog of NCBI NO: 15451611 NR Description: Putative cell death suppressor protein [Oryza
  misc_feature (1)..(330): Homolog of NCBI NO: 1935912 NR Description: lethal leaf-spot 1 [Zea mays]
  misc_feature (1)..(343): Homolog of NCBI NO: 30102998 NR Description: putative cell death suppressor protein [Oryza

SEQ ID NO: 77247 - protein, 294 aa, Arabidopsis thaliana
  peptide (1)..(294): Ceres Seq. ID no. 12562690
  misc_feature (1)..(294): Homolog of NCBI NO: 15230543 NR Description: lethal leaf-spot 1 homolog Lls1; protein id: supported by cDNA: gi_20260385 [Arabidopsis thaliana]
  misc_feature (1)..(294): Homolog of NCBI NO: 37962886 NR Description: accelerated cell death 1 [Arabidopsis thaliana]
  misc_feature (1)..(294): Homolog of NCBI NO: 1935914 NR Description: lethal leaf-spot 1 homolog [Arabidopsis thaliana]
  misc_feature (1)..(294): Homolog of NCBI NO: 16973465 NR Description: lethal leaf spot 1-like protein [Lycopersicon
  misc_feature (1)..(294): Homolog of NCBI NO: 30088964 NR Description: lethal leaf spot 1-like protein [Vigna
  misc_feature (1)..(294): Homolog of NCBI NO: 7489721 NR Description: cell death suppressor protein lls1 - maize
  misc_feature (1)..(294): Homolog of NCBI NO: 1935909 NR Description: lethal leaf-spot 1 [Zea mays]
  misc_feature (1)..(294): Homolog of NCBI NO: 15451611 NR Description: Putative cell death suppressor protein [Oryza
  misc_feature (1)..(278): Homolog of NCBI NO: 1935912 NR Description: lethal leaf-spot 1 [Zea mays]
  misc_feature (1)..(291): Homolog of NCBI NO: 30102998 NR Description: putative cell death suppressor protein [Oryza
MENVSDPSHIDFAHHKVTGRRDRAKPLPFKVESSGPWGFQGANDDSPRITAKFVAPCYSMNKIELDAKLPIVGNQKWVIWICSFNIPMAPGKTRSIVCSARNFFQFSVPGPAWWQVVPRWYEHWTSNLVYDGDMIVLQGQEKVFLAKSMESPDYDVNKQYTKLTFTPTQADRFVLAFRNWLRRHGKSQPEWFGSTPSNQPLPSTVLTKRQMLDRFDQHTQVCSSCKGAYNSFQILKKFLVGATVFWAATAGVPSDVQIRLVLAGLSLISAASAYALHEQEKNFVFRDYVHSEIE

SEQ ID NO: 77248 - DNA, 1393 bp, Arabidopsis thaliana
  misc_feature (1)..(1393): Ceres Seq. ID no. 12574182
  misc_feature: MA Experiment ID: 20000171 Result: Up-regulated in Transcription
  misc_feature: MA Experiment 20000171 PARAMETER Experiment Name: At_42deg_Heat_P Parameter: Age (day) Value: 14
  misc_feature: MA Experiment 20000171 PARAMETER Experiment Name: At_42deg_Heat_P Parameter: Organism Value: A. thaliana
  misc_feature: MA Experiment 20000171 PARAMETER Experiment Name: At_42deg_Heat_P Parameter: Plant Line Value: WS
  misc_feature: MA Experiment 20000171 PARAMETER Experiment Name: At_42deg_Heat_P Parameter: Temperature (deg C) Value: 42 vs. 22
  misc_feature: MA Experiment 20000171 PARAMETER Experiment Name: At_42deg_Heat_P Parameter: Timepoint (hr) Value: 1
  misc_feature: MA Experiment 20000171 PARAMETER Experiment Name: At_42deg_Heat_P Parameter: Tissue Value: Aerial
  misc_feature: MA Experiment ID: 20000173 Result: Up-regulated in Transcription
  misc_feature: MA Experiment 20000173 PARAMETER Experiment Name: At_42deg_Heat_P Parameter: Age (day) Value: 14
  misc_feature: MA Experiment 20000173 PARAMETER Experiment Name: At_42deg_Heat_P Parameter: Organism Value: A. thaliana
  misc_feature: MA Experiment 20000173 PARAMETER Experiment Name: At_42deg_Heat_P Parameter: Plant Line Value: WS
  misc_feature: MA Experiment 20000173 PARAMETER Experiment Name: At_42deg_Heat_P Parameter: Temperature (deg C) Value: 42 vs. 22
  misc_feature: MA Experiment 20000173 PARAMETER Experiment Name: At_42deg_Heat_P Parameter: Timepoint (hr) Value: 6
  misc_feature: MA Experiment 20000173 PARAMETER Experiment Name: At_42deg_Heat_P Parameter: Tissue Value: Aerial
  misc_feature: MA Experiment ID: 20001248 Result: Down-regulated in Transcription
  misc_feature: MA Experiment 20001248 PARAMETER Experiment Name: At_Far-red-induction_P Parameter: Age (day) Value: 7
  misc_feature: MA Experiment 20001248 PARAMETER Experiment Name: At_Far-red-induction_P Parameter: Light Value: Far-red vs. White
  misc_feature: MA Experiment 20001248 PARAMETER Experiment Name: At_Far-red-induction_P Parameter: Organism Value: A. thaliana
  misc_feature: MA Experiment 20001248 PARAMETER Experiment Name: At_Far-red-induction_P Parameter: Plant Line Value: Columbia
  misc_feature: MA Experiment 20001248 PARAMETER Experiment Name: At_Far-red-induction_P Parameter: Timepoint (hr) Value: 4
  misc_feature: MA Experiment 20001248 PARAMETER Experiment Name: At_Far-red-induction_P Parameter: Tissue Value: Whole Plant
  misc_feature: MA Experiment ID: 20001450 Result: Down-regulated in Transcription
  misc_feature: MA Experiment 20001450 PARAMETER Experiment Name: At_Far-red-induction_P Parameter: Age (day) Value: 7
  misc_feature: MA Experiment 20001450 PARAMETER Experiment Name: At_Far-red-induction_P Parameter: Light Value: Far-red vs. White
  misc_feature: MA Experiment 20001450 PARAMETER Experiment Name: At_Far-red-induction_P Parameter: Organism Value: A. thaliana
  misc_feature: MA Experiment 20001450 PARAMETER Experiment Name: At_Far-red-induction_P Parameter: Plant Line Value: Columbia
  misc_feature: MA Experiment 20001450 PARAMETER Experiment Name: At_Far-red-induction_P Parameter: Timepoint (hr) Value: 8
  misc_feature: MA Experiment 20001450 PARAMETER Experiment Name: At_Far-red-induction_P Parameter: Tissue Value: Whole Plant
  misc_feature: MA Experiment ID: 20001451 Result: Down-regulated in Transcription
  misc_feature: MA Experiment 20001451 PARAMETER Experiment Name: At_Far-red-induction_P Parameter: Age (day) Value: 7
  misc_feature: MA Experiment 20001451 PARAMETER Experiment Name: At_Far-red-induction_P Parameter: Light Value: Far-red vs. White
  misc_feature: MA Experiment 20001451 PARAMETER Experiment Name: At_Far-red-induction_P Parameter: Organism Value: A. thaliana
  misc_feature: MA Experiment 20001451 PARAMETER Experiment Name: At_Far-red-induction_P Parameter: Plant Line Value: Columbia
  misc_feature: MA Experiment 20001451 PARAMETER Experiment Name: At_Far-red-induction_P Parameter: Timepoint (hr) Value: 24
  misc_feature: MA Experiment 20001451 PARAMETER Experiment Name: At_Far-red-induction_P Parameter: Tissue Value: Whole Plant
  misc_feature: MA Experiment ID: 20001557 Result: Up-regulated in Transcription
  misc_feature: MA Experiment 20001557 PARAMETER Experiment Name: At_Drought_Soil_Dry_P Parameter: Age (day) Value: 27
  misc_feature: MA Experiment 20001557 PARAMETER Experiment Name: At_Drought_Soil_Dry_P Parameter: Organism Value: A. thaliana
  misc_feature: MA Experiment 20001557 PARAMETER Experiment Name: At_Drought_Soil_Dry_P Parameter: Plant Line Value: WS
  misc_feature: MA Experiment 20001557 PARAMETER Experiment Name: At_Drought_Soil_Dry_P Parameter: Post Timepoint (hr) Value: 3
  misc_feature: MA Experiment 20001557 PARAMETER Experiment Name: At_Drought_Soil_Dry_P Parameter: Post-Treatment Value: Re-Water vs. No Drought
  misc_feature: MA Experiment 20001557 PARAMETER Experiment Name: At_Drought_Soil_Dry_P Parameter: Timepoint (day) Value: 13
  misc_feature: MA Experiment 20001557 PARAMETER Experiment Name: At_Drought_Soil_Dry_P Parameter: Treatment Value: Drought vs. No Drought
  misc_feature: MA Experiment ID: 20001558 Result: Up-regulated in Transcription
  misc_feature: MA Experiment 20001558 PARAMETER Experiment Name: At_Drought_Soil_Dry_P Parameter: Age (day) Value: 27
  misc_feature: MA Experiment 20001558 PARAMETER Experiment Name: At_Drought_Soil_Dry_P Parameter: Organism Value: A. thaliana
  misc_feature: MA Experiment 20001558 PARAMETER Experiment Name: At_Drought_Soil_Dry_P Parameter: Plant Line Value: WS
  misc_feature: MA Experiment 20001558 PARAMETER Experiment Name: At_Drought_Soil_Dry_P Parameter: Post Timepoint (hr) Value: 6
  misc_feature: MA Experiment 20001558 PARAMETER Experiment Name: At_Drought_Soil_Dry_P Parameter: Post-Treatment Value: Re-Water vs. No Drought
  misc_feature: MA Experiment 20001558 PARAMETER Experiment Name: At_Drought_Soil_Dry_P Parameter: Timepoint (day) Value: 13
  misc_feature: MA Experiment 20001558 PARAMETER Experiment Name: At_Drought_Soil_Dry_P Parameter: Treatment Value: Drought vs. No Drought
aaattagtgaagacgaagaagaaggaagctatggattctgagaaggcactagagcttgtgaagcatggagctacacttctatttctcgatgttcctcaatatacactggtcggaatcgatactcagatattcgcagttggaccagctttcaaagggattaagatgatacctcctggaattcactttgtattctatagttcatcgacaagggatggtagagagttttcacccaccattggcttctttgttgatgttgccccttctcaggttattgtacgcaaatggaatcagcaagacgagtggttaaccaaagtgtctgaagaagaggaagagagatattctcaagcagtcaggtctttagagtttgacaaaaatcttggcccatacaatttaaagcaatatggggagtggaggcacttatctaactacattacaaaggatgttgttgaaaagtttgagccagttggaggagaaataacagtcacatatgaatctgctattctaaaaggtggacctaaaacggcaatggaaatagcacttgatacgcagatgaaaaaaagcaagtttacgacatcatctactgagcaacctaaagggaataggttttactacacgtctattcctcggattataaagcacaagggaatgtctggacaggagctaacctctatgaatcttgacaagactcaattgctagaaagcgtattgtcaaaagagtacaaagactcggaagacttgctacttggggagctacaattttcatttgttgcatttttgatgggacagtctcttgaatcgttcatgcagtggaagtccatagttagtcttttactgggctgcaccagtgcgccctttcagacgaggagtcagctatttacaaagttcatcaaagtcatctaccaccaactaaaatatggactacaaaaagagaatagtggtcctgagacgggcattcatgcgcttcttgatgattcttggctagcttcagatagctttctgcatttcctttgtaaggacttctttgcattagtggaagagacgtctgtagttgatggagatttattgtcatggacaaggaagttcaaagagttgcttgagaacagattaggatgggagtttcagaagaagagcgctgttgacgggatttactttgaagaagatgatgagtatgctcctgtggttgagatgttggatgaaagtcatggagaatatatggataaaaccacttagacatcgatcgatgcaggtctttgtttggagcataagaagacttgtgagcagattcttgttcaaaatttatggatgtaggttccttgtaacagaccaatttgatgaaagaaattttactttttcctgctaatgcggcagtaatagagaagaatcatattatacc

SEQ ID NO: 77249 - protein, 409 aa, Arabidopsis thaliana
  peptide (1)..(409): Ceres Seq. ID no. 12574183
  misc_feature (11)..(375): Pfam Name: AAR2 protein Pfam Description: AAR2 protein
  misc_feature (11)..(409): Homolog of NCBI NO: 18408532 NR Description: expressed protein; protein id: At1g66510.1, by cDNA: gi_15529199, supported by cDNA: gi_16974372 [Arabidopsis
  misc_feature (55)..(409): Homolog of NCBI NO: 30697362 NR Description: expressed protein [Arabidopsis thaliana]
  misc_feature (5)..(402): Homolog of NCBI NO: 7657874 NR Description: CePP protein [Brassica napus var. napus]
  misc_feature (5)..(281): Homolog of NCBI NO: 15864559 NR Description: CePP putative protein [Brassica napus]
  misc_feature (161)..(405): Homolog of NCBI NO: 6069471 NR Description: S-locus protein 3 [Brassica rapa]
  misc_feature (10)..(400): Homolog of NCBI NO: 38346780 NR Description: OSJNBa0095H06.5 [Oryza sativa (japonica
  misc_feature (11)..(400): Homolog of NCBI NO: 34860266 NR Description: similar to RIKEN cDNA 0610011L14 gene [Rattus
  misc_feature (11)..(373): Homolog of NCBI NO: 18034690 NR Description: chromosome 20 open reading frame 4 [Homo sapiens]
  misc_feature (11)..(399): Homolog of NCBI NO: 24211598 NR Description: Protein c20orf4 homolog RIKEN cDNA 0610011L14 gene [Mus musculus]
  misc_feature (11)..(373): Homolog of NCBI NO: 4680685 NR Description: CGI-23 protein [Homo sapiens]
KLVKTKKKEAMDSEKALELVKHGATLLFLDVPQYTLVGIDTQIFAVGPAFKGIKMIPPGIHFVFYSSSTRDGREFSPTIGFFVDVAPSQVIVRKWNQQDEWLTKVSEEEEERYSQAVRSLEFDKNLGPYNLKQYGEWRHLSNYITKDVVEKFEPVGGEITVTYESAILKGGPKTAMEIALDTQMKKSKFTTSSTEQPKGNRFYYTSIPRIIKHKGMSGQELTSMNLDKTQLLESVLSKEYKDSEDLLLGELQFSFVAFLMGQSLESFMQWKSIVSLLLGCTSAPFQTRSQLFTKFIKVIYHQLKYGLQKENSGPETGIHALLDDSWLASDSFLHFLCKDFFALVEETSVVDGDLLSWTRKFKELLENRLGWEFQKKSAVDGIYFEEDDEYAPVVEMLDESHGEYMDKTT

SEQ ID NO: 77250 - protein, 399 aa, Arabidopsis thaliana
  peptide (1)..(399): Ceres Seq. ID no. 12574184
  misc_feature (1)..(365): Pfam Name: AAR2 protein Pfam Description: AAR2 protein
  misc_feature (1)..(399): Homolog of NCBI NO: 18408532 NR Description: expressed protein; protein id: At1g66510.1, by cDNA: gi_15529199, supported by cDNA: gi_16974372 [Arabidopsis
  misc_feature (45)..(399): Homolog of NCBI NO: 30697362 NR Description: expressed protein [Arabidopsis thaliana]
  misc_feature (1)..(392): Homolog of NCBI NO: 7657874 NR Description: CePP protein [Brassica napus var. napus]
  misc_feature (1)..(271): Homolog of NCBI NO: 15864559 NR Description: CePP putative protein [Brassica napus]
  misc_feature (151)..(395): Homolog of NCBI NO: 6069471 NR Description: S-locus protein 3 [Brassica rapa]
  misc_feature (1)..(390): Homolog of NCBI NO: 38346780 NR Description: OSJNBa0095H06.5 [Oryza sativa (japonica
  misc_feature (1)..(390): Homolog of NCBI NO: 34860266 NR Description: similar to RIKEN cDNA 0610011L14 gene [Rattus
  misc_feature (1)..(363): Homolog of NCBI NO: 18034690 NR Description: chromosome 20 open reading frame 4 [Homo sapiens]
  misc_feature (1)..(389): Homolog of NCBI NO: 24211598 NR Description: Protein c20orf4 homolog RIKEN cDNA 0610011L14 gene [Mus musculus]
  misc_feature (1)..(363): Homolog of NCBI NO: 4680685 NR Description: CGI-23 protein [Homo sapiens]
MDSEKALELVKHGATLLFLDVPQYTLVGIDTQIFAVGPAFKGIKMIPPGIHFVFYSSSTRDGREFSPTIGFFVDVAPSQVIVRKWNQQDEWLTKVSEEEEERYSQAVRSLEFDKNLGPYNLKQYGEWRHLSNYITKDVVEKFEPVGGEITVTYESAILKGGPKTAMEIALDTQMKKSKFTTSSTEQPKGNRFYYTSIPRIIKHKGMSGQELTSMNLDKTQLLESVLSKEYKDSEDLLLGELQFSFVAFLMGQSLESFMQWKSIVSLLLGCTSAPFQTRSQLFTKFIKVIYHQLKYGLQKENSGPETGIHALLDDSWLASDSFLHFLCKDFFALVEETSVVDGDLLSWTRKFKELLENRLGWEFQKKSAVDGIYFEEDDEYAPVVEMLDESHGEYMDKTT

SEQ ID NO: 77251 - protein, 355 aa, Arabidopsis thaliana
  peptide (1)..(355): Ceres Seq. ID no. 12574185
  misc_feature (1)..(321): Pfam Name: AAR2 protein Pfam Description: AAR2 protein
  misc_feature (1)..(355): Homolog of NCBI NO: 18408532 NR Description: expressed protein; protein id: At1g66510.1, by cDNA: gi_15529199, supported by cDNA: gi_16974372 [Arabidopsis
  misc_feature (1)..(355): Homolog of NCBI NO: 30697362 NR Description: expressed protein [Arabidopsis thaliana]
  misc_feature (1)..(348): Homolog of NCBI NO: 7657874 NR Description: CePP protein [Brassica napus var. napus]
  misc_feature (1)..(227): Homolog of NCBI NO: 15864559 NR Description: CePP putative protein [Brassica napus]
  misc_feature (107)..(351): Homolog of NCBI NO: 6069471 NR Description: S-locus protein 3 [Brassica rapa]
  misc_feature (1)..(346): Homolog of NCBI NO: 38346780 NR Description: OSJNBa0095H06.5 [Oryza sativa (japonica
  misc_feature (1)..(346): Homolog of NCBI NO: 34860266 NR Description: similar to RIKEN cDNA 0610011L14 gene [Rattus
  misc_feature (1)..(319): Homolog of NCBI NO: 18034690 NR Description: chromosome 20 open reading frame 4 [Homo sapiens]
  misc_feature (1)..(345): Homolog of NCBI NO: 24211598 NR Description: Protein c20orf4 homolog RIKEN cDNA 0610011L14 gene [Mus musculus]
  misc_feature (1)..(319): Homolog of NCBI NO: 4680685 NR Description: CGI-23 protein [Homo sapiens]
MIPPGIHFVFYSSSTRDGREFSPTIGFFVDVAPSQVIVRKWNQQDEWLTKVSEEEEERYSQAVRSLEFDKNLGPYNLKQYGEWRHLSNYITKDVVEKFEPVGGEITVTYESAILKGGPKTAMEIALDTQMKKSKFTTSSTEQPKGNRFYYTSIPRIIKHKGMSGQELTSMNLDKTQLLESVLSKEYKDSEDLLLGELQFSFVAFLMGQSLESFMQWKSIVSLLLGCTSAPFQTRSQLFTKFIKVIYHQLKYGLQKENSGPETGIHALLDDSWLASDSFLHFLCKDFFALVEETSVVDGDLLSWTRKFKELLENRLGWEFQKKSAVDGIYFEEDDEYAPVVEMLDESHGEYMDKTT

SEQ ID NO: 77252 - DNA, 1771 bp, Arabidopsis thaliana
  misc_feature (1)..(1771): Ceres Seq. ID no. 12574205
  misc_feature: MA Experiment ID: 20000173 Result: Down-regulated in Transcription
  misc_feature: MA Experiment 20000173 PARAMETER Experiment Name: At_42deg_Heat_P Parameter: Age (day) Value: 14
  misc_feature: MA Experiment 20000173 PARAMETER Experiment Name: At_42deg_Heat_P Parameter: Organism Value: A. thaliana
  misc_feature: MA Experiment 20000173 PARAMETER Experiment Name: At_42deg_Heat_P Parameter: Plant Line Value: WS
  misc_feature: MA Experiment 20000173 PARAMETER Experiment Name: At_42deg_Heat_P Parameter: Temperature (deg C) Value: 42 vs. 22
  misc_feature: MA Experiment 20000173 PARAMETER Experiment Name: At_42deg_Heat_P Parameter: Timepoint (hr) Value: 6
  misc_feature: MA Experiment 20000173 PARAMETER Experiment Name: At_42deg_Heat_P Parameter: Tissue Value: Aerial
  misc_feature: MA Experiment ID: 20000179 Result: Up-regulated in Transcription
  misc_feature: MA Experiment 20000179 PARAMETER Experiment Name: At_Germinating_Seeds_P Parameter: Age (hr) Value: 6 vs. 0
  misc_feature: MA Experiment 20000179 PARAMETER Experiment Name: At_Germinating_Seeds_P Parameter: Tissue Value: Germinating Seeds
  misc_feature: MA Experiment ID: 20000180 Result: Up-regulated in Transcription
  misc_feature: MA Experiment 20000180 PARAMETER Experiment Name: At_Germinating_Seeds_P Parameter: Age (hr) Value: 24 vs. 0
  misc_feature: MA Experiment 20000180 PARAMETER Experiment Name: At_Germinating_Seeds_P Parameter: Tissue Value: Germinating Seeds
  misc_feature: MA Experiment ID: 20000185 Result: Down-regulated in Transcription
  misc_feature: MA Experiment 20000185 PARAMETER Experiment Name: At_Roots__P Parameter: Age (day) Value: 7 vs. 21
  misc_feature: MA Experiment 20000185 PARAMETER Experiment Name: At_Roots__P Parameter: Organism Value: A. thaliana
  misc_feature: MA Experiment 20000185 PARAMETER Experiment Name: At_Roots__P Parameter: Tissue Value: Roots vs. Whole Plant
  misc_feature: MA Experiment ID: 20000234 Result: Down-regulated in Transcription
  misc_feature: MA Experiment 20000234 PARAMETER Experiment Name: At_Siliques_P Parameter: Age (day) Value: 21
  misc_feature: MA Experiment 20000234 PARAMETER Experiment Name: At_Siliques_P Parameter: Organism Value: A. thaliana
  misc_feature: MA Experiment 20000234 PARAMETER Experiment Name: At_Siliques_P Parameter: Plant Line Value: WS
  misc_feature: MA Experiment 20000234 PARAMETER Experiment Name: At_Siliques_P Parameter: Tissue Value: Less Than 5mm Siliques vs. Whole Plant
  misc_feature: MA Experiment ID: 20000265 Result: Down-regulated in Transcription
  misc_feature: MA Experiment 20000265 PARAMETER Experiment Name: At_Open_Flower_P Parameter: Age (day) Value: 21
  misc_feature: MA Experiment 20000265 PARAMETER Experiment Name: At_Open_Flower_P Parameter: Plant Line Value: WS
  misc_feature: MA Experiment 20000265 PARAMETER Experiment Name: At_Open_Flower_P Parameter: Tissue Value: Closed Flower vs. Whole Plant
  misc_feature: MA Experiment ID: 20000286 Result: Down-regulated in Transcription
  misc_feature: MA Experiment 20000286 PARAMETER Experiment Name: At_Open_Flower_P Parameter: Age (day) Value: 21
  misc_feature: MA Experiment 20000286 PARAMETER Experiment Name: At_Open_Flower_P Parameter: Plant Line Value: WS
  misc_feature: MA Experiment 20000286 PARAMETER Experiment Name: At_Open_Flower_P Parameter: Tissue Value: Half Open vs. Whole Plant
  misc_feature: MA Experiment ID: 20000308 Result: Down-regulated in Transcription
  misc_feature: MA Experiment 20000308 PARAMETER Experiment Name: At_100mM_NaCl__P Parameter: Age (day) Value: 17
  misc_feature: MA Experiment 20000308 PARAMETER Experiment Name: At_100mM_NaCl__P Parameter: Organism Value: A. thaliana
  misc_feature: MA Experiment 20000308 PARAMETER Experiment Name: At_100mM_NaCl__P Parameter: Plant Line Value: WS
  misc_feature: MA Experiment 20000308 PARAMETER Experiment Name: At_100mM_NaCl__P Parameter: Timepoint (hr) Value: 72
  misc_feature: MA Experiment 20000308 PARAMETER Experiment Name: At_100mM_NaCl__P Parameter: Tissue Value: Whole Plant
  misc_feature: MA Experiment 20000308 PARAMETER Experiment Name: At_100mM_NaCl__P Parameter: Treatment Value: 100mM NaCl vs. No Treatment
  misc_feature: MA Experiment ID: 20000438 Result: Up-regulated in Transcription
  misc_feature: MA Experiment 20000438 PARAMETER Experiment Name: At_Shoots__P Parameter: Age (day) Value: 14
  misc_feature: MA Experiment 20000438 PARAMETER Experiment Name: At_Shoots__P Parameter: Tissue Value: Shoots vs. Whole Plant
  misc_feature: MA Experiment ID: 20000439 Result: Down-regulated in Transcription
  misc_feature: MA Experiment 20000439 PARAMETER Experiment Name: At_Roots__P Parameter: Age (day) Value: 14 vs. 21
  misc_feature: MA Experiment 20000439 PARAMETER Experiment Name: At_Roots__P Parameter: Organism Value: A. thaliana
  misc_feature: MA Experiment 20000439 PARAMETER Experiment Name: At_Roots__P Parameter: Tissue Value: Roots vs. Whole Plant
  misc_feature: MA Experiment ID: 20000441 Result: Up-regulated in Transcription
  misc_feature: MA Experiment 20000441 PARAMETER Experiment Name: At_1uM_BR-BRZ__P Parameter: Tissue Value: Shoot Apices
  misc_feature: MA Experiment 20000441 PARAMETER Experiment Name: At_1uM_BR-BRZ__P Parameter: Treatment Value: 1uM BR vs. No Treatment
  misc_feature: MA Experiment ID: 20000443 Result: Up-regulated in Transcription
  misc_feature: MA Experiment 20000443 PARAMETER Experiment Name: At_1uM_BR-BRZ__P Parameter: Tissue Value: Shoot Apices
  misc_feature: MA Experiment 20000443 PARAMETER Experiment Name: At_1uM_BR-BRZ__P Parameter: Treatment Value: 1uM BRZ vs. No Treatment
  misc_feature: MA Experiment ID: 20000578 Result: Down-regulated in Transcription
  misc_feature: MA Experiment 20000578 PARAMETER Experiment Name: At_CS3726__P Parameter: Organism Value: A. thaliana
  misc_feature: MA Experiment 20000578 PARAMETER Experiment Name: At_CS3726__P Parameter: Plant Line Value: CS3726
  misc_feature: MA Experiment 20000578 PARAMETER Experiment Name: At_CS3726__P Parameter: Tissue Value: Whole Plant
  misc_feature: MA Experiment ID: 20001247 Result: Up-regulated in Transcription
  misc_feature: MA Experiment 20001247 PARAMETER Experiment Name: At_Far-red-induction_P Parameter: Age (day) Value: 7
  misc_feature: MA Experiment 20001247 PARAMETER Experiment Name: At_Far-red-induction_P Parameter: Light Value: Far-red vs. White
  misc_feature: MA Experiment 20001247 PARAMETER Experiment Name: At_Far-red-induction_P Parameter: Organism Value: A. thaliana
  misc_feature: MA Experiment 20001247 PARAMETER Experiment Name: At_Far-red-induction_P Parameter: Plant Line Value: Columbia
  misc_feature: MA Experiment 20001247 PARAMETER Experiment Name: At_Far-red-induction_P Parameter: Timepoint (hr) Value: 1
  misc_feature: MA Experiment 20001247 PARAMETER Experiment Name: At_Far-red-induction_P Parameter: Tissue Value: Whole Plant
  misc_feature: MA Experiment ID: 20001450 Result: Up-regulated in Transcription
  misc_feature: MA Experiment 20001450 PARAMETER Experiment Name: At_Far-red-induction_P Parameter: Age (day) Value: 7
  misc_feature: MA Experiment 20001450 PARAMETER Experiment Name: At_Far-red-induction_P Parameter: Light Value: Far-red vs. White
  misc_feature: MA Experiment 20001450 PARAMETER Experiment Name: At_Far-red-induction_P Parameter: Organism Value: A. thaliana
  misc_feature: MA Experiment 20001450 PARAMETER Experiment Name: At_Far-red-induction_P Parameter: Plant Line Value: Columbia
  misc_feature: MA Experiment 20001450 PARAMETER Experiment Name: At_Far-red-induction_P Parameter: Timepoint (hr) Value: 8
  misc_feature: MA Experiment 20001450 PARAMETER Experiment Name: At_Far-red-induction_P Parameter: Tissue Value: Whole Plant
  misc_feature: MA Experiment ID: 20001560 Result: Down-regulated in Transcription
  misc_feature: MA Experiment 20001560 PARAMETER Experiment Name: At_Drought_Soil_Dry_P Parameter: Age (day) Value: 28
  misc_feature: MA Experiment 20001560 PARAMETER Experiment Name: At_Drought_Soil_Dry_P Parameter: Organism Value: A. thaliana
  misc_feature: MA Experiment 20001560 PARAMETER Experiment Name: At_Drought_Soil_Dry_P Parameter: Plant Line Value: WS
  misc_feature: MA Experiment 20001560 PARAMETER Experiment Name: At_Drought_Soil_Dry_P Parameter: Post Timepoint (hr) Value: None
  misc_feature: MA Experiment 20001560 PARAMETER Experiment Name: At_Drought_Soil_Dry_P Parameter: Post-Treatment Value: None
  misc_feature: MA Experiment 20001560 PARAMETER Experiment Name: At_Drought_Soil_Dry_P Parameter: Timepoint (day) Value: 14
  misc_feature: MA Experiment 20001560 PARAMETER Experiment Name: At_Drought_Soil_Dry_P Parameter: Treatment Value: Drought vs. No Drought
  misc_feature: MA Experiment ID: 20001757 Result: Up-regulated in Transcription
  misc_feature: MA Experiment 20001757 PARAMETER Experiment Name: At_50mM_NH4NO3_L-to-H_P Parameter: Timepoint (hr) Value: 6
  misc_feature: MA Experiment 20001757 PARAMETER Experiment Name: At_50mM_NH4NO3_L-to-H_P Parameter: Tissue Value: Leaf
  misc_feature: MA Experiment 20001757 PARAMETER Experiment Name: At_50mM_NH4NO3_L-to-H_P Parameter: Treatment Value: 50mM NH4NO3 vs 100mM Mannitol
  misc_feature: MA Experiment ID: 20001771 Result: Up-regulated in Transcription
  misc_feature: MA Experiment 20001771 PARAMETER Experiment Name: At_Far-red-enriched-adult_P Parameter: Age (day) Value: 28
  misc_feature: MA Experiment 20001771 PARAMETER Experiment Name: At_Far-red-enriched-adult_P Parameter: Light Value: Far-red enriched vs. White
  misc_feature: MA Experiment 20001771 PARAMETER Experiment Name: At_Far-red-enriched-adult_P Parameter: Organism Value: A. thaliana
  misc_feature: MA Experiment 20001771 PARAMETER Experiment Name: At_Far-red-enriched-adult_P Parameter: Plant Line Value: Columbia
  misc_feature: MA Experiment 20001771 PARAMETER Experiment Name: At_Far-red-enriched-adult_P Parameter: Timepoint (hr) Value: 16
  misc_feature: MA Experiment 20001771 PARAMETER Experiment Name: At_Far-red-enriched-adult_P Parameter: Tissue Value: Aerial
  misc_feature: MA Experiment ID: 20001904 Result: Down-regulated in Transcription
  misc_feature: MA Experiment 20001904 PARAMETER Experiment Name: At_Drought_Reproduction_P Parameter: Age (day) Value: 37
  misc_feature: MA Experiment 20001904 PARAMETER Experiment Name: At_Drought_Reproduction_P Parameter: Organism Value: A. thaliana
  misc_feature: MA Experiment 20001904 PARAMETER Experiment Name: At_Drought_Reproduction_P Parameter: Plant Line Value: WS
  misc_feature: MA Experiment 20001904 PARAMETER Experiment Name: At_Drought_Reproduction_P Parameter: Timepoint (day) Value: 7
  misc_feature: MA Experiment 20001904 PARAMETER Experiment Name: At_Drought_Reproduction_P Parameter: Tissue Value: Rosettes
  misc_feature: MA Experiment 20001904 PARAMETER Experiment Name: At_Drought_Reproduction_P Parameter: Treatment Value: Drought vs. No Drought
  misc_feature: MA Experiment ID: 20001905 Result: Down-regulated in Transcription
  misc_feature: MA Experiment 20001905 PARAMETER Experiment Name: At_Drought_Reproduction_P Parameter: Age (day) Value: 40
  misc_feature: MA Experiment 20001905 PARAMETER Experiment Name: At_Drought_Reproduction_P Parameter: Organism Value: A. thaliana
  misc_feature: MA Experiment 20001905 PARAMETER Experiment Name: At_Drought_Reproduction_P Parameter: Plant Line Value: WS
  misc_feature: MA Experiment 20001905 PARAMETER Experiment Name: At_Drought_Reproduction_P Parameter: Timepoint (day) Value: 10
  misc_feature: MA Experiment 20001905 PARAMETER Experiment Name: At_Drought_Reproduction_P Parameter: Tissue Value: Rosettes
  misc_feature: MA Experiment 20001905 PARAMETER Experiment Name: At_Drought_Reproduction_P Parameter: Treatment Value: Drought vs. No Drought
gtccctttctgtctgaacctggcaagaagaaccttagcctctctttcttctttctctctctctctctctgtgttactgttctgtttcaactttactccctcagtttcagaacaattccctatctagaagagagataaaaccgagaaggttttggagatagaatcttttgttcttcttttgtccctccttgctcgatttttgttacgtgtgaagcaataaaaaaaaactgatatagctaaatcttccatccattcagaggcttctaaatctgatctgacatggaacaagtgtttgctgattggaattttgaagataattttcacatgtccactaataaaagatcaatcagaccagaagatgaattagtggagctattgtggagagatggtcaagtggttttacaaagccaagctcgtagagaaccgtcagtccaagtccaaacccacaaacaagaaaccctaagaaaacccaacaatatttttcttgacaaccaagaaacagtacaaaagcctaactacgctgctctagatgatcaagaaaccgtctcctggatacaataccctccggatgacgtcatcgaccctttcgaatccgagttctcctctcatttcttctcttcgatcgatcacctcggaggtcctgagaagccacgaacgatcgaagagacagttaagcatgaggctcaagccatggctcctcctaagtttagatcctcggttataacagtcggaccgagtcattgcggcagcaaccagtcaacaaatattcatcaggccactacacttccggtttctatgagtgatagaagcaagaacgtcgaagaaagacttgacacttcgtcaggtggctcctccggttgcagctatggaaggaacaacaaagaaaccgttagtggaacaagtgtaaccattgaccgtaaaagaaaacatgttatggatgctgatcaagaatctgtgtctcaatcagatataggtttgacctcaaccgatgatcaaaccatgggtaacaaatcgagccaacggtcaggatctactcgaagaagccgtgcagctgaagttcataatctctcagaaaggaggaggagagatcggatcaatgaaagaatgaaagctcttcaagaactcatacctcactgcagcagaataaagcttcgatattggatgaagcaattgattacttaaaatcacttcaaatgcaactccaagtgatgtggatgggaagtggaatggcggcggcggcagcagcagcagcaagtccgatgatgtttcccggggtacaatcatctccatacattaatcagatggctatgcaaagtcagatgcaattgtctcaattcccggttatgaaccggtccgctccgcagaaccatcccggtttagtatgtcaaaacccggtacagttgcagctccaagcacagaaccaaatcttatcggagcagctcgctaggtacatgggcgggattccccagatgccgccggcgggaaatcagatgcagaccgtgcaacaacaaccagcggacatgttgggatttggatctccggcgggaccgcaaagtcaactgtcggcaccggcgaccaccgacagtcttcatatgggtaaaataggctgacttggcatatagttttcctccgaaattattcttcttacagttggtgattgttatttatttttggtcgcctaagcaagcataaaagctaagtcaaatgtattatagagatctaataagttagtctcatacttataacttatttttaaacagttgaattatagt

SEQ ID NO: 77253 - protein, 300 aa, Arabidopsis thaliana; identical to SEQ ID NO: 48754
  peptide (1)..(300): Ceres Seq. ID no. 12574206
  misc_feature (257)..(299): Pfam Name: Helix-loop-helix DNA-binding domain Pfam Description: Helix-loop-helix DNA-binding domain
  misc_feature (1)..(288): Homolog of NCBI NO: 30694924 NR Description: bHLH protein family [Arabidopsis thaliana]
  misc_feature (1)..(288): Homolog of NCBI NO: 30694919 NR Description: bHLH protein family [Arabidopsis thaliana]
  misc_feature (1)..(288): Homolog of NCBI NO: 20127070 NR Description: putative bHLH transcription factor [Arabidopsis
  misc_feature (1)..(300): Homolog of NCBI NO: 19698849 NR Description: putative protein [Arabidopsis thaliana]
  misc_feature (8)..(288): Homolog of NCBI NO: 25408828 NR Description: hypothetical protein At2g43010 [imported] -
  misc_feature (8)..(288): Homolog of NCBI NO: 30689218 NR Description: transcription factor (BHLH9) -related
  misc_feature (8)..(288): Homolog of NCBI NO: 30689224 NR Description: transcription factor (BHLH9) -related
  misc_feature (8)..(266): Homolog of NCBI NO: 20197630 NR Description: expressed protein [Arabidopsis thaliana]
  misc_feature (8)..(266): Homolog of NCBI NO: 13430618 NR Description: unknown protein [Arabidopsis thaliana]
  misc_feature (110)..(288): Homolog of NCBI NO: 34899612 NR Description: putative phytochrome interacting factor 4 [Oryza

SEQ ID NO: 77254 - protein, 285 aa, Arabidopsis thaliana; identical to SEQ ID NO: 48755
  peptide (1)..(285): Ceres Seq. ID no. 12574207
  misc_feature (242)..(284): Pfam Name: Helix-loop-helix DNA-binding domain Pfam Description: Helix-loop-helix DNA-binding domain
  misc_feature (1)..(273): Homolog of NCBI NO: 30694924 NR Description: bHLH protein family [Arabidopsis thaliana]
  misc_feature (1)..(273): Homolog of NCBI NO: 30694919 NR Description: bHLH protein family [Arabidopsis thaliana]
  misc_feature (1)..(273): Homolog of NCBI NO: 20127070 NR Description: putative bHLH transcription factor [Arabidopsis
  misc_feature (1)..(285): Homolog of NCBI NO: 19698849 NR Description: putative protein [Arabidopsis thaliana]
  misc_feature (1)..(273): Homolog of NCBI NO: 25408828 NR Description: hypothetical protein At2g43010 [imported] -
  misc_feature (1)..(273): Homolog of NCBI NO: 30689218 NR Description: transcription factor (BHLH9) -related
  misc_feature (1)..(273): Homolog of NCBI NO: 30689224 NR Description: transcription factor (BHLH9) -related
  misc_feature (1)..(251): Homolog of NCBI NO: 20197630 NR Description: expressed protein [Arabidopsis thaliana]
  misc_feature (1)..(251): Homolog of NCBI NO: 13430618 NR Description: unknown protein [Arabidopsis thaliana]
  misc_feature (95)..(273): Homolog of NCBI NO: 34899612 NR Description: putative phytochrome interacting factor 4 [Oryza

SEQ ID NO: 77255 - protein, 163 aa, Arabidopsis thaliana; identical to SEQ ID NO: 48756
  peptide (1)..(163): Ceres Seq. ID no. 12574208
  misc_feature (120)..(162): Pfam Name: Helix-loop-helix DNA-binding domain Pfam Description: Helix-loop-helix DNA-binding domain
  misc_feature (1)..(151): Homolog of NCBI NO: 30694924 NR Description: bHLH protein family [Arabidopsis thaliana]
  misc_feature (1)..(151): Homolog of NCBI NO: 30694919 NR Description: bHLH protein family [Arabidopsis thaliana]
  misc_feature (1)..(151): Homolog of NCBI NO: 20127070 NR Description: putative bHLH transcription factor [Arabidopsis
  misc_feature (1)..(163): Homolog of NCBI NO: 19698849 NR Description: putative protein [Arabidopsis thaliana]
  misc_feature (1)..(151): Homolog of NCBI NO: 25408828 NR Description: hypothetical protein At2g43010 [imported] -
  misc_feature (1)..(151): Homolog of NCBI NO: 30689218 NR Description: transcription factor (BHLH9) -related
  misc_feature (1)..(151): Homolog of NCBI NO: 30689224 NR Description: transcription factor (BHLH9) -related
  misc_feature (1)..(129): Homolog of NCBI NO: 20197630 NR Description: expressed protein [Arabidopsis thaliana]
  misc_feature (1)..(129): Homolog of NCBI NO: 13430618 NR Description: unknown protein [Arabidopsis thaliana]
  misc_feature (1)..(151): Homolog of NCBI NO: 34899612 NR Description: putative phytochrome interacting factor 4 [Oryza

SEQ ID NO: 77256 - DNA, 1996 bp, Arabidopsis thaliana
  misc_feature (1)..(1996): Ceres Seq. ID no. 12574336
  misc_feature: MA Experiment ID: 20000184 Result: Down-regulated in Transcription
  misc_feature: MA Experiment 20000184 PARAMETER Experiment Name: At_Shoots__P Parameter: Age (day) Value: 7
  misc_feature: MA Experiment 20000184 PARAMETER Experiment Name: At_Shoots__P Parameter: Tissue Value: Shoots vs. Whole Plant
  misc_feature: MA Experiment ID: 20001905 Result: Down-regulated in Transcription
  misc_feature: MA Experiment 20001905 PARAMETER Experiment Name: At_Drought_Reproduction_P Parameter: Age (day) Value: 40
  misc_feature: MA Experiment 20001905 PARAMETER Experiment Name: At_Drought_Reproduction_P Parameter: Organism Value: A. thaliana
  misc_feature: MA Experiment 20001905 PARAMETER Experiment Name: At_Drought_Reproduction_P Parameter: Plant Line Value: WS
  misc_feature: MA Experiment 20001905 PARAMETER Experiment Name: At_Drought_Reproduction_P Parameter: Timepoint (day) Value: 10
  misc_feature: MA Experiment 20001905 PARAMETER Experiment Name: At_Drought_Reproduction_P Parameter: Tissue Value: Rosettes
  misc_feature: MA Experiment 20001905 PARAMETER Experiment Name: At_Drought_Reproduction_P Parameter: Treatment Value: Drought vs. No Drought
gctctctcttttcttgcaaacttttgctcggaattctatgctttgctgatctattgttttctctctgcaaaagtaatgagaagctttttgctatgttaagctttagatctgctattatttgttcctttcaagattctaactttggagcaagtaagcaagtcagagagaggacaaattagctgaaatgctggagattgaaagccctacgagtctctgtttccgtacaaacactacttgtaatgctctgcttcgagagcttcagaaaatatgggttgatattggtgagagtgatgctgagaaagaccggatgctaatggaattggagaaggaatgtcttgaaatctacagaagaaaagtggacgaggctgctaattccaaggcacagcttcatcagtcattggtatcaattgaagctgaaattgcttctttactggctgctcttggagtgttcaacagccactcaccgatgaaagcaaaggaaggttcaaaatcattgaaagaaaaacttgctgctgtgaggccaatgcttgaggacttaagattgcaaaaagatgaaagaatgaagcaatttgtggatataaaagcacaaattgagaagatgagtggtgaaatatctggatacagtgaccaactcaacaaaacgatggtcggttctttggctcttgatgaacaagacctgactcttcggaagcttaacgagtatcaaacacatctccgctcgctccagaaagagaagtcggatcgtctgaacaaggttttggactatgtgaatgaggtgcacactctatgtggtgttcttggagtcgactttggtcaaactgttagtgaggttcatccgagcttacataggactgaccatgagcagtctacaaacatttctgatgatacattggatggtctacaccacatgattcataagctgaaaaccgaaaggagcgttcggtttcaaaagttaaaggatgtagcgggttcactttttgagctatggaatctaatggacacatctcaagaagaaagaacgaaatttgcaagtgtcagttatgttgtaagatcatcagaatctgatatcactgagccaaatatcctctctagtgaaacaattgaacaggtgtctgcagaagtagactgttttaataagctgaaagctagcagaatgaaggagcttgtgatgaaaagaaggactgagttagagaatctttgcagattggctcacattgaggctgacacaagcacatcgcttgagaaatcaactgctttgattgattctggattagtggacccttcagagcttcttacaaatattgaattgcatataaacaaaatcaaagaagaagcacatagccggaaagaaataatcgataggattgaccgctggttatctgcgtgcgaagaggaaaactggctagaagaatacaatcaggatgaaacccggtatagtgccggaagaggtggacatgtaaacctcaagcatgcagaacgcgcccggatcacagtaaacaagatcccatcaatggttgacaatctcatcaagaaaacacttctatgggaggacgaaacacggaaatcatttctatatgatggtgttcgattggtatccatacttgaagattataaattgacaaggaaacaacaggaagaggaaaagagacgataccgggatcaaaagaagatgcaggatctgttaataaagcggagggaatcaatttatggatcaaaaccgagtccaagaagaagcaacagtgtaagaaagaccaacggatacaatggggatgcatctgtgcctcctacgccccgcagaaactcagctggagcaacaaataacgacataatgaccaccccaagatcatactcaagccatcgccaaaacggatatttcaaggaagtaagaagactgtcaacagctcctttgaactttgtggcaataccaaaggaagactctgtctctacatacacttcggtttgcggctctgaaccagattcaccgttatataactaa

SEQ ID NO: 77257 - protein, 603 aa, Arabidopsis thaliana
  peptide (1)..(603): Ceres Seq. ID no. 12574337
  misc_feature (38)..(257): Pfam Name: Microtubule associated protein (MAP65/ASE1 family) Pfam Description: Microtubule associated protein (MAP65/ASE1
  misc_feature (256)..(603): Homolog of NCBI NO: 8778239 NR Description: F10B6.9 [Arabidopsis thaliana]
  misc_feature (1)..(257): Homolog of NCBI NO: 8778239 NR Description: F10B6.9 [Arabidopsis thaliana]
  misc_feature (26)..(257): Homolog of NCBI NO: 15223872 NR Description: hypothetical protein; protein id: At1g14690.1
  misc_feature (256)..(416): Homolog of NCBI NO: 15223872 NR Description: hypothetical protein; protein id: At1g14690.1
  misc_feature (475)..(602): Homolog of NCBI NO: 15223872 NR Description: hypothetical protein; protein id: At1g14690.1
  misc_feature (1)..(601): Homolog of NCBI NO: 25410943 NR Description: hypothetical protein At2g01910 [imported] - thaliana >gi|4522009|gb|AAD21782.1| unknown protein [Arabidopsis
  misc_feature (42)..(601): Homolog of NCBI NO: 30677965 NR Description: microtubule associated protein (MAP65/ASE1)
  misc_feature (16)..(601): Homolog of NCBI NO: 27357984 NR Description: Unknown protein [Oryza sativa (japonica
  misc_feature (16)..(600): Homolog of NCBI NO: 11558252 NR Description: microtubule-associated protein MAP65-1a
  misc_feature (17)..(600): Homolog of NCBI NO: 15240485 NR Description: putative protein; protein id: At5g55230.1 thaliana] >gi|9758120|dbj|BAB08592.1| similarity to unknown protein [Arabidopsis thaliana]
MLEIESPTSLCFRTNTTCNALLRELQKIWVDIGESDAEKDRMLMELEKECLEIYRRKVDEAANSKAQLHQSLVSIEAEIASLLAALGVFNSHSPMKAKEGSKSLKEKLAAVRPMLEDLRLQKDERMKQFVDIKAQIEKMSGEISGYSDQLNKTMVGSLALDEQDLTLRKLNEYQTHLRSLQKEKSDRLNKVLDYVNEVHTLCGVLGVDFGQTVSEVHPSLHRTDHEQSTNISDDTLDGLHHMIHKLKTERSVRFQKLKDVAGSLFELWNLMDTSQEERTKFASVSYVVRSSESDITEPNILSSETIEQVSAEVDCFNKLKASRMKELVMKRRTELENLCRLAHIEADTSTSLEKSTALIDSGLVDPSELLTNIELHINKIKEEAHSRKEIIDRIDRWLSACEEENWLEEYNQDETRYSAGRGGHVNLKHAERARITVNKIPSMVDNLIKKTLLWEDETRKSFLYDGVRLVSILEDYKLTRKQQEEEKRRYRDQKKMQDLLIKRRESIYGSKPSPRRSNSVRKTNGYNGDASVPPTPRRNSAGATNNDIMTTPRSYSSHRQNGYFKEVRRLSTAPLNFVAIPKEDSVSTYTSVCGSEPDSPLYN

SEQ ID NO: 77258 - protein, 562 aa, Arabidopsis thaliana
  peptide (1)..(562): Ceres Seq. ID no. 12574338
  misc_feature (1)..(216): Pfam Name: Microtubule associated protein (MAP65/ASE1 family) Pfam Description: Microtubule associated protein (MAP65/ASE1
  misc_feature (215)..(562): Homolog of NCBI NO: 8778239 NR Description: F10B6.9 [Arabidopsis thaliana]
  misc_feature (1)..(216): Homolog of NCBI NO: 8778239 NR Description: F10B6.9 [Arabidopsis thaliana]
  misc_feature (1)..(216): Homolog of NCBI NO: 15223872 NR Description: hypothetical protein; protein id: At1g14690.1
  misc_feature (215)..(375): Homolog of NCBI NO: 15223872 NR Description: hypothetical protein; protein id: At1g14690.1
  misc_feature (434)..(561): Homolog of NCBI NO: 15223872 NR Description: hypothetical protein; protein id: At1g14690.1
  misc_feature (1)..(560): Homolog of NCBI NO: 25410943 NR Description: hypothetical protein At2g01910 [imported] - thaliana >gi|4522009|gb|AAD21782.1| unknown protein [Arabidopsis
  misc_feature (1)..(560): Homolog of NCBI NO: 30677965 NR Description: microtubule associated protein (MAP65/ASE1)
  misc_feature (1)..(560): Homolog of NCBI NO: 27357984 NR Description: Unknown protein [Oryza sativa (japonica
  misc_feature (1)..(559): Homolog of NCBI NO: 11558252 NR Description: microtubule-associated protein MAP65-1a
  misc_feature (1)..(559): Homolog of NCBI NO: 15240485 NR Description: putative protein; protein id: At5g55230.1 thaliana] >gi|9758120|dbj|BAB08592.1| similarity to unknown protein [Arabidopsis thaliana]
MLMELEKECLEIYRRKVDEAANSKAQLHQSLVSIEAEIASLLAALGVFNSHSPMKAKEGSKSLKEKLAAVRPMLEDLRLQKDERMKQFVDIKAQIEKMSGEISGYSDQLNKTMVGSLALDEQDLTLRKLNEYQTHLRSLQKEKSDRLNKVLDYVNEVHTLCGVLGVDFGQTVSEVHPSLHRTDHEQSTNISDDTLDGLHHMIHKLKTERSVRFQKLKDVAGSLFELWNLMDTSQEERTKFASVSYVVRSSESDITEPNILSSETIEQVSAEVDCFNKLKASRMKELVMKRRTELENLCRLAHIEADTSTSLEKSTALIDSGLVDPSELLTNIELHINKIKEEAHSRKEIIDRIDRWLSACEEENWLEEYNQDETRYSAGRGGHVNLKHAERARITVNKIPSMVDNLIKKTLLWEDETRKSFLYDGVRLVSILEDYKLTRKQQEEEKRRYRDQKKMQDLLIKRRESIYGSKPSPRRSNSVRKTNGYNGDASVPPTPRRNSAGATNNDIMTTPRSYSSHRQNGYFKEVRRLSTAPLNFVAIPKEDSVSTYTSVCGSEPDSPLYN

SEQ ID NO: 77259 - protein, 560 aa, Arabidopsis thaliana
  peptide (1)..(560): Ceres Seq. ID no. 12574339
  misc_feature (1)..(214): Pfam Name: Microtubule associated protein (MAP65/ASE1 family) Pfam Description: Microtubule associated protein (MAP65/ASE1
  misc_feature (213)..(560): Homolog of NCBI NO: 8778239 NR Description: F10B6.9 [Arabidopsis thaliana]
  misc_feature (1)..(214): Homolog of NCBI NO: 8778239 NR Description: F10B6.9 [Arabidopsis thaliana]
  misc_feature (1)..(214): Homolog of NCBI NO: 15223872 NR Description: hypothetical protein; protein id: At1g14690.1
  misc_feature (213)..(373): Homolog of NCBI NO: 15223872 NR Description: hypothetical protein; protein id: At1g14690.1
  misc_feature (432)..(559): Homolog of NCBI NO: 15223872 NR Description: hypothetical protein; protein id: At1g14690.1
  misc_feature (1)..(558): Homolog of NCBI NO: 25410943 NR Description: hypothetical protein At2g01910 [imported] - thaliana >gi|4522009|gb|AAD21782.1| unknown protein [Arabidopsis
  misc_feature (1)..(558): Homolog of NCBI NO: 30677965 NR Description: microtubule associated protein (MAP65/ASE1)
  misc_feature (1)..(558): Homolog of NCBI NO: 27357984 NR Description: Unknown protein [Oryza sativa (japonica
  misc_feature (1)..(557): Homolog of NCBI NO: 11558252 NR Description: microtubule-associated protein MAP65-1a
  misc_feature (1)..(557): Homolog of NCBI NO: 15240485 NR Description: putative protein; protein id: At5g55230.1 thaliana] >gi|9758120|dbj|BAB08592.1| similarity to unknown protein [Arabidopsis thaliana]
MELEKECLEIYRRKVDEAANSKAQLHQSLVSIEAEIASLLAALGVFNSHSPMKAKEGSKSLKEKLAAVRPMLEDLRLQKDERMKQFVDIKAQIEKMSGEISGYSDQLNKTMVGSLALDEQDLTLRKLNEYQTHLRSLQKEKSDRLNKVLDYVNEVHTLCGVLGVDFGQTVSEVHPSLHRTDHEQSTNISDDTLDGLHHMIHKLKTERSVRFQKLKDVAGSLFELWNLMDTSQEERTKFASVSYVVRSSESDITEPNILSSETIEQVSAEVDCFNKLKASRMKELVMKRRTELENLCRLAHIEADTSTSLEKSTALIDSGLVDPSELLTNIELHINKIKEEAHSRKEIIDRIDRWLSACEEENWLEEYNQDETRYSAGRGGHVNLKHAERARITVNKIPSMVDNLIKKTLLWEDETRKSFLYDGVRLVSILEDYKLTRKQQEEEKRRYRDQKKMQDLLIKRRESIYGSKPSPRRSNSVRKTNGYNGDASVPPTPRRNSAGATNNDIMTTPRSYSSHRQNGYFKEVRRLSTAPLNFVAIPKEDSVSTYTSVCGSEPDSPLYN

SEQ ID NO: 77260 - DNA, 2016 bp, Arabidopsis thaliana
  misc_feature (1)..(2016): Ceres Seq. ID no. 12574352
  misc_feature: MA Experiment ID: 20000264 Result: Up-regulated in Transcription
  misc_feature: MA Experiment 20000264 PARAMETER Experiment Name: At_Open_Flower_P Parameter: Age (day) Value: 21
  misc_feature: MA Experiment 20000264 PARAMETER Experiment Name: At_Open_Flower_P Parameter: Plant Line Value: WS
  misc_feature: MA Experiment 20000264 PARAMETER Experiment Name: At_Open_Flower_P Parameter: Tissue Value: Open Flower vs. Whole Plant
  misc_feature: MA Experiment ID: 20000265 Result: Up-regulated in Transcription
  misc_feature: MA Experiment 20000265 PARAMETER Experiment Name: At_Open_Flower_P Parameter: Age (day) Value: 21
  misc_feature: MA Experiment 20000265 PARAMETER Experiment Name: At_Open_Flower_P Parameter: Plant Line Value: WS
  misc_feature: MA Experiment 20000265 PARAMETER Experiment Name: At_Open_Flower_P Parameter: Tissue Value: Closed Flower vs. Whole Plant
  misc_feature: MA Experiment ID: 20000286 Result: Up-regulated in Transcription
  misc_feature: MA Experiment 20000286 PARAMETER Experiment Name: At_Open_Flower_P Parameter: Age (day) Value: 21
  misc_feature: MA Experiment 20000286 PARAMETER Experiment Name: At_Open_Flower_P Parameter: Plant Line Value: WS
  misc_feature: MA Experiment 20000286 PARAMETER Experiment Name: At_Open_Flower_P Parameter: Tissue Value: Half Open vs. Whole Plant
  misc_feature: MA Experiment ID: 20000794 Result: Up-regulated in Transcription
  misc_feature: MA Experiment 20000794 PARAMETER Experiment Name: At_Petals_P Parameter: Age (day) Value: 23-25 days
  misc_feature: MA Experiment 20000794 PARAMETER Experiment Name: At_Petals_P Parameter: Plant Line Value: WS
  misc_feature: MA Experiment 20000794 PARAMETER Experiment Name: At_Petals_P Parameter: Tissue Value: Petals vs. Whole plant
  misc_feature: MA Experiment ID: 20001757 Result: Down-regulated in Transcription
  misc_feature: MA Experiment 20001757 PARAMETER Experiment Name: At_50mM_NH4NO3_L-to-H_P Parameter: Timepoint (hr) Value: 6
  misc_feature: MA Experiment 20001757 PARAMETER Experiment Name: At_50mM_NH4NO3_L-to-H_P Parameter: Tissue Value: Leaf
  misc_feature: MA Experiment 20001757 PARAMETER Experiment Name: At_50mM_NH4NO3_L-to-H_P Parameter: Treatment Value: 50mM NH4NO3 vs 100mM Mannitol
  misc_feature: MA Experiment ID: 20001910 Result: Up-regulated in Transcription
  misc_feature: MA Experiment 20001910 PARAMETER Experiment Name: At_Drought_Reproduction_P Parameter: Age (day) Value: 37
  misc_feature: MA Experiment 20001910 PARAMETER Experiment Name: At_Drought_Reproduction_P Parameter: Organism Value: A. thaliana
  misc_feature: MA Experiment 20001910 PARAMETER Experiment Name: At_Drought_Reproduction_P Parameter: Plant Line Value: WS
  misc_feature: MA Experiment 20001910 PARAMETER Experiment Name: At_Drought_Reproduction_P Parameter: Timepoint (day) Value: 7
  misc_feature: MA Experiment 20001910 PARAMETER Experiment Name: At_Drought_Reproduction_P Parameter: Tissue Value: Flowers
  misc_feature: MA Experiment 20001910 PARAMETER Experiment Name: At_Drought_Reproduction_P Parameter: Treatment Value: Drought vs. No Drought
aaaatgttcaaaaactctctccccttaatctcttcctctaagaataattgagtggttaagggagagaggagacggagagtttttatattcgttaccggaaaattttgatctccgatggcttcttctcctgaatctgctcctccaacaaactccacctcttctccatctccaccgtctaataccaattcaaccacctcttctccgccggctccgtctcctccttctcctacacctcctcaaggagactcatcatcatcgccacctcctgattccacatctccaccagctccacaagctcctaaccctcctaattcctctaataactctccttcccctccgtcacagggcggtggaggagaaagaggaaatggaggaaacaatggtggcaatgatactccaccgtcacgcggctctcctccttctcctccttctaggagtaatggagataatggtggtagcagatcatcgccaccaggagacactggaggctctcgctcagacaaccctccttctagcggaggaagcagtggaggaggtggaggtggaagaagtaatacgaatacagcgatcatagttggtgtattagtcggagctggacttttgatgatcgttcttattattgtgtgtcttagacgcaaaaagaagagaaaagactccttctaccctgaacccatgaaaggaaaccaatatcaatactatggaaacaacaacaacaacaatgcttcacagaattatccgaattggcacctaaattcacaaggccaaaaccaacaatctactggtggttggggaggcggtggaccatcaccgcctcctcctccgcggatgcctacaagcggagaagattcttccatgtactcaggcccatcacgcccagttttacctcctccttcgcctgctctagccctcggattcaacaagagcacttttacttaccaagagcttgcggctgcaacaggagggtttacggatgctaaccttttgggacagggaggatttgggtatgtccataaaggagtcttgcctagcgggaaagaagtagcagttaagagtttaaaagcgggtagcggacaaggagagagggagtttcaagctgaggtcgatatcattagccgtgtgcatcatcggtatcttgtttctttggttggatattgcatagctgatggacagaggatgttggtttatgagtttgttcctaacaaaactttggaatatcatcttcatgggaaaaatcttccggtaatggagttctccactaggttgcgtatcgccttaggtgctgcgaaaggactcgcttaccttcacgaagactgccatcctcggatcattcaccgcgacatcaagtctgcaaatattctcttggacttcaactttgatgctatggtggctgattttggattagctaagttaacatctgataacaacactcatgtatctactcgtgtgatgggaactttcggatatctagctccagaatatgcttcaagcggtaaattaaccgagaaatccgatgttttctcttacggagttatgttattggaacttataactggaaaacgaccggttgataatagcatcaccatggacgacaccttagtagattgggctcggcctcttatggctcgcgcgctagaagatggaaactttaatgagctcgcagatgcgaggcttgaaggcaactacaacccgcaagaaatggctcgaatggtgacttgtgccgctgctagcattcgtcattcggggcgtaaacgtccaaagatgagccagatagtaagagcgttagaaggagaagtgtccttagatgctttaaacgaaggtgtgaagccaggacacagtaacgtttacgggtcattgggagcaagctcggattatagtcagacatcttacaatgcagacatgaagaaattcagacagatagctttgtcgagccaagaattcccagtcagtgactgtgaaggaacatctagtaatgattctagagatatgggaactaagagccctactcctccaaaatga

SEQ ID NO: 77261 - protein, 633 aa, Arabidopsis thaliana
  peptide (1)..(633): Ceres Seq. ID no. 12574353
  misc_feature (7)..(625): Homolog of NCBI NO: 13447449 NR Description: receptor protein kinase PERK1 [Brassica napus]
  misc_feature (180)..(628): Homolog of NCBI NO: 15222081 NR Description: hypothetical protein; protein id: At1g49270.1
  misc_feature (1)..(236): Homolog of NCBI NO: 15222081 NR Description: hypothetical protein; protein id: At1g49270.1
  misc_feature (1)..(617): Homolog of NCBI NO: 30690042 NR Description: serine threonine protein kinase -related thaliana] >gi|26452004|dbj|BAC43092.1| putative serine/threonine kinase [Arabidopsis thaliana] >gi|29029022|gb|AAO64890.1|
  misc_feature (7)..(625): Homolog of NCBI NO: 13877617 NR Description: protein kinase-like protein [Arabidopsis thaliana]
  misc_feature (7)..(625): Homolog of NCBI NO: 15230130 NR Description: protein kinase, putative; protein id: supported by cDNA: 17909., supported by cDNA: gi_13877616,
  misc_feature (1)..(628): Homolog of NCBI NO: 15230209 NR Description: protein kinase, putative; protein id: At3g18810.1
  misc_feature (1)..(628): Homolog of NCBI NO: 9293906 NR Description: somatic embryogenesis receptor kinase-like
  misc_feature (25)..(142): Homolog of NCBI NO: 15222081 NR Description: hypothetical protein; protein id: At1g49270.1
  misc_feature (231)..(623): Homolog of NCBI NO: 15230108 NR Description: protein kinase, putative; protein id: At3g24400.1
MASSPESAPPTNSTSSPSPPSNTNSTTSSPPAPSPPSPTPPQGDSSSSPPPDSTSPPAPQAPNPPNSSNNSPSPPSQGGGGERGNGGNNGGNDTPPSRGSPPSPPSRSNGDNGGSRSSPPGDTGGSRSDNPPSSGGSSGGGGGGRSNTNTAIIVGVLVGAGLLMIVLIIVCLRRKKKRKDSFYPEPMKGNQYQYYGNNNNNNASQNYPNWHLNSQGQNQQSTGGWGGGGPSPPPPPRMPTSGEDSSMYSGPSRPVLPPPSPALALGFNKSTFTYQELAAATGGFTDANLLGQGGFGYVHKGVLPSGKEVAVKSLKAGSGQGEREFQAEVDIISRVHHRYLVSLVGYCIADGQRMLVYEFVPNKTLEYHLHGKNLPVMEFSTRLRIALGAAKGLAYLHEDCHPRIIHRDIKSANILLDFNFDAMVADFGLAKLTSDNNTHVSTRVMGTFGYLAPEYASSGKLTEKSDVFSYGVMLLELITGKRPVDNSITMDDTLVDWARPLMARALEDGNFNELADARLEGNYNPQEMARMVTCAAASIRHSGRKRPKMSQIVRALEGEVSLDALNEGVKPGHSNVYGSLGASSDYSQTSYNADMKKFRQIALSSQEFPVSDCEGTSSNDSRDMGTKSPTPPK

SEQ ID NO: 77262 - protein, 470 aa, Arabidopsis thaliana
  peptide (1)..(470): Ceres Seq. ID no. 12574354
  misc_feature (1)..(462): Homolog of NCBI NO: 13447449 NR Description: receptor protein kinase PERK1 [Brassica napus]
  misc_feature (17)..(465): Homolog of NCBI NO: 15222081 NR Description: hypothetical protein; protein id: At1g49270.1
  misc_feature (1)..(73): Homolog of NCBI NO: 15222081 NR Description: hypothetical protein; protein id: At1g49270.1
  misc_feature (1)..(454): Homolog of NCBI NO: 30690042 NR Description: serine threonine protein kinase -related thaliana] >gi|26452004|dbj|BAC43092.1| putative serine/threonine kinase [Arabidopsis thaliana] >gi|29029022|gb|AAO64890.1|
  misc_feature (1)..(462): Homolog of NCBI NO: 13877617 NR Description: protein kinase-like protein [Arabidopsis thaliana]
  misc_feature (1)..(462): Homolog of NCBI NO: 15230130 NR Description: protein kinase, putative; protein id: supported by cDNA: 17909., supported by cDNA: gi_13877616,
  misc_feature (1)..(465): Homolog of NCBI NO: 15230209 NR Description: protein kinase, putative; protein id: At3g18810.1
  misc_feature (1)..(465): Homolog of NCBI NO: 9293906 NR Description: somatic embryogenesis receptor kinase-like
  misc_feature (68)..(460): Homolog of NCBI NO: 15230108 NR Description: protein kinase, putative; protein id: At3g24400.1
  misc_feature (1)..(73): Homolog of NCBI NO: 15230108 NR Description: protein kinase, putative; protein id: At3g24400.1
MIVLIIVCLRRKKKRKDSFYPEPMKGNQYQYYGNNNNNNASQNYPNWHLNSQGQNQQSTGGWGGGGPSPPPPPRMPTSGEDSSMYSGPSRPVLPPPSPALALGFNKSTFTYQELAAATGGFTDANLLGQGGFGYVHKGVLPSGKEVAVKSLKAGSGQGEREFQAEVDIISRVHHRYLVSLVGYCIADGQRMLVYEFVPNKTLEYHLHGKNLPVMEFSTRLRIALGAAKGLAYLHEDCHPRIIHRDIKSANILLDFNFDAMVADFGLAKLTSDNNTHVSTRVMGTFGYLAPEYASSGKLTEKSDVFSYGVMLLELITGKRPVDNSITMDDTLVDWARPLMARALEDGNFNELADARLEGNYNPQEMARMVTCAAASIRHSGRKRPKMSQIVRALEGEVSLDALNEGVKPGHSNVYGSLGASSDYSQTSYNADMKKFRQIALSSQEFPVSDCEGTSSNDSRDMGTKSPTPPK

SEQ ID NO: 77263 - protein, 447 aa, Arabidopsis thaliana
  peptide (1)..(447): Ceres Seq. ID no. 12574355
  misc_feature (1)..(439): Homolog of NCBI NO: 13447449 NR Description: receptor protein kinase PERK1 [Brassica napus]
  misc_feature (1)..(442): Homolog of NCBI NO: 15222081 NR Description: hypothetical protein; protein id: At1g49270.1
  misc_feature (1)..(50): Homolog of NCBI NO: 15222081 NR Description: hypothetical protein; protein id: At1g49270.1
  misc_feature (1)..(431): Homolog of NCBI NO: 30690042 NR Description: serine threonine protein kinase -related thaliana] >gi|26452004|dbj|BAC43092.1| putative serine/threonine kinase [Arabidopsis thaliana] >gi|29029022|gb|AAO64890.1|
  misc_feature (1)..(439): Homolog of NCBI NO: 13877617 NR Description: protein kinase-like protein [Arabidopsis thaliana]
  misc_feature (1)..(439): Homolog of NCBI NO: 15230130 NR Description: protein kinase, putative; protein id: supported by cDNA: 17909., supported by cDNA: gi_13877616,
  misc_feature (1)..(442): Homolog of NCBI NO: 15230209 NR Description: protein kinase, putative; protein id: At3g18810.1
  misc_feature (1)..(442): Homolog of NCBI NO: 9293906 NR Description: somatic embryogenesis receptor kinase-like
  misc_feature (45)..(437): Homolog of NCBI NO: 15230108 NR Description: protein kinase, putative; protein id: At3g24400.1
  misc_feature (1)..(50): Homolog of NCBI NO: 15230108 NR Description: protein kinase, putative; protein id: At3g24400.1
MKGNQYQYYGNNNNNNASQNYPNWHLNSQGQNQQSTGGWGGGGPSPPPPPRMPTSGEDSSMYSGPSRPVLPPPSPALALGFNKSTFTYQELAAATGGFTDANLLGQGGFGYVHKGVLPSGKEVAVKSLKAGSGQGEREFQAEVDIISRVHHRYLVSLVGYCIADGQRMLVYEFVPNKTLEYHLHGKNLPVMEFSTRLRIALGAAKGLAYLHEDCHPRIIHRDIKSANILLDFNFDAMVADFGLAKLTSDNNTHVSTRVMGTFGYLAPEYASSGKLTEKSDVFSYGVMLLELITGKRPVDNSITMDDTLVDWARPLMARALEDGNFNELADARLEGNYNPQEMARMVTCAAASIRHSGRKRPKMSQIVRALEGEVSLDALNEGVKPGHSNVYGSLGASSDYSQTSYNADMKKFRQIALSSQEFPVSDCEGTSSNDSRDMGTKSPTPPK

SEQ ID NO: 77264 - DNA, 1894 bp, Arabidopsis thaliana
  misc_feature (1)..(1894): Ceres Seq. ID no. 12574404
  misc_feature: MA Experiment ID: 20000227 Result: Up-regulated in Transcription
  misc_feature: MA Experiment 20000227 PARAMETER Experiment Name: At_Root-Tips-vs-Tops_P Parameter: Tissue Value: Root Tips vs. Root Tops
  misc_feature: MA Experiment ID: 20000495 Result: Down-regulated in Transcription
  misc_feature: MA Experiment 20000495 PARAMETER Experiment Name: At_Guard_Cells_P Parameter: Harvest Date Value: 8/2/2002
  misc_feature: MA Experiment 20000495 PARAMETER Experiment Name: At_Guard_Cells_P Parameter: Organism Value: A. thaliana
  misc_feature: MA Experiment 20000495 PARAMETER Experiment Name: At_Guard_Cells_P Parameter: Tissue Value: Guard Cells vs. Leaves
  misc_feature: MA Experiment ID: 20001557 Result: Up-regulated in Transcription
  misc_feature: MA Experiment 20001557 PARAMETER Experiment Name: At_Drought_Soil_Dry_P Parameter: Age (day) Value: 27
  misc_feature: MA Experiment 20001557 PARAMETER Experiment Name: At_Drought_Soil_Dry_P Parameter: Organism Value: A. thaliana
  misc_feature: MA Experiment 20001557 PARAMETER Experiment Name: At_Drought_Soil_Dry_P Parameter: Plant Line Value: WS
  misc_feature: MA Experiment 20001557 PARAMETER Experiment Name: At_Drought_Soil_Dry_P Parameter: Post Timepoint (hr) Value: 3
  misc_feature: MA Experiment 20001557 PARAMETER Experiment Name: At_Drought_Soil_Dry_P Parameter: Post-Treatment Value: Re-Water vs. No Drought
  misc_feature: MA Experiment 20001557 PARAMETER Experiment Name: At_Drought_Soil_Dry_P Parameter: Timepoint (day) Value: 13
  misc_feature: MA Experiment 20001557 PARAMETER Experiment Name: At_Drought_Soil_Dry_P Parameter: Treatment Value: Drought vs. No Drought
  misc_feature: MA Experiment ID: 20001558 Result: Up-regulated in Transcription
  misc_feature: MA Experiment 20001558 PARAMETER Experiment Name: At_Drought_Soil_Dry_P Parameter: Age (day) Value: 27
  misc_feature: MA Experiment 20001558 PARAMETER Experiment Name: At_Drought_Soil_Dry_P Parameter: Organism Value: A. thaliana
  misc_feature: MA Experiment 20001558 PARAMETER Experiment Name: At_Drought_Soil_Dry_P Parameter: Plant Line Value: WS
  misc_feature: MA Experiment 20001558 PARAMETER Experiment Name: At_Drought_Soil_Dry_P Parameter: Post Timepoint (hr) Value: 6
  misc_feature: MA Experiment 20001558 PARAMETER Experiment Name: At_Drought_Soil_Dry_P Parameter: Post-Treatment Value: Re-Water vs. No Drought
  misc_feature: MA Experiment 20001558 PARAMETER Experiment Name: At_Drought_Soil_Dry_P Parameter: Timepoint (day) Value: 13
  misc_feature: MA Experiment 20001558 PARAMETER Experiment Name: At_Drought_Soil_Dry_P Parameter: Treatment Value: Drought vs. No Drought
acaaaaacccttttaatctctctctcgtgtagatctatcactctccatttcccttcttctctgtaaaccctttataaatctcacttccttcttcttcatcaatccttcctcagatctcttcttattcaaattcaattgagagatactctcttcttcttctttttctctatccagttccttctgtgcgaagttcttctgattaatttgagtttcttggaagcttttactcgatcttcatcggatcttagggttttgtttaaatccagatcttgggttttgttaaataatggcgactccttatcctggagcgacgcaggtgggttcgtactttgtggggcagtattatcaagtgttgcagcagcagccagatcttattcatcagttttattctgagcctagtagagctattcgtatcgatggtgattccaccgagactgctaattctttgctgcatattcataacatggttatgtcactgaatttcactgcgattgaagtgaagacgattaattcagtcgagtcgtgggaaggtggtgttcttgtggtggtttcaggatctgtgaaaaccaaggaatttagcaacagaaggagttttgtgcagaccttttttctcgctcctcaggaaaagggttattttgttctcagtgatgtatttctgtttgttgatgagggtactgtttactatcatcagccttcttatttatctgaaatcaagcatgaggctcagcttaatcctcctacccgtcatccagatccccaagtttctgactatgtgctggaggaagaggcaagcgattatgtgaacgcagtccaaatcaaagatgatcttgttgataagtacagtctgcaagaggaccaacatcaacctcagcatgaagactatgaagatgaagttgcgattgaggaaacacctagggaagaagttgcagttgatgtggtacatgaacatcgggctgcaccagtagaggaaccagttggtgaaaaatcaaagatgagttatgcttccattttaaaagttgcaaaggaagcagcaactgtacctgtagctgctacacaaccatcatataacaagagctctcaagatattaatgagtgggatcaaccaatgcggactccttcccctcagctggctgcgcctcttgcccctattcagcaatcaaactcatccacatatgtttccgactatggagcagaggcagaagatggctccggttttgaagactttgagttcaaatcagtgtacgttaggaatttgccttccgacatatctgcttctgaaatagaggaagagtttaagaacttcggtacaatcaagcctgatggtgtgttcctcagaacccgcaaggatgttatgggcgtatgttatgcatttgttgagtttgaggacatgacttccgttgagaatgcgattaaggcttctcctatatacttgggtggaaggcaagtatacattgaggaacgaagaccaaatcccgctggtgttcgcggagcaagaagaggaggaggacgtggaaggggtggttacccaacagaagcaccaagaggccggtttggtgggcgtgggtctggcagaggaaaccaggatggaggtgactacaggccaagaggaaatggttactaccgcggtggtggtcgctaaaagaaaaaagaatctcgtcaaagttttagtgctaccaaagaatgaaatgattcagttcttcttcctttatctacggaagaagtagtttgtaatttctattttgttgggtttggtttttggctcaaagaaacaaagattttggcttatatatgtttttctttaaatttgttatagatttagccatttagagcttttgactgttatctccctttgggaatggtttagttttggtataacatttcaatttttggtttc

SEQ ID NO: 77265 - protein, 450 aa, Arabidopsis thaliana
  peptide (1)..(450): Ceres Seq. ID no. 12574405
  misc_feature (11)..(125): Pfam Name: Nuclear transport factor 2 (NTF2) domain Pfam Description: Nuclear transport factor 2 (NTF2) domain
  misc_feature (1)..(450): Homolog of NCBI NO: 15240057 NR Description: NTF2-containing RNA-binding protein, putative; id: At5g43960.1, supported by cDNA: gi_19347888, supported by gi_21281086 [Arabidopsis thaliana] >gi|9758555|dbj|BAB09056.1|
  misc_feature (2)..(258): Homolog of NCBI NO: 30697455 NR Description: NTF2-containing RNA-binding protein, putative
  misc_feature (229)..(448): Homolog of NCBI NO: 30697455 NR Description: NTF2-containing RNA-binding protein, putative
  misc_feature (10)..(449): Homolog of NCBI NO: 9294171 NR Description: RNA-binding protein-like [Arabidopsis thaliana]
  misc_feature (11)..(449): Homolog of NCBI NO: 30687772 NR Description: NTF2-containing RNA-binding protein, putative thaliana] >gi|17979475|gb|AAL50074.1| AT3g25150/MJL12_9 thaliana] >gi|21360395|gb|AAM47313.1| AT3g25150/MJL12_9
  misc_feature (11)..(444): Homolog of NCBI NO: 10177355 NR Description: RNA-binding protein-like [Arabidopsis thaliana]
  misc_feature (11)..(444): Homolog of NCBI NO: 30695510 NR Description: NTF2-containing RNA-binding protein, putative
  misc_feature (11)..(450): Homolog of NCBI NO: 34394922 NR Description: putative Ras-GTPase activating protein SH3
  misc_feature (1)..(450): Homolog of NCBI NO: 14916573 NR Description: Ras-GTPase-activating protein binding protein 2
  misc_feature (223)..(442): Homolog of NCBI NO: 31126693 NR Description: putative GAP SH3 binding protein [Oryza sativa
MATPYPGATQVGSYFVGQYYQVLQQQPDLIHQFYSEPSRAIRIDGDSTETANSLLHIHNMVMSLNFTAIEVKTINSVESWEGGVLVVVSGSVKTKEFSNRRSFVQTFFLAPQEKGYFVLSDVFLFVDEGTVYYHQPSYLSEIKHEAQLNPPTRHPDPQVSDYVLEEEASDYVNAVQIKDDLVDKYSLQEDQHQPQHEDYEDEVAIEETPREEVAVDVVHEHRAAPVEEPVGEKSKMSYASILKVAKEAATVPVAATQPSYNKSSQDINEWDQPMRTPSPQLAAPLAPIQQSNSSTYVSDYGAEAEDGSGFEDFEFKSVYVRNLPSDISASEIEEEFKNFGTIKPDGVFLRTRKDVMGVCYAFVEFEDMTSVENAIKASPIYLGGRQVYIEERRPNPAGVRGARRGGGRGRGGYPTEAPRGRFGGRGSGRGNQDGGDYRPRGNGYYRGGGR

SEQ ID NO: 77266 - protein, 391 aa, Arabidopsis thaliana
  peptide (1)..(391): Ceres Seq. ID no. 12574406
  misc_feature (1)..(66): Pfam Name: Nuclear transport factor 2 (NTF2) domain Pfam Description: Nuclear transport factor 2 (NTF2) domain
  misc_feature (1)..(391): Homolog of NCBI NO: 15240057 NR Description: NTF2-containing RNA-binding protein, putative; id: At5g43960.1, supported by cDNA: gi_19347888, supported by gi_21281086 [Arabidopsis thaliana] >gi|9758555|dbj|BAB09056.1|
  misc_feature (1)..(199): Homolog of NCBI NO: 30697455 NR Description: NTF2-containing RNA-binding protein, putative
  misc_feature (170)..(389): Homolog of NCBI NO: 30697455 NR Description: NTF2-containing RNA-binding protein, putative
  misc_feature (1)..(390): Homolog of NCBI NO: 9294171 NR Description: RNA-binding protein-like [Arabidopsis thaliana]
  misc_feature (1)..(390): Homolog of NCBI NO: 30687772 NR Description: NTF2-containing RNA-binding protein, putative thaliana] >gi|17979475|gb|AAL50074.1| AT3g25150/MJL12_9 thaliana] >gi|21360395|gb|AAM47313.1| AT3g25150/MJL12_9
  misc_feature (1)..(385): Homolog of NCBI NO: 10177355 NR Description: RNA-binding protein-like [Arabidopsis thaliana]
  misc_feature (1)..(385): Homolog of NCBI NO: 30695510 NR Description: NTF2-containing RNA-binding protein, putative
  misc_feature (1)..(391): Homolog of NCBI NO: 34394922 NR Description: putative Ras-GTPase activating protein SH3
  misc_feature (1)..(391): Homolog of NCBI NO: 14916573 NR Description: Ras-GTPase-activating protein binding protein 2
  misc_feature (164)..(383): Homolog of NCBI NO: 31126693 NR Description: putative GAP SH3 binding protein [Oryza sativa
MVMSLNFTAIEVKTINSVESWEGGVLVVVSGSVKTKEFSNRRSFVQTFFLAPQEKGYFVLSDVFLFVDEGTVYYHQPSYLSEIKHEAQLNPPTRHPDPQVSDYVLEEEASDYVNAVQIKDDLVDKYSLQEDQHQPQHEDYEDEVAIEETPREEVAVDVVHEHRAAPVEEPVGEKSKMSYASILKVAKEAATVPVAATQPSYNKSSQDINEWDQPMRTPSPQLAAPLAPIQQSNSSTYVSDYGAEAEDGSGFEDFEFKSVYVRNLPSDISASEIEEEFKNFGTIKPDGVFLRTRKDVMGVCYAFVEFEDMTSVENAIKASPIYLGGRQVYIEERRPNPAGVRGARRGGGRGRGGYPTEAPRGRFGGRGSGRGNQDGGDYRPRGNGYYRGGGR

SEQ ID NO: 77267 - protein, 389 aa, Arabidopsis thaliana
  peptide (1)..(389): Ceres Seq. ID no. 12574407
  misc_feature (1)..(64): Pfam Name: Nuclear transport factor 2 (NTF2) domain Pfam Description: Nuclear transport factor 2 (NTF2) domain
  misc_feature (1)..(389): Homolog of NCBI NO: 15240057 NR Description: NTF2-containing RNA-binding protein, putative; id: At5g43960.1, supported by cDNA: gi_19347888, supported by gi_21281086 [Arabidopsis thaliana] >gi|9758555|dbj|BAB09056.1|
  misc_feature (1)..(197): Homolog of NCBI NO: 30697455 NR Description: NTF2-containing RNA-binding protein, putative
  misc_feature (168)..(387): Homolog of NCBI NO: 30697455 NR Description: NTF2-containing RNA-binding protein, putative
  misc_feature (1)..(388): Homolog of NCBI NO: 9294171 NR Description: RNA-binding protein-like [Arabidopsis thaliana]
  misc_feature (1)..(388): Homolog of NCBI NO: 30687772 NR Description: NTF2-containing RNA-binding protein, putative thaliana] >gi|17979475|gb|AAL50074.1| AT3g25150/MJL12_9 thaliana] >gi|21360395|gb|AAM47313.1| AT3g25150/MJL12_9
  misc_feature (1)..(383): Homolog of NCBI NO: 10177355 NR Description: RNA-binding protein-like [Arabidopsis thaliana]
  misc_feature (1)..(383): Homolog of NCBI NO: 30695510 NR Description: NTF2-containing RNA-binding protein, putative
  misc_feature (1)..(389): Homolog of NCBI NO: 34394922 NR Description: putative Ras-GTPase activating protein SH3
  misc_feature (1)..(389): Homolog of NCBI NO: 14916573 NR Description: Ras-GTPase-activating protein binding protein 2
  misc_feature (162)..(381): Homolog of NCBI NO: 31126693 NR Description: putative GAP SH3 binding protein [Oryza sativa
MSLNFTAIEVKTINSVESWEGGVLVVVSGSVKTKEFSNRRSFVQTFFLAPQEKGYFVLSDVFLFVDEGTVYYHQPSYLSEIKHEAQLNPPTRHPDPQVSDYVLEEEASDYVNAVQIKDDLVDKYSLQEDQHQPQHEDYEDEVAIEETPREEVAVDVVHEHRAAPVEEPVGEKSKMSYASILKVAKEAATVPVAATQPSYNKSSQDINEWDQPMRTPSPQLAAPLAPIQQSNSSTYVSDYGAEAEDGSGFEDFEFKSVYVRNLPSDISASEIEEEFKNFGTIKPDGVFLRTRKDVMGVCYAFVEFEDMTSVENAIKASPIYLGGRQVYIEERRPNPAGVRGARRGGGRGRGGYPTEAPRGRFGGRGSGRGNQDGGDYRPRGNGYYRGGGR

SEQ ID NO: 77268 - DNA, 1242 bp, Arabidopsis thaliana
  misc_feature (1)..(1242): Ceres Seq. ID no. 12574431
  misc_feature: MA Experiment ID: 20000185 Result: Up-regulated in Transcription
  misc_feature: MA Experiment 20000185 PARAMETER Experiment Name: At_Roots__P Parameter: Age (day) Value: 7 vs. 21
  misc_feature: MA Experiment 20000185 PARAMETER Experiment Name: At_Roots__P Parameter: Organism Value: A. thaliana
  misc_feature: MA Experiment 20000185 PARAMETER Experiment Name: At_Roots__P Parameter: Tissue Value: Roots vs. Whole Plant
  misc_feature: MA Experiment ID: 20000496 Result: Up-regulated in Transcription
  misc_feature: MA Experiment 20000496 PARAMETER Experiment Name: At_Guard_Cells_P Parameter: Harvest Date Value: 7/19/2002
  misc_feature: MA Experiment 20000496 PARAMETER Experiment Name: At_Guard_Cells_P Parameter: Organism Value: Canola
  misc_feature: MA Experiment 20000496 PARAMETER Experiment Name: At_Guard_Cells_P Parameter: Tissue Value: Guard Cells vs. Leaves
  misc_feature: MA Experiment ID: 20000794 Result: Up-regulated in Transcription
  misc_feature: MA Experiment 20000794 PARAMETER Experiment Name: At_Petals_P Parameter: Age (day) Value: 23-25 days
  misc_feature: MA Experiment 20000794 PARAMETER Experiment Name: At_Petals_P Parameter: Plant Line Value: WS
  misc_feature: MA Experiment 20000794 PARAMETER Experiment Name: At_Petals_P Parameter: Tissue Value: Petals vs. Whole plant
gagcttcttgaagcagatcaagatcaagaaagaacacttttgtgaacttcttcttccccacatctcctaaaagcttcacacacaccaaaccaagcgtttcttttcttatctactcgattatcaacacatcttttcctgaaactccttccacatctttgtctgatcatggtgaaggaaacagtgtattatgatgttcttggtgtcactccctctgcttctgaggaagagattcgcaaggcttattacatcaaggcaagacaagttcatcctgacaagaatcaaggtgatcctctagctgctgaaaagtttcaggttcttggtgaagcttaccaggttctaagtgatcctgttcatcgtgaagcgtatgatcggactggaaaattctcagctcccaaagaaacaatggttgatccaacggctgttttcgctcttcttttcggaagtgaactattcgaggattatatcggtcacttggctgttgcatcaatggcttccactcaaatggcttctgaaatcgaaaactctgatcagtttcaagacaaactaaaggcaaatcaaaaaccatatgctgttcagaaagaaagagaagaaaacctttcaaggtttctcaaagattttctgagtcaatatgtccacggagacaaagaaggattcataagccgcgcagaatctgaagccaagagactttcagatgcagcttttggagcggatatgttgcatacaattggatatgtatacacaagacaagcagctcaagaacttgggaagagagctctttacttaggagttccatttgtagctgaatgggttaggaacaaaggtcattcttggaaatcacagattagtgcagctaaaggagctttacagttacttcagctgcaagaagagagtaaccggagattaaagaaagatgggactagtccagcaaatgagttagagtctcatattcagaccaacaaagaaacattgatgggatctttgtggaaacttaatgttgtcgacattgaagtgactctgttacatgtgtgtcagatgcaagaaaagcaatcgaagaacggtacaacatcaagaaaagaagatgaagacagcgacgatgatgacagtagcagcgatgacgattcttcacaaccactttcatacagaactcctctgcttactcaggggattggtagacttttcagatgtctctgcaatccagcattcgatgtagacgatgatgaaattgtatacaaaggcaaatga

SEQ ID NO: 77269 - protein, 358 aa, Arabidopsis thaliana
  peptide (1)..(358): Ceres Seq. ID no. 12574432
  misc_feature (6)..(71): Pfam Name: DnaJ domain Pfam Description: DnaJ domain
  misc_feature (1)..(358): Homolog of NCBI NO: 25406486 NR Description: hypothetical protein F22K20.12 [imported] -
  misc_feature (1)..(290): Homolog of NCBI NO: 30699227 NR Description: DnaJ protein family [Arabidopsis thaliana]
  misc_feature (291)..(358): Homolog of NCBI NO: 30699227 NR Description: DnaJ protein family [Arabidopsis thaliana]
  misc_feature (1)..(296): Homolog of NCBI NO: 15223142 NR Description: putative DnaJ protein; protein id: At1g76700.1
  misc_feature (1)..(296): Homolog of NCBI NO: 26449747 NR Description: putative DnaJ protein [Arabidopsis thaliana]
  misc_feature (130)..(304): Homolog of NCBI NO: 27817868 NR Description: OJ1081_B12.17 [Oryza sativa (japonica
  misc_feature (1)..(129): Homolog of NCBI NO: 27817868 NR Description: OJ1081_B12.17 [Oryza sativa (japonica
  misc_feature (1)..(304): Homolog of NCBI NO: 18394951 NR Description: expressed protein; protein id: At1g21080.1, by cDNA: gi_15028270 [Arabidopsis thaliana]
  misc_feature (1)..(296): Homolog of NCBI NO: 2230757 NR Description: dnaJ-like protein [Arabidopsis thaliana]
  misc_feature (1)..(289): Homolog of NCBI NO: 15226572 NR Description: putative DnaJ protein; protein id: At2g21510.1, by cDNA: 151802. [Arabidopsis thaliana] >gi|25412044|pir||B84602
MVKETVYYDVLGVTPSASEEEIRKAYYIKARQVHPDKNQGDPLAAEKFQVLGEAYQVLSDPVHREAYDRTGKFSAPKETMVDPTAVFALLFGSELFEDYIGHLAVASMASTQMASEIENSDQFQDKLKANQKPYAVQKEREENLSRFLKDFLSQYVHGDKEGFISRAESEAKRLSDAAFGADMLHTIGYVYTRQAAQELGKRALYLGVPFVAEWVRNKGHSWKSQISAAKGALQLLQLQEESNRRLKKDGTSPANELESHIQTNKETLMGSLWKLNVVDIEVTLLHVCQMQEKQSKNGTTSRKEDEDSDDDDSSSDDDSSQPLSYRTPLLTQGIGRLFRCLCNPAFDVDDDEIVYKGK

SEQ ID NO: 77270 - protein, 279 aa, Arabidopsis thaliana
  peptide (1)..(279): Ceres Seq. ID no. 12574433
  misc_feature (1)..(279): Homolog of NCBI NO: 25406486 NR Description: hypothetical protein F22K20.12 [imported] -
  misc_feature (1)..(211): Homolog of NCBI NO: 30699227 NR Description: DnaJ protein family [Arabidopsis thaliana]
  misc_feature (212)..(279): Homolog of NCBI NO: 30699227 NR Description: DnaJ protein family [Arabidopsis thaliana]
  misc_feature (1)..(217): Homolog of NCBI NO: 15223142 NR Description: putative DnaJ protein; protein id: At1g76700.1
  misc_feature (1)..(217): Homolog of NCBI NO: 26449747 NR Description: putative DnaJ protein [Arabidopsis thaliana]
  misc_feature (51)..(225): Homolog of NCBI NO: 27817868 NR Description: OJ1081_B12.17 [Oryza sativa (japonica
  misc_feature (1)..(50): Homolog of NCBI NO: 27817868 NR Description: OJ1081_B12.17 [Oryza sativa (japonica
  misc_feature (1)..(225): Homolog of NCBI NO: 18394951 NR Description: expressed protein; protein id: At1g21080.1, by cDNA: gi_15028270 [Arabidopsis thaliana]
  misc_feature (1)..(217): Homolog of NCBI NO: 2230757 NR Description: dnaJ-like protein [Arabidopsis thaliana]
  misc_feature (1)..(210): Homolog of NCBI NO: 15226572 NR Description: putative DnaJ protein; protein id: At2g21510.1, by cDNA: 151802. [Arabidopsis thaliana] >gi|25412044|pir||B84602
MVDPTAVFALLFGSELFEDYIGHLAVASMASTQMASEIENSDQFQDKLKANQKPYAVQKEREENLSRFLKDFLSQYVHGDKEGFISRAESEAKRLSDAAFGADMLHTIGYVYTRQAAQELGKRALYLGVPFVAEWVRNKGHSWKSQISAAKGALQLLQLQEESNRRLKKDGTSPANELESHIQTNKETLMGSLWKLNVVDIEVTLLHVCQMQEKQSKNGTTSRKEDEDSDDDDSSSDDDSSQPLSYRTPLLTQGIGRLFRCLCNPAFDVDDDEIVYKGK

SEQ ID NO: 77271 - protein, 251 aa, Arabidopsis thaliana
  peptide (1)..(251): Ceres Seq. ID no. 12574434
  misc_feature (1)..(251): Homolog of NCBI NO: 25406486 NR Description: hypothetical protein F22K20.12 [imported] -
  misc_feature (1)..(183): Homolog of NCBI NO: 30699227 NR Description: DnaJ protein family [Arabidopsis thaliana]
  misc_feature (184)..(251): Homolog of NCBI NO: 30699227 NR Description: DnaJ protein family [Arabidopsis thaliana]
  misc_feature (1)..(189): Homolog of NCBI NO: 15223142 NR Description: putative DnaJ protein; protein id: At1g76700.1
  misc_feature (1)..(189): Homolog of NCBI NO: 26449747 NR Description: putative DnaJ protein [Arabidopsis thaliana]
  misc_feature (23)..(197): Homolog of NCBI NO: 27817868 NR Description: OJ1081_B12.17 [Oryza sativa (japonica
  misc_feature (1)..(22): Homolog of NCBI NO: 27817868 NR Description: OJ1081_B12.17 [Oryza sativa (japonica
  misc_feature (1)..(197): Homolog of NCBI NO: 18394951 NR Description: expressed protein; protein id: At1g21080.1, by cDNA: gi_15028270 [Arabidopsis thaliana]
  misc_feature (1)..(189): Homolog of NCBI NO: 2230757 NR Description: dnaJ-like protein [Arabidopsis thaliana]
  misc_feature (1)..(182): Homolog of NCBI NO: 15226572 NR Description: putative DnaJ protein; protein id: At2g21510.1, by cDNA: 151802. [Arabidopsis thaliana] >gi|25412044|pir||B84602
MASTQMASEIENSDQFQDKLKANQKPYAVQKEREENLSRFLKDFLSQYVHGDKEGFISRAESEAKRLSDAAFGADMLHTIGYVYTRQAAQELGKRALYLGVPFVAEWVRNKGHSWKSQISAAKGALQLLQLQEESNRRLKKDGTSPANELESHIQTNKETLMGSLWKLNVVDIEVTLLHVCQMQEKQSKNGTTSRKEDEDSDDDDSSSDDDSSQPLSYRTPLLTQGIGRLFRCLCNPAFDVDDDEIVYKGK

SEQ ID NO: 77272 - DNA, 1927 bp, Arabidopsis thaliana
  misc_feature (1)..(1927): Ceres Seq. ID no. 12574435
  misc_feature: MA Experiment ID: 20000166 Result: Up-regulated in Transcription
  misc_feature: MA Experiment 20000166 PARAMETER Experiment Name: At_100uM_ABA_P Parameter: Age (day) Value: 14
  misc_feature: MA Experiment 20000166 PARAMETER Experiment Name: At_100uM_ABA_P Parameter: Organism Value: A. thaliana
  misc_feature: MA Experiment 20000166 PARAMETER Experiment Name: At_100uM_ABA_P Parameter: Plant Line Value: WS
  misc_feature: MA Experiment 20000166 PARAMETER Experiment Name: At_100uM_ABA_P Parameter: Timepoint (hr) Value: 1
  misc_feature: MA Experiment 20000166 PARAMETER Experiment Name: At_100uM_ABA_P Parameter: Tissue Value: Aerial
  misc_feature: MA Experiment 20000166 PARAMETER Experiment Name: At_100uM_ABA_P Parameter: Treatment Value: 100uM ABA vs. No Treatment
  misc_feature: MA Experiment ID: 20000179 Result: Up-regulated in Transcription
  misc_feature: MA Experiment 20000179 PARAMETER Experiment Name: At_Germinating_Seeds_P Parameter: Age (hr) Value: 6 vs. 0
  misc_feature: MA Experiment 20000179 PARAMETER Experiment Name: At_Germinating_Seeds_P Parameter: Tissue Value: Germinating Seeds
  misc_feature: MA Experiment ID: 20000182 Result: Up-regulated in Transcription
  misc_feature: MA Experiment 20000182 PARAMETER Experiment Name: At_2mM_SA_P Parameter: Age (day) Value: 14
  misc_feature: MA Experiment 20000182 PARAMETER Experiment Name: At_2mM_SA_P Parameter: Organism Value: A. thaliana
  misc_feature: MA Experiment 20000182 PARAMETER Experiment Name: At_2mM_SA_P Parameter: Plant Line Value: WS
  misc_feature: MA Experiment 20000182 PARAMETER Experiment Name: At_2mM_SA_P Parameter: Timepoint (hr) Value: 6
  misc_feature: MA Experiment 20000182 PARAMETER Experiment Name: At_2mM_SA_P Parameter: Tissue Value: Aerial
  misc_feature: MA Experiment 20000182 PARAMETER Experiment Name: At_2mM_SA_P Parameter: Treatment Value: 2mM SA vs. No Treatment
  misc_feature: MA Experiment ID: 20000184 Result: Down-regulated in Transcription
  misc_feature: MA Experiment 20000184 PARAMETER Experiment Name: At_Shoots__P Parameter: Age (day) Value: 7
  misc_feature: MA Experiment 20000184 PARAMETER Experiment Name: At_Shoots__P Parameter: Tissue Value: Shoots vs. Whole Plant
  misc_feature: MA Experiment ID: 20000235 Result: Up-regulated in Transcription
  misc_feature: MA Experiment 20000235 PARAMETER Experiment Name: At_Siliques_P Parameter: Age (day) Value: 21
  misc_feature: MA Experiment 20000235 PARAMETER Experiment Name: At_Siliques_P Parameter: Organism Value: A. thaliana
  misc_feature: MA Experiment 20000235 PARAMETER Experiment Name: At_Siliques_P Parameter: Plant Line Value: WS
  misc_feature: MA Experiment 20000235 PARAMETER Experiment Name: At_Siliques_P Parameter: Tissue Value: 5-10mm Siliques vs. Whole Plant
  misc_feature: MA Experiment ID: 20000264 Result: Up-regulated in Transcription
  misc_feature: MA Experiment 20000264 PARAMETER Experiment Name: At_Open_Flower_P Parameter: Age (day) Value: 21
  misc_feature: MA Experiment 20000264 PARAMETER Experiment Name: At_Open_Flower_P Parameter: Plant Line Value: WS
  misc_feature: MA Experiment 20000264 PARAMETER Experiment Name: At_Open_Flower_P Parameter: Tissue Value: Open Flower vs. Whole Plant
  misc_feature: MA Experiment ID: 20000265 Result: Up-regulated in Transcription
  misc_feature: MA Experiment 20000265 PARAMETER Experiment Name: At_Open_Flower_P Parameter: Age (day) Value: 21
  misc_feature: MA Experiment 20000265 PARAMETER Experiment Name: At_Open_Flower_P Parameter: Plant Line Value: WS
  misc_feature: MA Experiment 20000265 PARAMETER Experiment Name: At_Open_Flower_P Parameter: Tissue Value: Closed Flower vs. Whole Plant
  misc_feature: MA Experiment ID: 20000286 Result: Up-regulated in Transcription
  misc_feature: MA Experiment 20000286 PARAMETER Experiment Name: At_Open_Flower_P Parameter: Age (day) Value: 21
  misc_feature: MA Experiment 20000286 PARAMETER Experiment Name: At_Open_Flower_P Parameter: Plant Line Value: WS
  misc_feature: MA Experiment 20000286 PARAMETER Experiment Name: At_Open_Flower_P Parameter: Tissue Value: Half Open vs. Whole Plant
  misc_feature: MA Experiment ID: 20000437 Result: Up-regulated in Transcription
  misc_feature: MA Experiment 20000437 PARAMETER Experiment Name: At_Drought_P Parameter: Age (day) Value: 8
  misc_feature: MA Experiment 20000437 PARAMETER Experiment Name: At_Drought_P Parameter: Organism Value: A. thaliana
  misc_feature: MA Experiment 20000437 PARAMETER Experiment Name: At_Drought_P Parameter: Plant Line Value: WS
  misc_feature: MA Experiment 20000437 PARAMETER Experiment Name: At_Drought_P Parameter: Timepoint (hr) Value: 24
  misc_feature: MA Experiment 20000437 PARAMETER Experiment Name: At_Drought_P Parameter: Tissue Value: Whole Plant
  misc_feature: MA Experiment 20000437 PARAMETER Experiment Name: At_Drought_P Parameter: Treatment Value: Drought vs. No Drought
  misc_feature: MA Experiment ID: 20000438 Result: Down-regulated in Transcription
  misc_feature: MA Experiment 20000438 PARAMETER Experiment Name: At_Shoots__P Parameter: Age (day) Value: 14
  misc_feature: MA Experiment 20000438 PARAMETER Experiment Name: At_Shoots__P Parameter: Tissue Value: Shoots vs. Whole Plant
  misc_feature: MA Experiment ID: 20000445 Result: Up-regulated in Transcription
  misc_feature: MA Experiment 20000445 PARAMETER Experiment Name: At_100uM_NAA__P Parameter: Age (day) Value: 14
  misc_feature: MA Experiment 20000445 PARAMETER Experiment Name: At_100uM_NAA__P Parameter: Organism Value: A. thaliana
  misc_feature: MA Experiment 20000445 PARAMETER Experiment Name: At_100uM_NAA__P Parameter: Plant Line Value: WS
  misc_feature: MA Experiment 20000445 PARAMETER Experiment Name: At_100uM_NAA__P Parameter: Timepoint (hr) Value: 6
  misc_feature: MA Experiment 20000445 PARAMETER Experiment Name: At_100uM_NAA__P Parameter: Tissue Value: Aerial
  misc_feature: MA Experiment 20000445 PARAMETER Experiment Name: At_100uM_NAA__P Parameter: Treatment Value: 100uM NAA vs. No Treatment
  misc_feature: MA Experiment ID: 20000794 Result: Up-regulated in Transcription
  misc_feature: MA Experiment 20000794 PARAMETER Experiment Name: At_Petals_P Parameter: Age (day) Value: 23-25 days
  misc_feature: MA Experiment 20000794 PARAMETER Experiment Name: At_Petals_P Parameter: Plant Line Value: WS
  misc_feature: MA Experiment 20000794 PARAMETER Experiment Name: At_Petals_P Parameter: Tissue Value: Petals vs. Whole plant
  misc_feature: MA Experiment ID: 20001247 Result: Down-regulated in Transcription
  misc_feature: MA Experiment 20001247 PARAMETER Experiment Name: At_Far-red-induction_P Parameter: Age (day) Value: 7
  misc_feature: MA Experiment 20001247 PARAMETER Experiment Name: At_Far-red-induction_P Parameter: Light Value: Far-red vs. White
  misc_feature: MA Experiment 20001247 PARAMETER Experiment Name: At_Far-red-induction_P Parameter: Organism Value: A. thaliana
  misc_feature: MA Experiment 20001247 PARAMETER Experiment Name: At_Far-red-induction_P Parameter: Plant Line Value: Columbia
  misc_feature: MA Experiment 20001247 PARAMETER Experiment Name: At_Far-red-induction_P Parameter: Timepoint (hr) Value: 1
  misc_feature: MA Experiment 20001247 PARAMETER Experiment Name: At_Far-red-induction_P Parameter: Tissue Value: Whole Plant
  misc_feature: MA Experiment ID: 20001557 Result: Up-regulated in Transcription
  misc_feature: MA Experiment 20001557 PARAMETER Experiment Name: At_Drought_Soil_Dry_P Parameter: Age (day) Value: 27
  misc_feature: MA Experiment 20001557 PARAMETER Experiment Name: At_Drought_Soil_Dry_P Parameter: Organism Value: A. thaliana
  misc_feature: MA Experiment 20001557 PARAMETER Experiment Name: At_Drought_Soil_Dry_P Parameter: Plant Line Value: WS
  misc_feature: MA Experiment 20001557 PARAMETER Experiment Name: At_Drought_Soil_Dry_P Parameter: Post Timepoint (hr) Value: 3
  misc_feature: MA Experiment 20001557 PARAMETER Experiment Name: At_Drought_Soil_Dry_P Parameter: Post-Treatment Value: Re-Water vs. No Drought
  misc_feature: MA Experiment 20001557 PARAMETER Experiment Name: At_Drought_Soil_Dry_P Parameter: Timepoint (day) Value: 13
  misc_feature: MA Experiment 20001557 PARAMETER Experiment Name: At_Drought_Soil_Dry_P Parameter: Treatment Value: Drought vs. No Drought
  misc_feature: MA Experiment ID: 20001560 Result: Up-regulated in Transcription
  misc_feature: MA Experiment 20001560 PARAMETER Experiment Name: At_Drought_Soil_Dry_P Parameter: Age (day) Value: 28
  misc_feature: MA Experiment 20001560 PARAMETER Experiment Name: At_Drought_Soil_Dry_P Parameter: Organism Value: A. thaliana
  misc_feature: MA Experiment 20001560 PARAMETER Experiment Name: At_Drought_Soil_Dry_P Parameter: Plant Line Value: WS
  misc_feature: MA Experiment 20001560 PARAMETER Experiment Name: At_Drought_Soil_Dry_P Parameter: Post Timepoint (hr) Value: None
  misc_feature: MA Experiment 20001560 PARAMETER Experiment Name: At_Drought_Soil_Dry_P Parameter: Post-Treatment Value: None
  misc_feature: MA Experiment 20001560 PARAMETER Experiment Name: At_Drought_Soil_Dry_P Parameter: Timepoint (day) Value: 14
  misc_feature: MA Experiment 20001560 PARAMETER Experiment Name: At_Drought_Soil_Dry_P Parameter: Treatment Value: Drought vs. No Drought
  misc_feature: MA Experiment ID: 20001757 Result: Down-regulated in Transcription
  misc_feature: MA Experiment 20001757 PARAMETER Experiment Name: At_50mM_NH4NO3_L-to-H_P Parameter: Timepoint (hr) Value: 6
  misc_feature: MA Experiment 20001757 PARAMETER Experiment Name: At_50mM_NH4NO3_L-to-H_P Parameter: Tissue Value: Leaf
  misc_feature: MA Experiment 20001757 PARAMETER Experiment Name: At_50mM_NH4NO3_L-to-H_P Parameter: Treatment Value: 50mM NH4NO3 vs 100mM Mannitol
tacatataacacagtgagaaaacagagcaaaaacagagagatattacgatgtttttctctaaggatcttccttcacctacttcggttttcacagcttacgcatcaatggcgggttacatgatgatgataagatcaatggctcacgagctaatcccagctcccctccaagatttcatctacaggactctccggtctctcttcttccgttcttcttcctccactttgacgctaaccatcgatgacgacaacatgggtatgaacaacgagatctaccgagctgctcagacttatctctccaccaagatcagtcctgatgcagtcaggctcagaataagtaaaggccataaggataaacatgtcaacttgtatctcagcgacggagaaatcgtcaacgatgtgtacgaagatgtgcagctagtatggaggtttgttactgacggtggagacaagaaaggaggcggcggaggagtaggaggaagaggaggaggaggaggaagaagaggtggtatggacgatgacggtaaaagcgagtacttcgagctgagtttcgacaagaaacataaagatttgatattgaactcttatgtgccttacatcgagagtaaagctaaagagataagagacgagagaagaatcttgatgctgcattctctcaacagtcttagatgggaatcagttattcttgaacacccttcgacctttgagacaatggctatggaagatgatctcaaacgtgacgtcatcgaggatcttgatcggttcataagaaggaaagagttttacaagagagtagggaaagcttggaagaggggttacttgttgtacggtccaccgggtacggggaagtctagtcttgttgcagccatggctaattacctcaagtttgatgtttatgatcttcagcttgcgagtgtgatgcgtgactctgatctaaggaggctcttactagctacacgtaaccggtcgattcttgtcatagaagatatcgattgtgcagtggatttacccaacagaattgagcagcctgttgaaggcaagaaccgtggcgagtctcaggttagatttctactatgattggttttggtttaggattggccaattgaaccaaatttaccaaatcgaaccaaaccaaaatccgtatcaaccaaattttaatttagtgtaacaagactgactctgattagtatagagaattttagtatatttaaaattgtatttttttttgttttctatgaaaatgtgtgtttagggaccattgacgttatcggggctgctgaatttcatagacggactatggtcaagctgtggagacgagcggattataatattcacaacaaaccataaagataggcttgacccggcattgcttagaccaggacgtatggatatgcacatttacatgggacattgctcttttcaaggattcaagactttagcttctaactacttgggtttgagtgatgctgcgatgccacaccgtctatttccggagattgagcgtttgattgacggggaagtaatgacgccggcacaagtagcagaggagctgatgaagagtgaggatgctgacgtggcgctagagggtttggtgaatgttttagagaaaatgaggctaaaatctaaggaatcgaatccggtgatgatgaagcagaaagagagtagactggagatggaggagatgagactaaagagtgatactgagggttctccgaggaagaacagcaaaagatttaagaagcttgtattgttttggacataatccattaattagttcaaataagattatgaggaagcaaacaaaaatagacgtataagaggctaattacaactctttaagtgttttttaaaagaaatttcttgtatgtttattttctagggttgtgaaccattgtaagacccattaagagatatggaactttatttttcc

SEQ ID NO: 77273 - protein, 341 aa, Arabidopsis thaliana
  peptide (1)..(341): Ceres Seq. ID no. 12574436
  misc_feature (255)..(328): Pfam Name: ATPase family associated with various cellular Pfam Description: ATPase family associated with various cellular
  misc_feature (1)..(336): Homolog of NCBI NO: 30686502 NR Description: BCS1 - like protein [Arabidopsis thaliana]
  misc_feature (1)..(341): Homolog of NCBI NO: 18418423 NR Description: BCS1 - like protein; protein id: At5g17760.1, by cDNA: gi_15810570, supported by cDNA: gi_20259570 [Arabidopsis
  misc_feature (1)..(328): Homolog of NCBI NO: 15238022 NR Description: BCS1 - like protein; protein id: At5g17740.1
  misc_feature (1)..(337): Homolog of NCBI NO: 15238021 NR Description: BCS1 - like protein; protein id: At5g17730.1
  misc_feature (79)..(326): Homolog of NCBI NO: 15238023 NR Description: BCS1 - like protein; protein id: At5g17750.1
  misc_feature (1)..(66): Homolog of NCBI NO: 15238023 NR Description: BCS1 - like protein; protein id: At5g17750.1
  misc_feature (1)..(338): Homolog of NCBI NO: 25411838 NR Description: probable AAA-type ATPase [imported] - Arabidopsis
  misc_feature (1)..(338): Homolog of NCBI NO: 30680274 NR Description: AAA-type ATPase family [Arabidopsis thaliana]
  misc_feature (3)..(337): Homolog of NCBI NO: 34912442 NR Description: P0681B11.25 [Oryza sativa (japonica
  misc_feature (159)..(316): Homolog of NCBI NO: 30680264 NR Description: AAA-type ATPase family [Arabidopsis thaliana]
MFFSKDLPSPTSVFTAYASMAGYMMMIRSMAHELIPAPLQDFIYRTLRSLFFRSSSSTLTLTIDDDNMGMNNEIYRAAQTYLSTKISPDAVRLRISKGHKDKHVNLYLSDGEIVNDVYEDVQLVWRFVTDGGDKKGGGGGVGGRGGGGGRRGGMDDDGKSEYFELSFDKKHKDLILNSYVPYIESKAKEIRDERRILMLHSLNSLRWESVILEHPSTFETMAMEDDLKRDVIEDLDRFIRRKEFYKRVGKAWKRGYLLYGPPGTGKSSLVAAMANYLKFDVYDLQLASVMRDSDLRRLLLATRNRSILVIEDIDCAVDLPNRIEQPVEGKNRGESQVRFLL

SEQ ID NO: 77274 - protein, 322 aa, Arabidopsis thaliana
  peptide (1)..(322): Ceres Seq. ID no. 12574437
  misc_feature (236)..(309): Pfam Name: ATPase family associated with various cellular Pfam Description: ATPase family associated with various cellular
  misc_feature (1)..(317): Homolog of NCBI NO: 30686502 NR Description: BCS1 - like protein [Arabidopsis thaliana]
  misc_feature (1)..(322): Homolog of NCBI NO: 18418423 NR Description: BCS1 - like protein; protein id: At5g17760.1, by cDNA: gi_15810570, supported by cDNA: gi_20259570 [Arabidopsis
  misc_feature (1)..(309): Homolog of NCBI NO: 15238022 NR Description: BCS1 - like protein; protein id: At5g17740.1
  misc_feature (1)..(318): Homolog of NCBI NO: 15238021 NR Description: BCS1 - like protein; protein id: At5g17730.1
  misc_feature (60)..(307): Homolog of NCBI NO: 15238023 NR Description: BCS1 - like protein; protein id: At5g17750.1
  misc_feature (1)..(47): Homolog of NCBI NO: 15238023 NR Description: BCS1 - like protein; protein id: At5g17750.1
  misc_feature (1)..(319): Homolog of NCBI NO: 25411838 NR Description: probable AAA-type ATPase [imported] - Arabidopsis
  misc_feature (1)..(319): Homolog of NCBI NO: 30680274 NR Description: AAA-type ATPase family [Arabidopsis thaliana]
  misc_feature (1)..(318): Homolog of NCBI NO: 34912442 NR Description: P0681B11.25 [Oryza sativa (japonica
  misc_feature (140)..(297): Homolog of NCBI NO: 30680264 NR Description: AAA-type ATPase family [Arabidopsis thaliana]
MAGYMMMIRSMAHELIPAPLQDFIYRTLRSLFFRSSSSTLTLTIDDDNMGMNNEIYRAAQTYLSTKISPDAVRLRISKGHKDKHVNLYLSDGEIVNDVYEDVQLVWRFVTDGGDKKGGGGGVGGRGGGGGRRGGMDDDGKSEYFELSFDKKHKDLILNSYVPYIESKAKEIRDERRILMLHSLNSLRWESVILEHPSTFETMAMEDDLKRDVIEDLDRFIRRKEFYKRVGKAWKRGYLLYGPPGTGKSSLVAAMANYLKFDVYDLQLASVMRDSDLRRLLLATRNRSILVIEDIDCAVDLPNRIEQPVEGKNRGESQVRFLL

SEQ ID NO: 77275 - protein, 318 aa, Arabidopsis thaliana
  peptide (1)..(318): Ceres Seq. ID no. 12574438
  misc_feature (232)..(305): Pfam Name: ATPase family associated with various cellular Pfam Description: ATPase family associated with various cellular
  misc_feature (1)..(313): Homolog of NCBI NO: 30686502 NR Description: BCS1 - like protein [Arabidopsis thaliana]
  misc_feature (1)..(318): Homolog of NCBI NO: 18418423 NR Description: BCS1 - like protein; protein id: At5g17760.1, by cDNA: gi_15810570, supported by cDNA: gi_20259570 [Arabidopsis
  misc_feature (1)..(305): Homolog of NCBI NO: 15238022 NR Description: BCS1 - like protein; protein id: At5g17740.1
  misc_feature (1)..(314): Homolog of NCBI NO: 15238021 NR Description: BCS1 - like protein; protein id: At5g17730.1
  misc_feature (56)..(303): Homolog of NCBI NO: 15238023 NR Description: BCS1 - like protein; protein id: At5g17750.1
  misc_feature (1)..(43): Homolog of NCBI NO: 15238023 NR Description: BCS1 - like protein; protein id: At5g17750.1
  misc_feature (1)..(315): Homolog of NCBI NO: 25411838 NR Description: probable AAA-type ATPase [imported] - Arabidopsis
  misc_feature (1)..(315): Homolog of NCBI NO: 30680274 NR Description: AAA-type ATPase family [Arabidopsis thaliana]
  misc_feature (1)..(314): Homolog of NCBI NO: 34912442 NR Description: P0681B11.25 [Oryza sativa (japonica
  misc_feature (136)..(293): Homolog of NCBI NO: 30680264 NR Description: AAA-type ATPase family [Arabidopsis thaliana]
MMMIRSMAHELIPAPLQDFIYRTLRSLFFRSSSSTLTLTIDDDNMGMNNEIYRAAQTYLSTKISPDAVRLRISKGHKDKHVNLYLSDGEIVNDVYEDVQLVWRFVTDGGDKKGGGGGVGGRGGGGGRRGGMDDDGKSEYFELSFDKKHKDLILNSYVPYIESKAKEIRDERRILMLHSLNSLRWESVILEHPSTFETMAMEDDLKRDVIEDLDRFIRRKEFYKRVGKAWKRGYLLYGPPGTGKSSLVAAMANYLKFDVYDLQLASVMRDSDLRRLLLATRNRSILVIEDIDCAVDLPNRIEQPVEGKNRGESQVRFLL

SEQ ID NO: 77276 - DNA, 1243 bp, Arabidopsis thaliana
  misc_feature (1)..(1243): Ceres Seq. ID no. 12574477
  misc_feature: MA Experiment ID: 20000180 Result: Up-regulated in Transcription
  misc_feature: MA Experiment 20000180 PARAMETER Experiment Name: At_Germinating_Seeds_P Parameter: Age (hr) Value: 24 vs. 0
  misc_feature: MA Experiment 20000180 PARAMETER Experiment Name: At_Germinating_Seeds_P Parameter: Tissue Value: Germinating Seeds
  misc_feature: MA Experiment ID: 20000182 Result: Down-regulated in Transcription
  misc_feature: MA Experiment 20000182 PARAMETER Experiment Name: At_2mM_SA_P Parameter: Age (day) Value: 14
  misc_feature: MA Experiment 20000182 PARAMETER Experiment Name: At_2mM_SA_P Parameter: Organism Value: A. thaliana
  misc_feature: MA Experiment 20000182 PARAMETER Experiment Name: At_2mM_SA_P Parameter: Plant Line Value: WS
  misc_feature: MA Experiment 20000182 PARAMETER Experiment Name: At_2mM_SA_P Parameter: Timepoint (hr) Value: 6
  misc_feature: MA Experiment 20000182 PARAMETER Experiment Name: At_2mM_SA_P Parameter: Tissue Value: Aerial
  misc_feature: MA Experiment 20000182 PARAMETER Experiment Name: At_2mM_SA_P Parameter: Treatment Value: 2mM SA vs. No Treatment
  misc_feature: MA Experiment ID: 20000185 Result: Up-regulated in Transcription
  misc_feature: MA Experiment 20000185 PARAMETER Experiment Name: At_Roots__P Parameter: Age (day) Value: 7 vs. 21
  misc_feature: MA Experiment 20000185 PARAMETER Experiment Name: At_Roots__P Parameter: Organism Value: A. thaliana
  misc_feature: MA Experiment 20000185 PARAMETER Experiment Name: At_Roots__P Parameter: Tissue Value: Roots vs. Whole Plant
  misc_feature: MA Experiment ID: 20000227 Result: Down-regulated in Transcription
  misc_feature: MA Experiment 20000227 PARAMETER Experiment Name: At_Root-Tips-vs-Tops_P Parameter: Tissue Value: Root Tips vs. Root Tops
  misc_feature: MA Experiment ID: 20000265 Result: Down-regulated in Transcription
  misc_feature: MA Experiment 20000265 PARAMETER Experiment Name: At_Open_Flower_P Parameter: Age (day) Value: 21
  misc_feature: MA Experiment 20000265 PARAMETER Experiment Name: At_Open_Flower_P Parameter: Plant Line Value: WS
  misc_feature: MA Experiment 20000265 PARAMETER Experiment Name: At_Open_Flower_P Parameter: Tissue Value: Closed Flower vs. Whole Plant
  misc_feature: MA Experiment ID: 20000286 Result: Down-regulated in Transcription
  misc_feature: MA Experiment 20000286 PARAMETER Experiment Name: At_Open_Flower_P Parameter: Age (day) Value: 21
  misc_feature: MA Experiment 20000286 PARAMETER Experiment Name: At_Open_Flower_P Parameter: Plant Line Value: WS
  misc_feature: MA Experiment 20000286 PARAMETER Experiment Name: At_Open_Flower_P Parameter: Tissue Value: Half Open vs. Whole Plant
  misc_feature: MA Experiment ID: 20000439 Result: Up-regulated in Transcription
  misc_feature: MA Experiment 20000439 PARAMETER Experiment Name: At_Roots__P Parameter: Age (day) Value: 14 vs. 21
  misc_feature: MA Experiment 20000439 PARAMETER Experiment Name: At_Roots__P Parameter: Organism Value: A. thaliana
  misc_feature: MA Experiment 20000439 PARAMETER Experiment Name: At_Roots__P Parameter: Tissue Value: Roots vs. Whole Plant
  misc_feature: MA Experiment ID: 20000527 Result: Down-regulated in Transcription
  misc_feature: MA Experiment 20000527 PARAMETER Experiment Name: At_10percent_PEG_P Parameter: Age (day) Value: 20
  misc_feature: MA Experiment 20000527 PARAMETER Experiment Name: At_10percent_PEG_P Parameter: Organism Value: A. thaliana
  misc_feature: MA Experiment 20000527 PARAMETER Experiment Name: At_10percent_PEG_P Parameter: Plant Line Value: WS
  misc_feature: MA Experiment 20000527 PARAMETER Experiment Name: At_10percent_PEG_P Parameter: Timepoint (day) Value: 20
  misc_feature: MA Experiment 20000527 PARAMETER Experiment Name: At_10percent_PEG_P Parameter: Tissue Value: Whole Plant
  misc_feature: MA Experiment 20000527 PARAMETER Experiment Name: At_10percent_PEG_P Parameter: Treatment Value: 10percent PEG vs. No Treatment
  misc_feature: MA Experiment ID: 20001248 Result: Down-regulated in Transcription
  misc_feature: MA Experiment 20001248 PARAMETER Experiment Name: At_Far-red-induction_P Parameter: Age (day) Value: 7
  misc_feature: MA Experiment 20001248 PARAMETER Experiment Name: At_Far-red-induction_P Parameter: Light Value: Far-red vs. White
  misc_feature: MA Experiment 20001248 PARAMETER Experiment Name: At_Far-red-induction_P Parameter: Organism Value: A. thaliana
  misc_feature: MA Experiment 20001248 PARAMETER Experiment Name: At_Far-red-induction_P Parameter: Plant Line Value: Columbia
  misc_feature: MA Experiment 20001248 PARAMETER Experiment Name: At_Far-red-induction_P Parameter: Timepoint (hr) Value: 4
  misc_feature: MA Experiment 20001248 PARAMETER Experiment Name: At_Far-red-induction_P Parameter: Tissue Value: Whole Plant
  misc_feature: MA Experiment ID: 20001450 Result: Down-regulated in Transcription
  misc_feature: MA Experiment 20001450 PARAMETER Experiment Name: At_Far-red-induction_P Parameter: Age (day) Value: 7
  misc_feature: MA Experiment 20001450 PARAMETER Experiment Name: At_Far-red-induction_P Parameter: Light Value: Far-red vs. White
  misc_feature: MA Experiment 20001450 PARAMETER Experiment Name: At_Far-red-induction_P Parameter: Organism Value: A. thaliana
  misc_feature: MA Experiment 20001450 PARAMETER Experiment Name: At_Far-red-induction_P Parameter: Plant Line Value: Columbia
  misc_feature: MA Experiment 20001450 PARAMETER Experiment Name: At_Far-red-induction_P Parameter: Timepoint (hr) Value: 8
  misc_feature: MA Experiment 20001450 PARAMETER Experiment Name: At_Far-red-induction_P Parameter: Tissue Value: Whole Plant
  misc_feature: MA Experiment ID: 20001451 Result: Down-regulated in Transcription
  misc_feature: MA Experiment 20001451 PARAMETER Experiment Name: At_Far-red-induction_P Parameter: Age (day) Value: 7
  misc_feature: MA Experiment 20001451 PARAMETER Experiment Name: At_Far-red-induction_P Parameter: Light Value: Far-red vs. White
  misc_feature: MA Experiment 20001451 PARAMETER Experiment Name: At_Far-red-induction_P Parameter: Organism Value: A. thaliana
  misc_feature: MA Experiment 20001451 PARAMETER Experiment Name: At_Far-red-induction_P Parameter: Plant Line Value: Columbia
  misc_feature: MA Experiment 20001451 PARAMETER Experiment Name: At_Far-red-induction_P Parameter: Timepoint (hr) Value: 24
  misc_feature: MA Experiment 20001451 PARAMETER Experiment Name: At_Far-red-induction_P Parameter: Tissue Value: Whole Plant
  misc_feature: MA Experiment ID: 20001556 Result: Up-regulated in Transcription
  misc_feature: MA Experiment 20001556 PARAMETER Experiment Name: At_Drought_Soil_Dry_P Parameter: Age (day) Value: 26
  misc_feature: MA Experiment 20001556 PARAMETER Experiment Name: At_Drought_Soil_Dry_P Parameter: Organism Value: A. thaliana
  misc_feature: MA Experiment 20001556 PARAMETER Experiment Name: At_Drought_Soil_Dry_P Parameter: Plant Line Value: WS
  misc_feature: MA Experiment 20001556 PARAMETER Experiment Name: At_Drought_Soil_Dry_P Parameter: Post Timepoint (hr) Value: None
  misc_feature: MA Experiment 20001556 PARAMETER Experiment Name: At_Drought_Soil_Dry_P Parameter: Post-Treatment Value: None
  misc_feature: MA Experiment 20001556 PARAMETER Experiment Name: At_Drought_Soil_Dry_P Parameter: Timepoint (day) Value: 12
  misc_feature: MA Experiment 20001556 PARAMETER Experiment Name: At_Drought_Soil_Dry_P Parameter: Treatment Value: Drought vs. No Drought
  misc_feature: MA Experiment ID: 20001559 Result: Up-regulated in Transcription
  misc_feature: MA Experiment 20001559 PARAMETER Experiment Name: At_Drought_Soil_Dry_P Parameter: Age (day) Value: 28
  misc_feature: MA Experiment 20001559 PARAMETER Experiment Name: At_Drought_Soil_Dry_P Parameter: Organism Value: A. thaliana
  misc_feature: MA Experiment 20001559 PARAMETER Experiment Name: At_Drought_Soil_Dry_P Parameter: Plant Line Value: WS
  misc_feature: MA Experiment 20001559 PARAMETER Experiment Name: At_Drought_Soil_Dry_P Parameter: Post Timepoint (hr) Value: 29
  misc_feature: MA Experiment 20001559 PARAMETER Experiment Name: At_Drought_Soil_Dry_P Parameter: Post-Treatment Value: Re-Water vs. No Drought
  misc_feature: MA Experiment 20001559 PARAMETER Experiment Name: At_Drought_Soil_Dry_P Parameter: Timepoint (day) Value: 14
  misc_feature: MA Experiment 20001559 PARAMETER Experiment Name: At_Drought_Soil_Dry_P Parameter: Treatment Value: Drought vs. No Drought
  misc_feature: MA Experiment ID: 20001560 Result: Down-regulated in Transcription
  misc_feature: MA Experiment 20001560 PARAMETER Experiment Name: At_Drought_Soil_Dry_P Parameter: Age (day) Value: 28
  misc_feature: MA Experiment 20001560 PARAMETER Experiment Name: At_Drought_Soil_Dry_P Parameter: Organism Value: A. thaliana
  misc_feature: MA Experiment 20001560 PARAMETER Experiment Name: At_Drought_Soil_Dry_P Parameter: Plant Line Value: WS
  misc_feature: MA Experiment 20001560 PARAMETER Experiment Name: At_Drought_Soil_Dry_P Parameter: Post Timepoint (hr) Value: None
  misc_feature: MA Experiment 20001560 PARAMETER Experiment Name: At_Drought_Soil_Dry_P Parameter: Post-Treatment Value: None
  misc_feature: MA Experiment 20001560 PARAMETER Experiment Name: At_Drought_Soil_Dry_P Parameter: Timepoint (day) Value: 14
  misc_feature: MA Experiment 20001560 PARAMETER Experiment Name: At_Drought_Soil_Dry_P Parameter: Treatment Value: Drought vs. No Drought
aacaaagcaaacggctcatttctcagaaacaactcaaacatgggttccttcgacttgcctcacagttcatcgttcaagggagaaagtgaaatatttcttcggaatgtgttcgagaatatattgaaaacgtacctaaggaagaacccgacggcgaagacaatatgggaactggttcagtcgttggacaacgaaaagatctgctacgaccacttcactttcaggacactaaaggtcgatggttatggaatagactccttgtcgagttttttcatggcttatggatataaaattggtggtggacttgattttcccaagaagaaactacgagttctttggttttctccacctgatgttcacgttcctaatgatggtcacggtctaggcaacggccctttgccgcgacttgttatagctgaggttcttgtggacgaactaagccctgaatcacaggggataataaggaagtatttgaaacaagaaggtggcaagcaagcggttctttctagtactttggggtctttaatatgggagaagcctacatggaccgacttcaagcagcttgccaaagaaagcgaatttgcggcatggacgcttatccacggctacacaatgaatcatcttgcttttgcggttcatcgattcaaacatcgtttcagtgacatcaaattcgtcaaacagcgtcttgaggaaaagggattcaaactcaacagtgacggagaaatcctcaaagtgagtcaagatggtctactatttcaagtttcatcgatctcggaaaggcttccggtaacatttgcagatggagtaactgaaacaatcccagcttcatacattgaattcactcagcgtcaagttcttccagagttcaaagatgtgccgcttgatgagatcaaagaatttcatagacgtgaagcttttgaactcgataacgccaaccacgtaatggaaagcacccgtttcacaactaaattctagaaccagacttgtcttgctcgacttagtatatgccaaatttgtgcaactatatatgtgagtgtgtgtttgtgtgcaatctttccatatatatgcatgtgtgtatttgcgatatctttatgttgttattttactgtgaagggacaatgtaagcatatgttatctctcatgatggtaattgttgattagagtgaccaacttgtaaaatggatcacatgattgacgaatcatgggaaataaaatgtattttgtgattgaaatatgtgatatttgt

SEQ ID NO: 77277 - protein, 323 aa, Arabidopsis thaliana
  peptide (1)..(323): Ceres Seq. ID no. 12574478
  misc_feature (14)..(323): Homolog of NCBI NO: 18396149 NR Description: expressed protein; protein id: At1g27030.1, by cDNA: gi_14517457 [Arabidopsis thaliana] T7N9.9 [Arabidopsis thaliana] >gi|14517458|gb|AAK62619.1|
  misc_feature (14)..(320): Homolog of NCBI NO: 15223410 NR Description: unknown protein; protein id: At1g27020.1
  misc_feature (11)..(317): Homolog of NCBI NO: 18390717 NR Description: expressed protein; protein id: At1g07040.1, by cDNA: 36434. [Arabidopsis thaliana] >gi|25406951|pir||B86205
  misc_feature (26)..(317): Homolog of NCBI NO: 37535166 NR Description: unknown protein [Oryza sativa (japonica
  misc_feature (103)..(320): Homolog of NCBI NO: 22973852 NR Description: hypothetical protein [Chloroflexus aurantiacus]
  misc_feature (36)..(298): Homolog of NCBI NO: 28899568 NR Description: conserved hypothetical protein [Vibrio RIMD 2210633] >gi|28807804|dbj|BAC61057.1| conserved hypothetical
  misc_feature (36)..(302): Homolog of NCBI NO: 15642610 NR Description: conserved hypothetical protein [Vibrio cholerae]
  misc_feature (36)..(298): Homolog of NCBI NO: 27364716 NR Description: Conserved hypothetical protein [Vibrio vulnificus >gi|27360861|gb|AAO09771.1|AE016801_90 Conserved hypothetical
  misc_feature (36)..(282): Homolog of NCBI NO: 24372211 NR Description: conserved hypothetical protein [Shewanella MR-1] >gi|24346126|gb|AAN53698.1|AE015509_3 conserved
  misc_feature (51)..(318): Homolog of NCBI NO: 37523419 NR Description: hypothetical protein glr3850 [Gloeobacter
NKANGSFLRNNSNMGSFDLPHSSSFKGESEIFLRNVFENILKTYLRKNPTAKTIWELVQSLDNEKICYDHFTFRTLKVDGYGIDSLSSFFMAYGYKIGGGLDFPKKKLRVLWFSPPDVHVPNDGHGLGNGPLPRLVIAEVLVDELSPESQGIIRKYLKQEGGKQAVLSSTLGSLIWEKPTWTDFKQLAKESEFAAWTLIHGYTMNHLAFAVHRFKHRFSDIKFVKQRLEEKGFKLNSDGEILKVSQDGLLFQVSSISERLPVTFADGVTETIPASYIEFTQRQVLPEFKDVPLDEIKEFHRREAFELDNANHVMESTRFTTKF

SEQ ID NO: 77278 - protein, 310 aa, Arabidopsis thaliana
  peptide (1)..(310): Ceres Seq. ID no. 12574479
  misc_feature (1)..(310): Homolog of NCBI NO: 18396149 NR Description: expressed protein; protein id: At1g27030.1, by cDNA: gi_14517457 [Arabidopsis thaliana] T7N9.9 [Arabidopsis thaliana] >gi|14517458|gb|AAK62619.1|
  misc_feature (1)..(307): Homolog of NCBI NO: 15223410 NR Description: unknown protein; protein id: At1g27020.1
  misc_feature (1)..(304): Homolog of NCBI NO: 18390717 NR Description: expressed protein; protein id: At1g07040.1, by cDNA: 36434. [Arabidopsis thaliana] >gi|25406951|pir||B86205
  misc_feature (13)..(304): Homolog of NCBI NO: 37535166 NR Description: unknown protein [Oryza sativa (japonica
  misc_feature (90)..(307): Homolog of NCBI NO: 22973852 NR Description: hypothetical protein [Chloroflexus aurantiacus]
  misc_feature (23)..(285): Homolog of NCBI NO: 28899568 NR Description: conserved hypothetical protein [Vibrio RIMD 2210633] >gi|28807804|dbj|BAC61057.1| conserved hypothetical
  misc_feature (23)..(289): Homolog of NCBI NO: 15642610 NR Description: conserved hypothetical protein [Vibrio cholerae]
  misc_feature (23)..(285): Homolog of NCBI NO: 27364716 NR Description: Conserved hypothetical protein [Vibrio vulnificus >gi|27360861|gb|AAO09771.1|AE016801_90 Conserved hypothetical
  misc_feature (23)..(269): Homolog of NCBI NO: 24372211 NR Description: conserved hypothetical protein [Shewanella MR-1] >gi|24346126|gb|AAN53698.1|AE015509_3 conserved
  misc_feature (38)..(305): Homolog of NCBI NO: 37523419 NR Description: hypothetical protein glr3850 [Gloeobacter
MGSFDLPHSSSFKGESEIFLRNVFENILKTYLRKNPTAKTIWELVQSLDNEKICYDHFTFRTLKVDGYGIDSLSSFFMAYGYKIGGGLDFPKKKLRVLWFSPPDVHVPNDGHGLGNGPLPRLVIAEVLVDELSPESQGIIRKYLKQEGGKQAVLSSTLGSLIWEKPTWTDFKQLAKESEFAAWTLIHGYTMNHLAFAVHRFKHRFSDIKFVKQRLEEKGFKLNSDGEILKVSQDGLLFQVSSISERLPVTFADGVTETIPASYIEFTQRQVLPEFKDVPLDEIKEFHRREAFELDNANHVMESTRFTTKF

SEQ ID NO: 77279 - protein, 233 aa, Arabidopsis thaliana
  peptide (1)..(233): Ceres Seq. ID no. 12574480
  misc_feature (1)..(233): Homolog of NCBI NO: 18396149 NR Description: expressed protein; protein id: At1g27030.1, by cDNA: gi_14517457 [Arabidopsis thaliana] T7N9.9 [Arabidopsis thaliana] >gi|14517458|gb|AAK62619.1|
  misc_feature (1)..(230): Homolog of NCBI NO: 15223410 NR Description: unknown protein; protein id: At1g27020.1
  misc_feature (1)..(227): Homolog of NCBI NO: 18390717 NR Description: expressed protein; protein id: At1g07040.1, by cDNA: 36434. [Arabidopsis thaliana] >gi|25406951|pir||B86205
  misc_feature (1)..(227): Homolog of NCBI NO: 37535166 NR Description: unknown protein [Oryza sativa (japonica
  misc_feature (13)..(230): Homolog of NCBI NO: 22973852 NR Description: hypothetical protein [Chloroflexus aurantiacus]
  misc_feature (1)..(208): Homolog of NCBI NO: 28899568 NR Description: conserved hypothetical protein [Vibrio RIMD 2210633] >gi|28807804|dbj|BAC61057.1| conserved hypothetical
  misc_feature (1)..(212): Homolog of NCBI NO: 15642610 NR Description: conserved hypothetical protein [Vibrio cholerae]
  misc_feature (1)..(208): Homolog of NCBI NO: 27364716 NR Description: Conserved hypothetical protein [Vibrio vulnificus >gi|27360861|gb|AAO09771.1|AE016801_90 Conserved hypothetical
  misc_feature (1)..(192): Homolog of NCBI NO: 24372211 NR Description: conserved hypothetical protein [Shewanella MR-1] >gi|24346126|gb|AAN53698.1|AE015509_3 conserved
  misc_feature (1)..(228): Homolog of NCBI NO: 37523419 NR Description: hypothetical protein glr3850 [Gloeobacter
MAYGYKIGGGLDFPKKKLRVLWFSPPDVHVPNDGHGLGNGPLPRLVIAEVLVDELSPESQGIIRKYLKQEGGKQAVLSSTLGSLIWEKPTWTDFKQLAKESEFAAWTLIHGYTMNHLAFAVHRFKHRFSDIKFVKQRLEEKGFKLNSDGEILKVSQDGLLFQVSSISERLPVTFADGVTETIPASYIEFTQRQVLPEFKDVPLDEIKEFHRREAFELDNANHVMESTRFTTKF

SEQ ID NO: 77280 - DNA, 2539 bp, Arabidopsis thaliana
  misc_feature (1)..(2539): Ceres Seq. ID no. 12574690
gaattacttttatccattttctctgtatatatatagaaagcaaaagaaagcattttcatcacctaccatcctctgttttcatttcctctgtttttcaaacttcctctgttctctcatggctccacttcacgaatctctgtcatcaatcaacgatgtaatcgaatccaaacctctttttgttccaataactaagccaatcttgcagccaaactcatttaacctatccgaagggtctctctgtgccaaagactctactccaatcctctttgatgttcctcaaaacgtaactttcacaccattctcatctcactccatatccactgatgctcctctcccaatcctcctccgagttcaagccaacgctcacaaaggagggtttctcggattcaccaaagaatcaccctctgatcgtctcacaaactccttgggaagattcgaagacagagagtttctcagtcttttccggttcaaaatgtggtggtcgacggcttggatcgggaaatcagggtcggatcttcaagccgagactcagtgggtgatgctaaagattcctgagatcgattcctacgtggccatcataccaaccattgaaggagcttttagggcttcacttactcctggtgagaaaggtaatgtcttgatttgtgcagagagtggctcaactaaagtaaaagagtcatctttcaaatccattgcctacattcacatttgtgacaacccctataacctcatgaaagaggcttttagtgcacttcgtgttcatatgaacactttcaagcttctagaagagaagaagcttccgaaaatcgtcgataagtttggatggtgcacttgggatgcttgctacttgaccgttgatcctgcaaccatttggactggagttaaggagtttgaagatggtggggtgtgtccgaagtttgtcatcattgatgatggatggcaaagtattaactttgatggtgatgagctagacaaagacgctgagaatcttgttcttggtggggagcaaatgactgcgaggcttaccagcttcaaggagtgtaagaagtttagaaactataaagaagagtctttgggttctgatgatgtttctggctcaggtatggcggctttcacaaaggatttgaggttaaggtttaagagtttagatgatatatatgtgtggcatgctctttgtggtgcttggaatggtgttaggcctgaaaccatgatggatttgaaggccaaggttgctccttttgagctttcacctagtctaggcgctacgatggctgatctcgcagtcgacaaggttgtagaagctgggattggtcttgttcatccttctaaagctcatgaattctacgactcgatgcactcttatcttgctagtgttggtgttacaggagccaagattgatgttttccaaaccttggagtcactagcagaagaacatggaggacgagtggagcttgctaaagcttactacgatggtctgaccgaatccatgatcaagaattttaatggaactgatgtcattgcgagtatgcaacagtgcaatgagttcttcttccttgccacaaagcaaatctctattggcagagttggtgatgatttttggtggcaagacccatatggtgacccacaaggagtatattggctacaaggagttcacatgattcactgttcttacaacagtatttggatgggtcaaatgattcaaccagattgggacatgttccaatcagaccatgtctgtgccgagtaccacgccgcatctcgagccatttgcggtgggcctgtctatctcagtgaccatcttggcaaagcctcacataactttgatctcatcaagaaacttgctttctttgatggtaccatcccaaggtgtgtccactatgctcttcccactagagattcgctcttcaagaaccctttgtttgacaaagagtcaatcctcaagatcttcaacttcaacaagtttggaggagtgattggaacatttaactgtcaaggtgctgggtggagcccagaggagcataggttcaaaggatacaaagaatgttacacgacagtttcgggaacagttcatgtctcggacattgaatgggatcagaatccagaagctgcaggctctcaggtgacctacactggagattacttggtttacaagcaacaatctgaagaaatccttttcatgaactcgaaatcagaagcgatgaagataacccttgagccatccgcgtttgacctgttgagtttcgtgccagtcacggaacttgtaagttcaggggttagattcgcacctctagggttgatcaacatgttcaactgcgtcggaacagtccaagacatgaaggttactggtgataacagcataagagtggacgtgaaaggcgaaggaagattcatggcgtattcgagttcagctccggtgaagtgttacttgaacgacaaggaagctgagtttaagtgggaagaagaaactggtaaactcagtttctttgttccttgggttgaagaatctggtggcatctctcatctgtctttcaccttttaa

SEQ ID NO: 77281 - protein, 845 aa, Arabidopsis thaliana
  peptide (1)..(845): Ceres Seq. ID no. 12574691
  misc_feature (367)..(845): Homolog of NCBI NO: 6634701 NR Description: galactinol-raffinose galactosyltransferase [Vigna
  misc_feature (61)..(355): Homolog of NCBI NO: 6634701 NR Description: galactinol-raffinose galactosyltransferase [Vigna
  misc_feature (354)..(845): Homolog of NCBI NO: 19571727 NR Description: stachyose synthase [Stachys affinis]
  misc_feature (50)..(358): Homolog of NCBI NO: 19571727 NR Description: stachyose synthase [Stachys affinis]
  misc_feature (360)..(845): Homolog of NCBI NO: 13992585 NR Description: stachyose synthase [Pisum sativum]
  misc_feature (63)..(354): Homolog of NCBI NO: 13992585 NR Description: stachyose synthase [Pisum sativum]
  misc_feature (321)..(845): Homolog of NCBI NO: 21038869 NR Description: putative stachyose synthase [Alonsoa meridionalis]
  misc_feature (67)..(358): Homolog of NCBI NO: 21038869 NR Description: putative stachyose synthase [Alonsoa meridionalis]
  misc_feature (360)..(845): Homolog of NCBI NO: 24412857 NR Description: stachyose synthase [Pisum sativum]
  misc_feature (63)..(354): Homolog of NCBI NO: 24412857 NR Description: stachyose synthase [Pisum sativum]
NYFYPFSLYIYRKQKKAFSSPTILCFHFLCFSNFLCSLMAPLHESLSSINDVIESKPLFVPITKPILQPNSFNLSEGSLCAKDSTPILFDVPQNVTFTPFSSHSISTDAPLPILLRVQANAHKGGFLGFTKESPSDRLTNSLGRFEDREFLSLFRFKMWWSTAWIGKSGSDLQAETQWVMLKIPEIDSYVAIIPTIEGAFRASLTPGEKGNVLICAESGSTKVKESSFKSIAYIHICDNPYNLMKEAFSALRVHMNTFKLLEEKKLPKIVDKFGWCTWDACYLTVDPATIWTGVKEFEDGGVCPKFVIIDDGWQSINFDGDELDKDAENLVLGGEQMTARLTSFKECKKFRNYKEESLGSDDVSGSGMAAFTKDLRLRFKSLDDIYVWHALCGAWNGVRPETMMDLKAKVAPFELSPSLGATMADLAVDKVVEAGIGLVHPSKAHEFYDSMHSYLASVGVTGAKIDVFQTLESLAEEHGGRVELAKAYYDGLTESMIKNFNGTDVIASMQQCNEFFFLATKQISIGRVGDDFWWQDPYGDPQGVYWLQGVHMIHCSYNSIWMGQMIQPDWDMFQSDHVCAEYHAASRAICGGPVYLSDHLGKASHNFDLIKKLAFFDGTIPRCVHYALPTRDSLFKNPLFDKESILKIFNFNKFGGVIGTFNCQGAGWSPEEHRFKGYKECYTTVSGTVHVSDIEWDQNPEAAGSQVTYTGDYLVYKQQSEEILFMNSKSEAMKITLEPSAFDLLSFVPVTELVSSGVRFAPLGLINMFNCVGTVQDMKVTGDNSIRVDVKGEGRFMAYSSSAPVKCYLNDKEAEFKWEEETGKLSFFVPWVEESGGISHLSFTF

SEQ ID NO: 77282 - protein, 807 aa, Arabidopsis thaliana
  peptide (1)..(807): Ceres Seq. ID no. 12574692
  misc_feature (329)..(807): Homolog of NCBI NO: 6634701 NR Description: galactinol-raffinose galactosyltransferase [Vigna
  misc_feature (23)..(317): Homolog of NCBI NO: 6634701 NR Description: galactinol-raffinose galactosyltransferase [Vigna
  misc_feature (316)..(807): Homolog of NCBI NO: 19571727 NR Description: stachyose synthase [Stachys affinis]
  misc_feature (12)..(320): Homolog of NCBI NO: 19571727 NR Description: stachyose synthase [Stachys affinis]
  misc_feature (322)..(807): Homolog of NCBI NO: 13992585 NR Description: stachyose synthase [Pisum sativum]
  misc_feature (25)..(316): Homolog of NCBI NO: 13992585 NR Description: stachyose synthase [Pisum sativum]
  misc_feature (283)..(807): Homolog of NCBI NO: 21038869 NR Description: putative stachyose synthase [Alonsoa meridionalis]
  misc_feature (29)..(320): Homolog of NCBI NO: 21038869 NR Description: putative stachyose synthase [Alonsoa meridionalis]
  misc_feature (322)..(807): Homolog of NCBI NO: 24412857 NR Description: stachyose synthase [Pisum sativum]
  misc_feature (25)..(316): Homolog of NCBI NO: 24412857 NR Description: stachyose synthase [Pisum sativum]
MAPLHESLSSINDVIESKPLFVPITKPILQPNSFNLSEGSLCAKDSTPILFDVPQNVTFTPFSSHSISTDAPLPILLRVQANAHKGGFLGFTKESPSDRLTNSLGRFEDREFLSLFRFKMWWSTAWIGKSGSDLQAETQWVMLKIPEIDSYVAIIPTIEGAFRASLTPGEKGNVLICAESGSTKVKESSFKSIAYIHICDNPYNLMKEAFSALRVHMNTFKLLEEKKLPKIVDKFGWCTWDACYLTVDPATIWTGVKEFEDGGVCPKFVIIDDGWQSINFDGDELDKDAENLVLGGEQMTARLTSFKECKKFRNYKEESLGSDDVSGSGMAAFTKDLRLRFKSLDDIYVWHALCGAWNGVRPETMMDLKAKVAPFELSPSLGATMADLAVDKVVEAGIGLVHPSKAHEFYDSMHSYLASVGVTGAKIDVFQTLESLAEEHGGRVELAKAYYDGLTESMIKNFNGTDVIASMQQCNEFFFLATKQISIGRVGDDFWWQDPYGDPQGVYWLQGVHMIHCSYNSIWMGQMIQPDWDMFQSDHVCAEYHAASRAICGGPVYLSDHLGKASHNFDLIKKLAFFDGTIPRCVHYALPTRDSLFKNPLFDKESILKIFNFNKFGGVIGTFNCQGAGWSPEEHRFKGYKECYTTVSGTVHVSDIEWDQNPEAAGSQVTYTGDYLVYKQQSEEILFMNSKSEAMKITLEPSAFDLLSFVPVTELVSSGVRFAPLGLINMFNCVGTVQDMKVTGDNSIRVDVKGEGRFMAYSSSAPVKCYLNDKEAEFKWEEETGKLSFFVPWVEESGGISHLSFTF

SEQ ID NO: 77283 - protein, 688 aa, Arabidopsis thaliana
  peptide (1)..(688): Ceres Seq. ID no. 12574693
  misc_feature (210)..(688): Homolog of NCBI NO: 6634701 NR Description: galactinol-raffinose galactosyltransferase [Vigna
  misc_feature (1)..(198): Homolog of NCBI NO: 6634701 NR Description: galactinol-raffinose galactosyltransferase [Vigna
  misc_feature (197)..(688): Homolog of NCBI NO: 19571727 NR Description: stachyose synthase [Stachys affinis]
  misc_feature (1)..(201): Homolog of NCBI NO: 19571727 NR Description: stachyose synthase [Stachys affinis]
  misc_feature (203)..(688): Homolog of NCBI NO: 13992585 NR Description: stachyose synthase [Pisum sativum]
  misc_feature (1)..(197): Homolog of NCBI NO: 13992585 NR Description: stachyose synthase [Pisum sativum]
  misc_feature (164)..(688): Homolog of NCBI NO: 21038869 NR Description: putative stachyose synthase [Alonsoa meridionalis]
  misc_feature (1)..(201): Homolog of NCBI NO: 21038869 NR Description: putative stachyose synthase [Alonsoa meridionalis]
  misc_feature (203)..(688): Homolog of NCBI NO: 24412857 NR Description: stachyose synthase [Pisum sativum]
  misc_feature (1)..(197): Homolog of NCBI NO: 24412857 NR Description: stachyose synthase [Pisum sativum]
MWWSTAWIGKSGSDLQAETQWVMLKIPEIDSYVAIIPTIEGAFRASLTPGEKGNVLICAESGSTKVKESSFKSIAYIHICDNPYNLMKEAFSALRVHMNTFKLLEEKKLPKIVDKFGWCTWDACYLTVDPATIWTGVKEFEDGGVCPKFVIIDDGWQSINFDGDELDKDAENLVLGGEQMTARLTSFKECKKFRNYKEESLGSDDVSGSGMAAFTKDLRLRFKSLDDIYVWHALCGAWNGVRPETMMDLKAKVAPFELSPSLGATMADLAVDKVVEAGIGLVHPSKAHEFYDSMHSYLASVGVTGAKIDVFQTLESLAEEHGGRVELAKAYYDGLTESMIKNFNGTDVIASMQQCNEFFFLATKQISIGRVGDDFWWQDPYGDPQGVYWLQGVHMIHCSYNSIWMGQMIQPDWDMFQSDHVCAEYHAASRAICGGPVYLSDHLGKASHNFDLIKKLAFFDGTIPRCVHYALPTRDSLFKNPLFDKESILKIFNFNKFGGVIGTFNCQGAGWSPEEHRFKGYKECYTTVSGTVHVSDIEWDQNPEAAGSQVTYTGDYLVYKQQSEEILFMNSKSEAMKITLEPSAFDLLSFVPVTELVSSGVRFAPLGLINMFNCVGTVQDMKVTGDNSIRVDVKGEGRFMAYSSSAPVKCYLNDKEAEFKWEEETGKLSFFVPWVEESGGISHLSFTF

SEQ ID NO: 77284 - DNA, 2569 bp, Arabidopsis thaliana
  misc_feature (1)..(2569): Ceres Seq. ID no. 12574741
  misc_feature: MA Experiment ID: 108595 Result: Up-regulated in Transcription
  misc_feature: MA Experiment 108595 PARAMETER Experiment Name: At_Ler-pi_Ovule_cDNA_P Parameter: Plant Line Value: null
  misc_feature: MA Experiment ID: 20000111 Result: Down-regulated in Transcription
  misc_feature: MA Experiment 20000111 PARAMETER Experiment Name: At_42deg_Heat_cDNA_P Parameter: Temperature (deg C) Value: 42 vs. 22
  misc_feature: MA Experiment 20000111 PARAMETER Experiment Name: At_42deg_Heat_cDNA_P Parameter: Timepoint (hr) Value: 6
  misc_feature: MA Experiment 20000111 PARAMETER Experiment Name: At_42deg_Heat_cDNA_P Parameter: Tissue Value: Aerial
  misc_feature: MA Experiment ID: 20000794 Result: Up-regulated in Transcription
  misc_feature: MA Experiment 20000794 PARAMETER Experiment Name: At_Petals_P Parameter: Age (day) Value: 23-25 days
  misc_feature: MA Experiment 20000794 PARAMETER Experiment Name: At_Petals_P Parameter: Plant Line Value: WS
  misc_feature: MA Experiment 20000794 PARAMETER Experiment Name: At_Petals_P Parameter: Tissue Value: Petals vs. Whole plant
ggttaaaaaattttcataagtgaacacagaagaagcggtggctctgagccggcgaaatctcctttctcatccctaaaattttcatgtccatcttgcctcctccgattatccaaggtcacaattcgtcttctccttcttcagattcctctctaaaccctagctctgagcatggcaacaactcttcttcttctctctctcctcttccctcctctcctccttcccggatctcttcttccaccggaactcgattctccggacattctgaatcctctcacaatttctccggtggctctagggaaccgagtgttgcagctgaggagggacatagccgtggatcttccaaagagatgacacaaaatggagcagggaaggagagtttttccccacctaatgcagataagcgtgaccattttcgatatgatggtcgaaggaataggtctagagggagaggtactggagctgctggttcttcttcttctcaattgcagcataattccggaccttttaattctcctagaggcggtgtttcgcatcataatccaactggtagaagagctaatatgataagtgggaatcatttactgaattttcagtatgatccgatttcgcaaccgcaatctaggggtcctcctccgcctcaaagaaggcaacaatataaggggaggccttttaacaaggatttgtttcttaaggccaattataagtttgttgtgttggacactggagatcattctcctgattcaatggatcctgataaaatgctgcagtgggatgatattatttgtgtaaggtattctactccgtctcctgtccagtgtccgatttgcttggagtatcctctatgtccgcagattacttcctgtgggcatattttctgtttcccgtgtattctacagtacctgttgactggtgttgataaccacaaggtggactgcttcaagaggtgtcctttgtgctttgtgatgatttctccaagagagttatacactgtttatattgagaacgtcaagcagtattctgttggagatcccatcgagtttgtacttttgactcgcaagaaagattcttttgctcctacccggaaaaatgagcatgacttggctgttcctaatggtgaaaatgagatatatgatccgttctcaaagttcactttcacccaagatgttgatctctctgtcagacaagcagtttcagagttagacagttggattgcaagagcagatcctcagctcgttgaagacttggagaagcatctttatgtaaatgccgctttagagcgtttggagcagagaaaattgtactggaatgagcataagctctctatttacagcaaagtgtgcacaacggctagaaatcagactcaatcattgtcacctcctgatgtttctcgagttggttatcaagcacccatggggggccatggagcgccagatagcggctccaatgatcaagataaatcaactgaagattcttcagcggataagtcagatggagaatctcaatcaagtttggaaaagggttgtgataatgatcttggtcatcctctagaagatcaagacgcaccgtcatcttcctcatgcaatggaagtaaaggtttcctgtctcaccaaattgacaccaaagacctgaaggacaacgacgcgtacaacttttatcagtctgttgatggtcagcacattatccttcacactttgaatgtgaagtgccttctgcatcactatggaagctatgactttcttccaccaagattgagtggaaagatactggaaatggaaaccattacccaatcagaagcgataaggagacgctaccgctttttaagtcatttttctttatcaactacacttcagatatgtgagattgatatgaaggaatccttgcctcctgatgcatttgctccatttatacatgaaattaagaagcgtgagaagcagcggaaagaacgtgcttggaaggatcgaaaaaataaaatcaaagctgaagtagctgcagctgcagagcttgtaccattgatggccagttttgggcagtcgtcttctagtgatgactttcccccattttccttggatgactttgaagctctgggaaactctgccccaatatcatcaagccctccaaacattggagagagaagttccttctcacatgtgacaaggctcggtttcgcagctggtcacgactccccaaacctgaataacgagccaacaaacgttcaaagcagcagcagcagcagtgaagtctcaaacgcaaccacaggtgcaagaaacacaaacataacatcctttgcgagtgtagcttcaagaacaacaacaccaatggcaccaaccgtcaaagagcccggtaagagagggaagaaacagagccgagtacttctatcgacaactagtgtacgccgttactgaaaaggcctatggatttgtgtatgtataataatcttttcatctaagaaaaactgagtaaagaaagaaccagagattatggtgagtgagtaagtgtaaaactcaaacttgggctttgtttctttttgcaacccatgtgactgataatgaaggtgtctctcattactact

SEQ ID NO: 77285 - protein, 772 aa, Arabidopsis thaliana
  peptide (1)..(772): Ceres Seq. ID no. 12574742
  misc_feature (245)..(291): Pfam Name: Zinc finger, C3HC4 type (RING finger) Pfam Description: Zinc finger, C3HC4 type (RING finger)
  misc_feature (89)..(527): Homolog of NCBI NO: 1402890 NR Description: unknown [Arabidopsis thaliana]
  misc_feature (563)..(753): Homolog of NCBI NO: 1402891 NR Description: unknown [Arabidopsis thaliana]
  misc_feature (38)..(702): Homolog of NCBI NO: 16307585 NR Description: ring finger protein 10 [Mus musculus]
  misc_feature (38)..(634): Homolog of NCBI NO: 7710090 NR Description: ring finger protein 10; RIE2 protein [Mus
  misc_feature (13)..(404): Homolog of NCBI NO: 21619487 NR Description: ring finger protein 10 [Homo sapiens]
  misc_feature (468)..(702): Homolog of NCBI NO: 21619487 NR Description: ring finger protein 10 [Homo sapiens]
  misc_feature (38)..(404): Homolog of NCBI NO: 34872649 NR Description: similar to ring finger protein 10 [Rattus
  misc_feature (515)..(702): Homolog of NCBI NO: 34872649 NR Description: similar to ring finger protein 10 [Rattus
  misc_feature (34)..(403): Homolog of NCBI NO: 40675653 NR Description: Unknown (protein for MGC:75603) [Silurana
  misc_feature (496)..(719): Homolog of NCBI NO: 40675653 NR Description: Unknown (protein for MGC:75603) [Silurana
MSILPPPIIQGHNSSSPSSDSSLNPSSEHGNNSSSSLSPLPSSPPSRISSSTGTRFSGHSESSHNFSGGSREPSVAAEEGHSRGSSKEMTQNGAGKESFSPPNADKRDHFRYDGRRNRSRGRGTGAAGSSSSQLQHNSGPFNSPRGGVSHHNPTGRRANMISGNHLLNFQYDPISQPQSRGPPPPQRRQQYKGRPFNKDLFLKANYKFVVLDTGDHSPDSMDPDKMLQWDDIICVRYSTPSPVQCPICLEYPLCPQITSCGHIFCFPCILQYLLTGVDNHKVDCFKRCPLCFVMISPRELYTVYIENVKQYSVGDPIEFVLLTRKKDSFAPTRKNEHDLAVPNGENEIYDPFSKFTFTQDVDLSVRQAVSELDSWIARADPQLVEDLEKHLYVNAALERLEQRKLYWNEHKLSIYSKVCTTARNQTQSLSPPDVSRVGYQAPMGGHGAPDSGSNDQDKSTEDSSADKSDGESQSSLEKGCDNDLGHPLEDQDAPSSSSCNGSKGFLSHQIDTKDLKDNDAYNFYQSVDGQHIILHTLNVKCLLHHYGSYDFLPPRLSGKILEMETITQSEAIRRRYRFLSHFSLSTTLQICEIDMKESLPPDAFAPFIHEIKKREKQRKERAWKDRKNKIKAEVAAAAELVPLMASFGQSSSSDDFPPFSLDDFEALGNSAPISSSPPNIGERSSFSHVTRLGFAAGHDSPNLNNEPTNVQSSSSSSEVSNATTGARNTNITSFASVASRTTTPMAPTVKEPGKRGKKQSRVLLSTTSVRRY

SEQ ID NO: 77286 - protein, 684 aa, Arabidopsis thaliana
  peptide (1)..(684): Ceres Seq. ID no. 12574743
  misc_feature (157)..(203): Pfam Name: Zinc finger, C3HC4 type (RING finger) Pfam Description: Zinc finger, C3HC4 type (RING finger)
  misc_feature (1)..(439): Homolog of NCBI NO: 1402890 NR Description: unknown [Arabidopsis thaliana]
  misc_feature (475)..(665): Homolog of NCBI NO: 1402891 NR Description: unknown [Arabidopsis thaliana]
  misc_feature (1)..(614): Homolog of NCBI NO: 16307585 NR Description: ring finger protein 10 [Mus musculus]
  misc_feature (1)..(546): Homolog of NCBI NO: 7710090 NR Description: ring finger protein 10; RIE2 protein [Mus
  misc_feature (1)..(316): Homolog of NCBI NO: 21619487 NR Description: ring finger protein 10 [Homo sapiens]
  misc_feature (380)..(614): Homolog of NCBI NO: 21619487 NR Description: ring finger protein 10 [Homo sapiens]
  misc_feature (1)..(316): Homolog of NCBI NO: 34872649 NR Description: similar to ring finger protein 10 [Rattus
  misc_feature (427)..(614): Homolog of NCBI NO: 34872649 NR Description: similar to ring finger protein 10 [Rattus
  misc_feature (1)..(315): Homolog of NCBI NO: 40675653 NR Description: Unknown (protein for MGC:75603) [Silurana
  misc_feature (408)..(631): Homolog of NCBI NO: 40675653 NR Description: Unknown (protein for MGC:75603) [Silurana
MTQNGAGKESFSPPNADKRDHFRYDGRRNRSRGRGTGAAGSSSSQLQHNSGPFNSPRGGVSHHNPTGRRANMISGNHLLNFQYDPISQPQSRGPPPPQRRQQYKGRPFNKDLFLKANYKFVVLDTGDHSPDSMDPDKMLQWDDIICVRYSTPSPVQCPICLEYPLCPQITSCGHIFCFPCILQYLLTGVDNHKVDCFKRCPLCFVMISPRELYTVYIENVKQYSVGDPIEFVLLTRKKDSFAPTRKNEHDLAVPNGENEIYDPFSKFTFTQDVDLSVRQAVSELDSWIARADPQLVEDLEKHLYVNAALERLEQRKLYWNEHKLSIYSKVCTTARNQTQSLSPPDVSRVGYQAPMGGHGAPDSGSNDQDKSTEDSSADKSDGESQSSLEKGCDNDLGHPLEDQDAPSSSSCNGSKGFLSHQIDTKDLKDNDAYNFYQSVDGQHIILHTLNVKCLLHHYGSYDFLPPRLSGKILEMETITQSEAIRRRYRFLSHFSLSTTLQICEIDMKESLPPDAFAPFIHEIKKREKQRKERAWKDRKNKIKAEVAAAAELVPLMASFGQSSSSDDFPPFSLDDFEALGNSAPISSSPPNIGERSSFSHVTRLGFAAGHDSPNLNNEPTNVQSSSSSSEVSNATTGARNTNITSFASVASRTTTPMAPTVKEPGKRGKKQSRVLLSTTSVRRY

SEQ ID NO: 77287 - protein, 613 aa, Arabidopsis thaliana
  peptide (1)..(613): Ceres Seq. ID no. 12574744
  misc_feature (86)..(132): Pfam Name: Zinc finger, C3HC4 type (RING finger) Pfam Description: Zinc finger, C3HC4 type (RING finger)
  misc_feature (1)..(368): Homolog of NCBI NO: 1402890 NR Description: unknown [Arabidopsis thaliana]
  misc_feature (404)..(594): Homolog of NCBI NO: 1402891 NR Description: unknown [Arabidopsis thaliana]
  misc_feature (1)..(543): Homolog of NCBI NO: 16307585 NR Description: ring finger protein 10 [Mus musculus]
  misc_feature (1)..(475): Homolog of NCBI NO: 7710090 NR Description: ring finger protein 10; RIE2 protein [Mus
  misc_feature (1)..(245): Homolog of NCBI NO: 21619487 NR Description: ring finger protein 10 [Homo sapiens]
  misc_feature (309)..(543): Homolog of NCBI NO: 21619487 NR Description: ring finger protein 10 [Homo sapiens]
  misc_feature (1)..(245): Homolog of NCBI NO: 34872649 NR Description: similar to ring finger protein 10 [Rattus
  misc_feature (356)..(543): Homolog of NCBI NO: 34872649 NR Description: similar to ring finger protein 10 [Rattus
  misc_feature (1)..(244): Homolog of NCBI NO: 40675653 NR Description: Unknown (protein for MGC:75603) [Silurana
  misc_feature (337)..(560): Homolog of NCBI NO: 40675653 NR Description: Unknown (protein for MGC:75603) [Silurana
MISGNHLLNFQYDPISQPQSRGPPPPQRRQQYKGRPFNKDLFLKANYKFVVLDTGDHSPDSMDPDKMLQWDDIICVRYSTPSPVQCPICLEYPLCPQITSCGHIFCFPCILQYLLTGVDNHKVDCFKRCPLCFVMISPRELYTVYIENVKQYSVGDPIEFVLLTRKKDSFAPTRKNEHDLAVPNGENEIYDPFSKFTFTQDVDLSVRQAVSELDSWIARADPQLVEDLEKHLYVNAALERLEQRKLYWNEHKLSIYSKVCTTARNQTQSLSPPDVSRVGYQAPMGGHGAPDSGSNDQDKSTEDSSADKSDGESQSSLEKGCDNDLGHPLEDQDAPSSSSCNGSKGFLSHQIDTKDLKDNDAYNFYQSVDGQHIILHTLNVKCLLHHYGSYDFLPPRLSGKILEMETITQSEAIRRRYRFLSHFSLSTTLQICEIDMKESLPPDAFAPFIHEIKKREKQRKERAWKDRKNKIKAEVAAAAELVPLMASFGQSSSSDDFPPFSLDDFEALGNSAPISSSPPNIGERSSFSHVTRLGFAAGHDSPNLNNEPTNVQSSSSSSEVSNATTGARNTNITSFASVASRTTTPMAPTVKEPGKRGKKQSRVLLSTTSVRRY

SEQ ID NO: 77288 - DNA, 1597 bp, Arabidopsis thaliana
  misc_feature (1)..(1597): Ceres Seq. ID no. 12574761
  misc_feature: MA Experiment ID: 20000173 Result: Down-regulated in Transcription
  misc_feature: MA Experiment 20000173 PARAMETER Experiment Name: At_42deg_Heat_P Parameter: Age (day) Value: 14
  misc_feature: MA Experiment 20000173 PARAMETER Experiment Name: At_42deg_Heat_P Parameter: Organism Value: A. thaliana
  misc_feature: MA Experiment 20000173 PARAMETER Experiment Name: At_42deg_Heat_P Parameter: Plant Line Value: WS
  misc_feature: MA Experiment 20000173 PARAMETER Experiment Name: At_42deg_Heat_P Parameter: Temperature (deg C) Value: 42 vs. 22
  misc_feature: MA Experiment 20000173 PARAMETER Experiment Name: At_42deg_Heat_P Parameter: Timepoint (hr) Value: 6
  misc_feature: MA Experiment 20000173 PARAMETER Experiment Name: At_42deg_Heat_P Parameter: Tissue Value: Aerial
  misc_feature: MA Experiment ID: 20000182 Result: Up-regulated in Transcription
  misc_feature: MA Experiment 20000182 PARAMETER Experiment Name: At_2mM_SA_P Parameter: Age (day) Value: 14
  misc_feature: MA Experiment 20000182 PARAMETER Experiment Name: At_2mM_SA_P Parameter: Organism Value: A. thaliana
  misc_feature: MA Experiment 20000182 PARAMETER Experiment Name: At_2mM_SA_P Parameter: Plant Line Value: WS
  misc_feature: MA Experiment 20000182 PARAMETER Experiment Name: At_2mM_SA_P Parameter: Timepoint (hr) Value: 6
  misc_feature: MA Experiment 20000182 PARAMETER Experiment Name: At_2mM_SA_P Parameter: Tissue Value: Aerial
  misc_feature: MA Experiment 20000182 PARAMETER Experiment Name: At_2mM_SA_P Parameter: Treatment Value: 2mM SA vs. No Treatment
  misc_feature: MA Experiment ID: 20000185 Result: Up-regulated in Transcription
  misc_feature: MA Experiment 20000185 PARAMETER Experiment Name: At_Roots__P Parameter: Age (day) Value: 7 vs. 21
  misc_feature: MA Experiment 20000185 PARAMETER Experiment Name: At_Roots__P Parameter: Organism Value: A. thaliana
  misc_feature: MA Experiment 20000185 PARAMETER Experiment Name: At_Roots__P Parameter: Tissue Value: Roots vs. Whole Plant
  misc_feature: MA Experiment ID: 20000234 Result: Down-regulated in Transcription
  misc_feature: MA Experiment 20000234 PARAMETER Experiment Name: At_Siliques_P Parameter: Age (day) Value: 21
  misc_feature: MA Experiment 20000234 PARAMETER Experiment Name: At_Siliques_P Parameter: Organism Value: A. thaliana
  misc_feature: MA Experiment 20000234 PARAMETER Experiment Name: At_Siliques_P Parameter: Plant Line Value: WS
  misc_feature: MA Experiment 20000234 PARAMETER Experiment Name: At_Siliques_P Parameter: Tissue Value: Less Than 5mm Siliques vs. Whole Plant
  misc_feature: MA Experiment ID: 20000264 Result: Down-regulated in Transcription
  misc_feature: MA Experiment 20000264 PARAMETER Experiment Name: At_Open_Flower_P Parameter: Age (day) Value: 21
  misc_feature: MA Experiment 20000264 PARAMETER Experiment Name: At_Open_Flower_P Parameter: Plant Line Value: WS
  misc_feature: MA Experiment 20000264 PARAMETER Experiment Name: At_Open_Flower_P Parameter: Tissue Value: Open Flower vs. Whole Plant
  misc_feature: MA Experiment ID: 20000265 Result: Down-regulated in Transcription
  misc_feature: MA Experiment 20000265 PARAMETER Experiment Name: At_Open_Flower_P Parameter: Age (day) Value: 21
  misc_feature: MA Experiment 20000265 PARAMETER Experiment Name: At_Open_Flower_P Parameter: Plant Line Value: WS
  misc_feature: MA Experiment 20000265 PARAMETER Experiment Name: At_Open_Flower_P Parameter: Tissue Value: Closed Flower vs. Whole Plant
  misc_feature: MA Experiment ID: 20000439 Result: Up-regulated in Transcription
  misc_feature: MA Experiment 20000439 PARAMETER Experiment Name: At_Roots__P Parameter: Age (day) Value: 14 vs. 21
  misc_feature: MA Experiment 20000439 PARAMETER Experiment Name: At_Roots__P Parameter: Organism Value: A. thaliana
  misc_feature: MA Experiment 20000439 PARAMETER Experiment Name: At_Roots__P Parameter: Tissue Value: Roots vs. Whole Plant
  misc_feature: MA Experiment ID: 20000453 Result: Up-regulated in Transcription
  misc_feature: MA Experiment 20000453 PARAMETER Experiment Name: At_100uM_ABA_P Parameter: Age (day) Value: 15
  misc_feature: MA Experiment 20000453 PARAMETER Experiment Name: At_100uM_ABA_P Parameter: Organism Value: A. thaliana
  misc_feature: MA Experiment 20000453 PARAMETER Experiment Name: At_100uM_ABA_P Parameter: Plant Line Value: WS
  misc_feature: MA Experiment 20000453 PARAMETER Experiment Name: At_100uM_ABA_P Parameter: Timepoint (hr) Value: 24
  misc_feature: MA Experiment 20000453 PARAMETER Experiment Name: At_100uM_ABA_P Parameter: Tissue Value: Aerial
  misc_feature: MA Experiment 20000453 PARAMETER Experiment Name: At_100uM_ABA_P Parameter: Treatment Value: 100uM ABA vs. No Treatment
  misc_feature: MA Experiment ID: 20000709 Result: Up-regulated in Transcription
  misc_feature: MA Experiment 20000709 PARAMETER Experiment Name: At_15mM_NH4NO3_L-to-H_P Parameter: Age (hr) Value: 14
  misc_feature: MA Experiment 20000709 PARAMETER Experiment Name: At_15mM_NH4NO3_L-to-H_P Parameter: Organism Value: A. thaliana
  misc_feature: MA Experiment 20000709 PARAMETER Experiment Name: At_15mM_NH4NO3_L-to-H_P Parameter: Plant Line Value: WS
  misc_feature: MA Experiment 20000709 PARAMETER Experiment Name: At_15mM_NH4NO3_L-to-H_P Parameter: Timepoint (hr) Value: 4
  misc_feature: MA Experiment 20000709 PARAMETER Experiment Name: At_15mM_NH4NO3_L-to-H_P Parameter: Tissue Value: Aerial
  misc_feature: MA Experiment 20000709 PARAMETER Experiment Name: At_15mM_NH4NO3_L-to-H_P Parameter: Treatment Value: 15mM NH4NO3 vs. 30mM Mannitol
  misc_feature: MA Experiment ID: 20001247 Result: Up-regulated in Transcription
  misc_feature: MA Experiment 20001247 PARAMETER Experiment Name: At_Far-red-induction_P Parameter: Age (day) Value: 7
  misc_feature: MA Experiment 20001247 PARAMETER Experiment Name: At_Far-red-induction_P Parameter: Light Value: Far-red vs. White
  misc_feature: MA Experiment 20001247 PARAMETER Experiment Name: At_Far-red-induction_P Parameter: Organism Value: A. thaliana
  misc_feature: MA Experiment 20001247 PARAMETER Experiment Name: At_Far-red-induction_P Parameter: Plant Line Value: Columbia
  misc_feature: MA Experiment 20001247 PARAMETER Experiment Name: At_Far-red-induction_P Parameter: Timepoint (hr) Value: 1
  misc_feature: MA Experiment 20001247 PARAMETER Experiment Name: At_Far-red-induction_P Parameter: Tissue Value: Whole Plant
  misc_feature: MA Experiment ID: 20001248 Result: Up-regulated in Transcription
  misc_feature: MA Experiment 20001248 PARAMETER Experiment Name: At_Far-red-induction_P Parameter: Age (day) Value: 7
  misc_feature: MA Experiment 20001248 PARAMETER Experiment Name: At_Far-red-induction_P Parameter: Light Value: Far-red vs. White
  misc_feature: MA Experiment 20001248 PARAMETER Experiment Name: At_Far-red-induction_P Parameter: Organism Value: A. thaliana
  misc_feature: MA Experiment 20001248 PARAMETER Experiment Name: At_Far-red-induction_P Parameter: Plant Line Value: Columbia
  misc_feature: MA Experiment 20001248 PARAMETER Experiment Name: At_Far-red-induction_P Parameter: Timepoint (hr) Value: 4
  misc_feature: MA Experiment 20001248 PARAMETER Experiment Name: At_Far-red-induction_P Parameter: Tissue Value: Whole Plant
  misc_feature: MA Experiment ID: 20001450 Result: Up-regulated in Transcription
  misc_feature: MA Experiment 20001450 PARAMETER Experiment Name: At_Far-red-induction_P Parameter: Age (day) Value: 7
  misc_feature: MA Experiment 20001450 PARAMETER Experiment Name: At_Far-red-induction_P Parameter: Light Value: Far-red vs. White
  misc_feature: MA Experiment 20001450 PARAMETER Experiment Name: At_Far-red-induction_P Parameter: Organism Value: A. thaliana
  misc_feature: MA Experiment 20001450 PARAMETER Experiment Name: At_Far-red-induction_P Parameter: Plant Line Value: Columbia
  misc_feature: MA Experiment 20001450 PARAMETER Experiment Name: At_Far-red-induction_P Parameter: Timepoint (hr) Value: 8
  misc_feature: MA Experiment 20001450 PARAMETER Experiment Name: At_Far-red-induction_P Parameter: Tissue Value: Whole Plant
  misc_feature: MA Experiment ID: 20001451 Result: Up-regulated in Transcription
  misc_feature: MA Experiment 20001451 PARAMETER Experiment Name: At_Far-red-induction_P Parameter: Age (day) Value: 7
  misc_feature: MA Experiment 20001451 PARAMETER Experiment Name: At_Far-red-induction_P Parameter: Light Value: Far-red vs. White
  misc_feature: MA Experiment 20001451 PARAMETER Experiment Name: At_Far-red-induction_P Parameter: Organism Value: A. thaliana
  misc_feature: MA Experiment 20001451 PARAMETER Experiment Name: At_Far-red-induction_P Parameter: Plant Line Value: Columbia
  misc_feature: MA Experiment 20001451 PARAMETER Experiment Name: At_Far-red-induction_P Parameter: Timepoint (hr) Value: 24
  misc_feature: MA Experiment 20001451 PARAMETER Experiment Name: At_Far-red-induction_P Parameter: Tissue Value: Whole Plant
  misc_feature: MA Experiment ID: 20001905 Result: Up-regulated in Transcription
  misc_feature: MA Experiment 20001905 PARAMETER Experiment Name: At_Drought_Reproduction_P Parameter: Age (day) Value: 40
  misc_feature: MA Experiment 20001905 PARAMETER Experiment Name: At_Drought_Reproduction_P Parameter: Organism Value: A. thaliana
  misc_feature: MA Experiment 20001905 PARAMETER Experiment Name: At_Drought_Reproduction_P Parameter: Plant Line Value: WS
  misc_feature: MA Experiment 20001905 PARAMETER Experiment Name: At_Drought_Reproduction_P Parameter: Timepoint (day) Value: 10
  misc_feature: MA Experiment 20001905 PARAMETER Experiment Name: At_Drought_Reproduction_P Parameter: Tissue Value: Rosettes
  misc_feature: MA Experiment 20001905 PARAMETER Experiment Name: At_Drought_Reproduction_P Parameter: Treatment Value: Drought vs. No Drought
aatactcaattctttcttcttcaattcatcacaacaaatcaaaaactccaagttcttacctttttcccatttacaatcggtaaatttctccgatcacgagatacaaatttcactttctgatatcttggatcttccgatcactttgaattttttggtttgttgattttttttttttttttgttccataaagttcgaattttttatagagaagaaaccatgaatgctttagctgcaacaaacagaaacttccgtcatgcatctcgaatcctgggtttggattcgaagatcgagagaagtcttatgatcccatttagagaaatcaaggttgagtgtacgattcctaaagacgatggcactctggtttcatacatcggatttagggttcaacatgacaatgctcgtggacccatgaaaggtggaatcagatatcatcctgaggttgatccagatgaagttaacgcactagctcagctgatgacttggaagactgctgtagcagatattccatatggtggtgctaaaggtggaattggatgtagtcctcgtgacttgagtttgagcgagcttgagaggttgactcgtgtgtttacacagaagattcatgatcttatcggtattcataccgatgtgcctgctcctgatatgggcactaacgctcaaaccatggcttggattcttgatgagtactccaagtttcatggtcattcccctgctgttgtcactggaaagcccattgatcttggtggttcattaggtagggaagctgccacaggtcgtggtgtagtatttgccaccgaagctcttcttgctgagtacgggaaatcgattcagggtttgacatttgttattcaaggttttgggaatgttggaacatgggctgcgaagctgatccacgagaaaggcggtaaagtggttgcagtaagcgacattactggtgcaatcaggaaccctgaaggtatcgacatcaacgctctcataaaacacaaggacgcaactggaagtctcaatgatttcaatggtggagacgctatgaattcagatgaattgctcattcatgagtgtgatgttctcattccatgcgctcttggtggtgtcctgaacaaggaaaatgctggagatgtgaaggcaaagtttatagtagaggcagctaaccatccaacagatccagatgctgatgagattctgtcgaagaaaggagtgattatacttccagatatctacgcaaacgcaggaggagtgacagtgagttacttcgagtgggtgcagaacattcaaggattcatgtgggaagaggaaaaagtgaacttggagctgcaaaaatacatgactcgagcctttcacaacatcaagacaatgtgccatactcattcttgcaacctccgtatgggagctttcactcttggagttaaccgagtcgctcgagccacccagttgcgtggttgggaagcttaattcagttgaatcccccttatatactctgtttcttgcttgctctgttttccatttttttttttttggtttcattgttactgaaaatcattgagctttccgaaatggaaaaggaaacaaatggattgaataaaaactaacaaattgg

SEQ ID NO: 77289 - protein, 411 aa, Arabidopsis thaliana
  peptide (1)..(411): Ceres Seq. ID no. 12574762
  misc_feature (176)..(408): Pfam Name: Glutamate/Leucine/Phenylalanine/Valine dehydrogenase Pfam Description: Glutamate/Leucine/Phenylalanine/Valine
  misc_feature (1)..(411): Homolog of NCBI NO: 15240793 NR Description: glutamate dehydrogenase 2; protein id: supported by cDNA: gi_1336083 [Arabidopsis thaliana]
  misc_feature (1)..(411): Homolog of NCBI NO: 15004984 NR Description: glutamate dehydrogenase [Brassica napus]
  misc_feature (1)..(411): Homolog of NCBI NO: 12229785 NR Description: Glutamate dehydrogenase A (GDH A)
  misc_feature (1)..(411): Homolog of NCBI NO: 11691872 NR Description: NADH glutamate dehydrogenase [Vitis vinifera]
  misc_feature (1)..(411): Homolog of NCBI NO: 1706403 NR Description: GLUTAMATE DEHYDROGENASE (GDH)
  misc_feature (1)..(411): Homolog of NCBI NO: 12643763 NR Description: Glutamate dehydrogenase (GDH)
  misc_feature (1)..(411): Homolog of NCBI NO: 7431775 NR Description: glutamate dehydrogenase (EC 1.4.1.2) - maize
  misc_feature (1)..(411): Homolog of NCBI NO: 21314959 NR Description: NADH-glutamate dehydrogenase [Lycopersicon
  misc_feature (1)..(411): Homolog of NCBI NO: 1931629 NR Description: glutamate dehydrogenase mutant [Zea mays]
  misc_feature (1)..(411): Homolog of NCBI NO: 15238762 NR Description: glutamate dehydrogenase (EC 1.4.1.-) 1 protein id: At5g18170.1, supported by cDNA: gi_1098959, supported cDNA: gi_1293094, supported by cDNA: gi_15146203 [Arabidopsis
MNALAATNRNFRHASRILGLDSKIERSLMIPFREIKVECTIPKDDGTLVSYIGFRVQHDNARGPMKGGIRYHPEVDPDEVNALAQLMTWKTAVADIPYGGAKGGIGCSPRDLSLSELERLTRVFTQKIHDLIGIHTDVPAPDMGTNAQTMAWILDEYSKFHGHSPAVVTGKPIDLGGSLGREAATGRGVVFATEALLAEYGKSIQGLTFVIQGFGNVGTWAAKLIHEKGGKVVAVSDITGAIRNPEGIDINALIKHKDATGSLNDFNGGDAMNSDELLIHECDVLIPCALGGVLNKENAGDVKAKFIVEAANHPTDPDADEILSKKGVIILPDIYANAGGVTVSYFEWVQNIQGFMWEEEKVNLELQKYMTRAFHNIKTMCHTHSCNLRMGAFTLGVNRVARATQLRGWEA

SEQ ID NO: 77290 - protein, 383 aa, Arabidopsis thaliana
  peptide (1)..(383): Ceres Seq. ID no. 12574763
  misc_feature (148)..(380): Pfam Name: Glutamate/Leucine/Phenylalanine/Valine dehydrogenase Pfam Description: Glutamate/Leucine/Phenylalanine/Valine
  misc_feature (1)..(383): Homolog of NCBI NO: 15240793 NR Description: glutamate dehydrogenase 2; protein id: supported by cDNA: gi_1336083 [Arabidopsis thaliana]
  misc_feature (1)..(383): Homolog of NCBI NO: 15004984 NR Description: glutamate dehydrogenase [Brassica napus]
  misc_feature (1)..(383): Homolog of NCBI NO: 12229785 NR Description: Glutamate dehydrogenase A (GDH A)
  misc_feature (1)..(383): Homolog of NCBI NO: 11691872 NR Description: NADH glutamate dehydrogenase [Vitis vinifera]
  misc_feature (1)..(383): Homolog of NCBI NO: 1706403 NR Description: GLUTAMATE DEHYDROGENASE (GDH)
  misc_feature (1)..(383): Homolog of NCBI NO: 12643763 NR Description: Glutamate dehydrogenase (GDH)
  misc_feature (1)..(383): Homolog of NCBI NO: 7431775 NR Description: glutamate dehydrogenase (EC 1.4.1.2) - maize
  misc_feature (1)..(383): Homolog of NCBI NO: 21314959 NR Description: NADH-glutamate dehydrogenase [Lycopersicon
  misc_feature (1)..(383): Homolog of NCBI NO: 1931629 NR Description: glutamate dehydrogenase mutant [Zea mays]
  misc_feature (1)..(383): Homolog of NCBI NO: 15238762 NR Description: glutamate dehydrogenase (EC 1.4.1.-) 1 protein id: At5g18170.1, supported by cDNA: gi_1098959, supported cDNA: gi_1293094, supported by cDNA: gi_15146203 [Arabidopsis
MIPFREIKVECTIPKDDGTLVSYIGFRVQHDNARGPMKGGIRYHPEVDPDEVNALAQLMTWKTAVADIPYGGAKGGIGCSPRDLSLSELERLTRVFTQKIHDLIGIHTDVPAPDMGTNAQTMAWILDEYSKFHGHSPAVVTGKPIDLGGSLGREAATGRGVVFATEALLAEYGKSIQGLTFVIQGFGNVGTWAAKLIHEKGGKVVAVSDITGAIRNPEGIDINALIKHKDATGSLNDFNGGDAMNSDELLIHECDVLIPCALGGVLNKENAGDVKAKFIVEAANHPTDPDADEILSKKGVIILPDIYANAGGVTVSYFEWVQNIQGFMWEEEKVNLELQKYMTRAFHNIKTMCHTHSCNLRMGAFTLGVNRVARATQLRGWEA

SEQ ID NO: 77291 - protein, 347 aa, Arabidopsis thaliana
  peptide (1)..(347): Ceres Seq. ID no. 12574764
  misc_feature (112)..(344): Pfam Name: Glutamate/Leucine/Phenylalanine/Valine dehydrogenase Pfam Description: Glutamate/Leucine/Phenylalanine/Valine
  misc_feature (1)..(347): Homolog of NCBI NO: 15240793 NR Description: glutamate dehydrogenase 2; protein id: supported by cDNA: gi_1336083 [Arabidopsis thaliana]
  misc_feature (1)..(347): Homolog of NCBI NO: 15004984 NR Description: glutamate dehydrogenase [Brassica napus]
  misc_feature (1)..(347): Homolog of NCBI NO: 12229785 NR Description: Glutamate dehydrogenase A (GDH A)
  misc_feature (1)..(347): Homolog of NCBI NO: 11691872 NR Description: NADH glutamate dehydrogenase [Vitis vinifera]
  misc_feature (1)..(347): Homolog of NCBI NO: 1706403 NR Description: GLUTAMATE DEHYDROGENASE (GDH)
  misc_feature (1)..(347): Homolog of NCBI NO: 12643763 NR Description: Glutamate dehydrogenase (GDH)
  misc_feature (1)..(347): Homolog of NCBI NO: 7431775 NR Description: glutamate dehydrogenase (EC 1.4.1.2) - maize
  misc_feature (1)..(347): Homolog of NCBI NO: 21314959 NR Description: NADH-glutamate dehydrogenase [Lycopersicon
  misc_feature (1)..(347): Homolog of NCBI NO: 1931629 NR Description: glutamate dehydrogenase mutant [Zea mays]
  misc_feature (1)..(347): Homolog of NCBI NO: 15238762 NR Description: glutamate dehydrogenase (EC 1.4.1.-) 1 protein id: At5g18170.1, supported by cDNA: gi_1098959, supported cDNA: gi_1293094, supported by cDNA: gi_15146203 [Arabidopsis
MKGGIRYHPEVDPDEVNALAQLMTWKTAVADIPYGGAKGGIGCSPRDLSLSELERLTRVFTQKIHDLIGIHTDVPAPDMGTNAQTMAWILDEYSKFHGHSPAVVTGKPIDLGGSLGREAATGRGVVFATEALLAEYGKSIQGLTFVIQGFGNVGTWAAKLIHEKGGKVVAVSDITGAIRNPEGIDINALIKHKDATGSLNDFNGGDAMNSDELLIHECDVLIPCALGGVLNKENAGDVKAKFIVEAANHPTDPDADEILSKKGVIILPDIYANAGGVTVSYFEWVQNIQGFMWEEEKVNLELQKYMTRAFHNIKTMCHTHSCNLRMGAFTLGVNRVARATQLRGWEA

SEQ ID NO: 77292 - DNA, 2391 bp, Arabidopsis thaliana
  misc_feature (1)..(2391): Ceres Seq. ID no. 12574947
  misc_feature: MA Experiment ID: 20000173 Result: Down-regulated in Transcription
  misc_feature: MA Experiment 20000173 PARAMETER Experiment Name: At_42deg_Heat_P Parameter: Age (day) Value: 14
  misc_feature: MA Experiment 20000173 PARAMETER Experiment Name: At_42deg_Heat_P Parameter: Organism Value: A. thaliana
  misc_feature: MA Experiment 20000173 PARAMETER Experiment Name: At_42deg_Heat_P Parameter: Plant Line Value: WS
  misc_feature: MA Experiment 20000173 PARAMETER Experiment Name: At_42deg_Heat_P Parameter: Temperature (deg C) Value: 42 vs. 22
  misc_feature: MA Experiment 20000173 PARAMETER Experiment Name: At_42deg_Heat_P Parameter: Timepoint (hr) Value: 6
  misc_feature: MA Experiment 20000173 PARAMETER Experiment Name: At_42deg_Heat_P Parameter: Tissue Value: Aerial
  misc_feature: MA Experiment ID: 20000182 Result: Up-regulated in Transcription
  misc_feature: MA Experiment 20000182 PARAMETER Experiment Name: At_2mM_SA_P Parameter: Age (day) Value: 14
  misc_feature: MA Experiment 20000182 PARAMETER Experiment Name: At_2mM_SA_P Parameter: Organism Value: A. thaliana
  misc_feature: MA Experiment 20000182 PARAMETER Experiment Name: At_2mM_SA_P Parameter: Plant Line Value: WS
  misc_feature: MA Experiment 20000182 PARAMETER Experiment Name: At_2mM_SA_P Parameter: Timepoint (hr) Value: 6
  misc_feature: MA Experiment 20000182 PARAMETER Experiment Name: At_2mM_SA_P Parameter: Tissue Value: Aerial
  misc_feature: MA Experiment 20000182 PARAMETER Experiment Name: At_2mM_SA_P Parameter: Treatment Value: 2mM SA vs. No Treatment
  misc_feature: MA Experiment ID: 20000227 Result: Down-regulated in Transcription
  misc_feature: MA Experiment 20000227 PARAMETER Experiment Name: At_Root-Tips-vs-Tops_P Parameter: Tissue Value: Root Tips vs. Root Tops
  misc_feature: MA Experiment ID: 20001558 Result: Down-regulated in Transcription
  misc_feature: MA Experiment 20001558 PARAMETER Experiment Name: At_Drought_Soil_Dry_P Parameter: Age (day) Value: 27
  misc_feature: MA Experiment 20001558 PARAMETER Experiment Name: At_Drought_Soil_Dry_P Parameter: Organism Value: A. thaliana
  misc_feature: MA Experiment 20001558 PARAMETER Experiment Name: At_Drought_Soil_Dry_P Parameter: Plant Line Value: WS
  misc_feature: MA Experiment 20001558 PARAMETER Experiment Name: At_Drought_Soil_Dry_P Parameter: Post Timepoint (hr) Value: 6
  misc_feature: MA Experiment 20001558 PARAMETER Experiment Name: At_Drought_Soil_Dry_P Parameter: Post-Treatment Value: Re-Water vs. No Drought
  misc_feature: MA Experiment 20001558 PARAMETER Experiment Name: At_Drought_Soil_Dry_P Parameter: Timepoint (day) Value: 13
  misc_feature: MA Experiment 20001558 PARAMETER Experiment Name: At_Drought_Soil_Dry_P Parameter: Treatment Value: Drought vs. No Drought
  misc_feature: MA Experiment ID: 20001560 Result: Down-regulated in Transcription
  misc_feature: MA Experiment 20001560 PARAMETER Experiment Name: At_Drought_Soil_Dry_P Parameter: Age (day) Value: 28
  misc_feature: MA Experiment 20001560 PARAMETER Experiment Name: At_Drought_Soil_Dry_P Parameter: Organism Value: A. thaliana
  misc_feature: MA Experiment 20001560 PARAMETER Experiment Name: At_Drought_Soil_Dry_P Parameter: Plant Line Value: WS
  misc_feature: MA Experiment 20001560 PARAMETER Experiment Name: At_Drought_Soil_Dry_P Parameter: Post Timepoint (hr) Value: None
  misc_feature: MA Experiment 20001560 PARAMETER Experiment Name: At_Drought_Soil_Dry_P Parameter: Post-Treatment Value: None
  misc_feature: MA Experiment 20001560 PARAMETER Experiment Name: At_Drought_Soil_Dry_P Parameter: Timepoint (day) Value: 14
  misc_feature: MA Experiment 20001560 PARAMETER Experiment Name: At_Drought_Soil_Dry_P Parameter: Treatment Value: Drought vs. No Drought
gagagcaaagacttgacctttttcacttccttctcactgatcgtcgaacaataaggccgtcgcatctcccagttatggctatggccggagaatcttccggcaaaaaaattggagactgtgacggtaaagtcgcggggaacagacagcgaaaggtgggtcttatttacgacgagacgatgtgcaaacacgacacacctgacggcgaggatcaccctgagtgtcccgaccgcatcagagttatctgggagaagcttcagctcgccggagtttctcaaagatgtgtggttcttggtagtagcaaagcagaagataagcatctccaattggttcacacaaaggaccatgttaatttagttaagagtattagcacaaaacagaaagattatcggagaaacaggattgcttcacagttgaattcgatttatctgaatggaggttcatctgaagccgcatatcttgcagctggttctgttgtaaagttggcagaaaaagttgcagaaggagagttagattgtggttttgctattgtcaggcccccagggcaccatgctgaggcagatgaagccatgggtttttgtttattcaacaatgttgccgttgctgctagttttttactaaacgaaagaccggatctaggggtcaagaaaattctgatcgttgattgggatgtccatcacggaaatggtacccagaagatgttttggaaagatcctcgtgtactatttttctctgttcataggcatgagtatgggggtttctatccagcgggtgatgatggcgattataacatggttggggaaggtccaggtgaagggtttaacataaatgttccatgggatcaaggacgatgtggagatgcagattatcttgctgcatgggaccatatcttgattcctgtggcgagggaatttaacccggatgttatttttctttcagctggatttgatgcagctattaatgatccgctagggggttgttgtgtgaccccatatggatattcagttatgttgaagaagctgatggagtttgcacaaggaaagatagtgctggcgttagagggagggtacaatcttgactcaattgcaaagtcttcacttgcatgtgtccaagttttgcttgaagacaaacaaattcaaggacctccggaagcatacccattcgagtcgacatggcgtgtcatacaagcggtgcgcaagaggctatgcacatattggccttcacttgcagatgaattatcgtggaagctaattaatcagaaaactcctactccaatcatccttatctcaagctccgactctgaaactgaagacaacgcccaaggactcctggatcaaatgtcgaaactcagcattgaaaaccctcaaggtacactacttgaaaaccaccaagtagaacctgcatctacatcttggagagctgatctcgcaaaggttgacgtttggtatgcctcttttggatccaacatgtggaaaccaaggtttctttgctatattcaagggggacaggtcgatggattgaaaaaggtatgtgttggctcaatggataaaagtccaccaaaggaaacagtgtgggaaacatttccacatagattgttctttggccgtgaatcttcagttggttggggtgtaggaggagttgctttcaccaacccccttgctaatctcattgatcaaactcacatgtgtttgtaccgtatcacgcttgagcagttcaatgacgttctgtctcaagaaaatggtttgaatgtggattcagattctccggtctttgatctagctgctttgcagttagtagataacaaaggatccattttagaagctcctttgaatagttggtatggaaatgttgtctgcttgggaaaagaacgcgacattcctatacttacaatgacttgcacgctttccgctgttgagaaattcaaatccggtgagatccctataagacctcctgcaaaagcttatgccaacactttaataaggggacttgtggaaggaggaagattatctaaagaagaagctgaggcttacatagacaaggctgtgtctaaacctctctagtgtataattatttactcagaaaccgcccgtttgaacacgatttggagcttcgggtttctgagttattcaattaggataaaaaccacaagtttaggaatattgtgagacctttgaatttgtcttttgaaagagaggactgtgtcctctgttagctgtgttgtgcttgctccctaagcaaactctcaatgtattttagttatcttcgggttttaggctttaccaagaagctgtattcggtaaatgtattaaagaaccctccaaactgctttatattgaccggagagaaacattcttattcttcggaatggtactttgaagtttgaagagttatttt

SEQ ID NO: 77293 - protein, 684 aa, Arabidopsis thaliana
  peptide (1)..(684): Ceres Seq. ID no. 12574948
  misc_feature (22)..(396): Homolog of NCBI NO: 9759454 NR Description: contains similarity to histone
  misc_feature (51)..(461): Homolog of NCBI NO: 32968028 NR Description: HDA1 [Zea mays]
  misc_feature (445)..(684): Homolog of NCBI NO: 32968028 NR Description: HDA1 [Zea mays]
  misc_feature (11)..(422): Homolog of NCBI NO: 9759454 NR Description: contains similarity to histone
  misc_feature (11)..(422): Homolog of NCBI NO: 22327996 NR Description: histone deacetylase - like; protein id: supported by cDNA: gi_21105768 [Arabidopsis thaliana]
  misc_feature (50)..(580): Homolog of NCBI NO: 34394912 NR Description: putative histone deacetylase [Oryza sativa
  misc_feature (445)..(642): Homolog of NCBI NO: 9759453 NR Description: gene_id:MAF19.7~unknown protein [Arabidopsis
  misc_feature (436)..(684): Homolog of NCBI NO: 15239507 NR Description: putative protein; protein id: At5g61050.1 thaliana] >gi|9759452|dbj|BAB10368.1| gene_id:MAF19.6~unknown
  misc_feature (48)..(448): Homolog of NCBI NO: 34933421 NR Description: histone deacetylase 6 [Rattus norvegicus]
  misc_feature (48)..(423): Homolog of NCBI NO: 34533888 NR Description: unnamed protein product [Homo sapiens]
EQRLDLFHFLLTDRRTIRPSHLPVMAMAGESSGKKIGDCDGKVAGNRQRKVGLIYDETMCKHDTPDGEDHPECPDRIRVIWEKLQLAGVSQRCVVLGSSKAEDKHLQLVHTKDHVNLVKSISTKQKDYRRNRIASQLNSIYLNGGSSEAAYLAAGSVVKLAEKVAEGELDCGFAIVRPPGHHAEADEAMGFCLFNNVAVAASFLLNERPDLGVKKILIVDWDVHHGNGTQKMFWKDPRVLFFSVHRHEYGGFYPAGDDGDYNMVGEGPGEGFNINVPWDQGRCGDADYLAAWDHILIPVAREFNPDVIFLSAGFDAAINDPLGGCCVTPYGYSVMLKKLMEFAQGKIVLALEGGYNLDSIAKSSLACVQVLLEDKQIQGPPEAYPFESTWRVIQAVRKRLCTYWPSLADELSWKLINQKTPTPIILISSSDSETEDNAQGLLDQMSKLSIENPQGTLLENHQVEPASTSWRADLAKVDVWYASFGSNMWKPRFLCYIQGGQVDGLKKVCVGSMDKSPPKETVWETFPHRLFFGRESSVGWGVGGVAFTNPLANLIDQTHMCLYRITLEQFNDVLSQENGLNVDSDSPVFDLAALQLVDNKGSILEAPLNSWYGNVVCLGKERDIPILTMTCTLSAVEKFKSGEIPIRPPAKAYANTLIRGLVEGGRLSKEEAEAYIDKAVSKPL

SEQ ID NO: 77294 - protein, 660 aa, Arabidopsis thaliana; identical to SEQ ID NO: 46370
  peptide (1)..(660): Ceres Seq. ID no. 12574949
  misc_feature (1)..(372): Homolog of NCBI NO: 9759454 NR Description: contains similarity to histone
  misc_feature (27)..(437): Homolog of NCBI NO: 32968028 NR Description: HDA1 [Zea mays]
  misc_feature (421)..(660): Homolog of NCBI NO: 32968028 NR Description: HDA1 [Zea mays]
  misc_feature (1)..(398): Homolog of NCBI NO: 9759454 NR Description: contains similarity to histone
  misc_feature (1)..(398): Homolog of NCBI NO: 22327996 NR Description: histone deacetylase - like; protein id: supported by cDNA: gi_21105768 [Arabidopsis thaliana]
  misc_feature (26)..(556): Homolog of NCBI NO: 34394912 NR Description: putative histone deacetylase [Oryza sativa
  misc_feature (421)..(618): Homolog of NCBI NO: 9759453 NR Description: gene_id:MAF19.7~unknown protein [Arabidopsis
  misc_feature (412)..(660): Homolog of NCBI NO: 15239507 NR Description: putative protein; protein id: At5g61050.1 thaliana] >gi|9759452|dbj|BAB10368.1| gene_id:MAF19.6~unknown
  misc_feature (24)..(424): Homolog of NCBI NO: 34933421 NR Description: histone deacetylase 6 [Rattus norvegicus]
  misc_feature (24)..(399): Homolog of NCBI NO: 34533888 NR Description: unnamed protein product [Homo sapiens]

SEQ ID NO: 77295 - protein, 658 aa, Arabidopsis thaliana; identical to SEQ ID NO: 46371
  peptide (1)..(658): Ceres Seq. ID no. 12574950
  misc_feature (1)..(370): Homolog of NCBI NO: 9759454 NR Description: contains similarity to histone
  misc_feature (25)..(435): Homolog of NCBI NO: 32968028 NR Description: HDA1 [Zea mays]
  misc_feature (419)..(658): Homolog of NCBI NO: 32968028 NR Description: HDA1 [Zea mays]
  misc_feature (1)..(396): Homolog of NCBI NO: 9759454 NR Description: contains similarity to histone
  misc_feature (1)..(396): Homolog of NCBI NO: 22327996 NR Description: histone deacetylase - like; protein id: supported by cDNA: gi_21105768 [Arabidopsis thaliana]
  misc_feature (24)..(554): Homolog of NCBI NO: 34394912 NR Description: putative histone deacetylase [Oryza sativa
  misc_feature (419)..(616): Homolog of NCBI NO: 9759453 NR Description: gene_id:MAF19.7~unknown protein [Arabidopsis
  misc_feature (410)..(658): Homolog of NCBI NO: 15239507 NR Description: putative protein; protein id: At5g61050.1 thaliana] >gi|9759452|dbj|BAB10368.1| gene_id:MAF19.6~unknown
  misc_feature (22)..(422): Homolog of NCBI NO: 34933421 NR Description: histone deacetylase 6 [Rattus norvegicus]
  misc_feature (22)..(397): Homolog of NCBI NO: 34533888 NR Description: unnamed protein product [Homo sapiens]

SEQ ID NO: 77296 - DNA, 1402 bp, Arabidopsis thaliana
  misc_feature (1)..(1402): Ceres Seq. ID no. 12574958
  misc_feature: MA Experiment ID: 20000348 Result: Up-regulated in Transcription
  misc_feature: MA Experiment 20000348 PARAMETER Experiment Name: At_100uM_ABA_Sub_P Parameter: Age (day) Value: 14
  misc_feature: MA Experiment 20000348 PARAMETER Experiment Name: At_100uM_ABA_Sub_P Parameter: Organism Value: A. thaliana
  misc_feature: MA Experiment 20000348 PARAMETER Experiment Name: At_100uM_ABA_Sub_P Parameter: Plant Line Value: WS
  misc_feature: MA Experiment 20000348 PARAMETER Experiment Name: At_100uM_ABA_Sub_P Parameter: Timepoint (hr) Value: 1
  misc_feature: MA Experiment 20000348 PARAMETER Experiment Name: At_100uM_ABA_Sub_P Parameter: Tissue Value: Aerial
  misc_feature: MA Experiment 20000348 PARAMETER Experiment Name: At_100uM_ABA_Sub_P Parameter: Treatment Value: 100uM ABA vs. No Treatment
  misc_feature: MA Experiment ID: 20000352 Result: Up-regulated in Transcription
  misc_feature: MA Experiment 20000352 PARAMETER Experiment Name: At_Drought_Sub_P Parameter: Age (day) Value: 7
  misc_feature: MA Experiment 20000352 PARAMETER Experiment Name: At_Drought_Sub_P Parameter: Organism Value: A. thaliana
  misc_feature: MA Experiment 20000352 PARAMETER Experiment Name: At_Drought_Sub_P Parameter: Plant Line Value: WS
  misc_feature: MA Experiment 20000352 PARAMETER Experiment Name: At_Drought_Sub_P Parameter: Timepoint (hr) Value: 6
  misc_feature: MA Experiment 20000352 PARAMETER Experiment Name: At_Drought_Sub_P Parameter: Tissue Value: Whole Plant
  misc_feature: MA Experiment 20000352 PARAMETER Experiment Name: At_Drought_Sub_P Parameter: Treatment Value: Drought vs. No Drought
gattattttctcttctcgttgaaattgatcccttctaatatttttctttttcttcttcttcttcttcataatttgtatcaatcatttcaaagaaccattctctctgtatatctccttccagtttagctatataaaggagcggtttttaaaaatatcttagaactcgattgattttgatagcttatagccaatcaagatttcttaagctctgtgaaaaatgggatgctttgcgtcaacgccgaaagactcaggtgggaacagaagaaagccaacaagcatcggtgaggtttcagtatatgtacctggtttaaggatacccagagcggtggattttttgcagtcacttggtgatcaattaccgaagactttagtggaacgcttgacagctttaagaacgcgtatagtagtgatggctaatcaagaaggacctacaattacgagaactaggagaaagacacaacatggaggttcaacgctcttggatctccatcaagctttgctagattatctacctgttgtcttgggattaactaaagatgactcttacatgtttacttctaaccaggaaacagagatgtcaaacgtttggtatgaagttttatctgttttgcatctaatggcaatgctacaaatgtctcaagccaatttactgcttcttcctagaggttctagtgatggtcacaatcatccgaaagtatccgaagaaaacagacgaacttcgattgatatcttcttaaaagcagctggatatcttgattgtgccgttaagcatgttctcccccagttttctgctgagcaaaggagaagtttaccagttgacttagcagaaggaactctacgggctctttgcttgcaagcacttggccagggtgttgatatccaacttggcatggcgattgatagctcaaaggccactcttgcagtaaaacgaagactttcatgtgaaatggtgaaatattggcagcaggcacaagataatttaatgaatctcccgttagcaaatggttggggagaaaagcatggactctttgttaagtggaagtatgttgaagctaaggctgcggcttactactatcatggtttgattcttgatgaaggaaacacagagaagtcacatggcatggcagttgctgctttacaagctgcagatgaatgtttcaaagaaagtaagaaagcatccgaagcattcaacgcctctgcgcctacttcaagaacaccgcccctctttggaacaatgaaatatctaactgagaaaatcccgaaagatacttcgagtaaagtcaggataaaccgtgatctctactcctatgaaaaaatcatggagacagcaccaacacttcctgatttcgctttggcattgaaaccagatgagtatcaacttccactcgccgaagcttcgtag

SEQ ID NO: 77297 - protein, 394 aa, Arabidopsis thaliana
  peptide (1)..(394): Ceres Seq. ID no. 12574959
  misc_feature (1)..(394): Homolog of NCBI NO: 15220908 NR Description: hypothetical protein; protein id: At1g17940.1
  misc_feature (1)..(394): Homolog of NCBI NO: 25372891 NR Description: protein F2H15.16 [imported] - Arabidopsis >gi|9665071|gb|AAF97273.1|AC034106_16 F2H15.16 [Arabidopsis
  misc_feature (1)..(394): Homolog of NCBI NO: 15219459 NR Description: hypothetical protein; protein id: At1g73390.1, by cDNA: gi_18252172 [Arabidopsis thaliana]
  misc_feature (1)..(389): Homolog of NCBI NO: 38344447 NR Description: OSJNBa0038O10.19 [Oryza sativa (japonica
  misc_feature (1)..(392): Homolog of NCBI NO: 30684716 NR Description: expressed protein [Arabidopsis thaliana]
MGCFASTPKDSGGNRRKPTSIGEVSVYVPGLRIPRAVDFLQSLGDQLPKTLVERLTALRTRIVVMANQEGPTITRTRRKTQHGGSTLLDLHQALLDYLPVVLGLTKDDSYMFTSNQETEMSNVWYEVLSVLHLMAMLQMSQANLLLLPRGSSDGHNHPKVSEENRRTSIDIFLKAAGYLDCAVKHVLPQFSAEQRRSLPVDLAEGTLRALCLQALGQGVDIQLGMAIDSSKATLAVKRRLSCEMVKYWQQAQDNLMNLPLANGWGEKHGLFVKWKYVEAKAAAYYYHGLILDEGNTEKSHGMAVAALQAADECFKESKKASEAFNASAPTSRTPPLFGTMKYLTEKIPKDTSSKVRINRDLYSYEKIMETAPTLPDFALALKPDEYQLPLAEAS

SEQ ID NO: 77298 - protein, 330 aa, Arabidopsis thaliana
  peptide (1)..(330): Ceres Seq. ID no. 12574960
  misc_feature (1)..(330): Homolog of NCBI NO: 15220908 NR Description: hypothetical protein; protein id: At1g17940.1
  misc_feature (1)..(330): Homolog of NCBI NO: 25372891 NR Description: protein F2H15.16 [imported] - Arabidopsis >gi|9665071|gb|AAF97273.1|AC034106_16 F2H15.16 [Arabidopsis
  misc_feature (1)..(330): Homolog of NCBI NO: 15219459 NR Description: hypothetical protein; protein id: At1g73390.1, by cDNA: gi_18252172 [Arabidopsis thaliana]
  misc_feature (1)..(325): Homolog of NCBI NO: 38344447 NR Description: OSJNBa0038O10.19 [Oryza sativa (japonica
  misc_feature (1)..(328): Homolog of NCBI NO: 30684716 NR Description: expressed protein [Arabidopsis thaliana]
MANQEGPTITRTRRKTQHGGSTLLDLHQALLDYLPVVLGLTKDDSYMFTSNQETEMSNVWYEVLSVLHLMAMLQMSQANLLLLPRGSSDGHNHPKVSEENRRTSIDIFLKAAGYLDCAVKHVLPQFSAEQRRSLPVDLAEGTLRALCLQALGQGVDIQLGMAIDSSKATLAVKRRLSCEMVKYWQQAQDNLMNLPLANGWGEKHGLFVKWKYVEAKAAAYYYHGLILDEGNTEKSHGMAVAALQAADECFKESKKASEAFNASAPTSRTPPLFGTMKYLTEKIPKDTSSKVRINRDLYSYEKIMETAPTLPDFALALKPDEYQLPLAEAS

SEQ ID NO: 77299 - protein, 284 aa, Arabidopsis thaliana
  peptide (1)..(284): Ceres Seq. ID no. 12574961
  misc_feature (1)..(284): Homolog of NCBI NO: 15220908 NR Description: hypothetical protein; protein id: At1g17940.1
  misc_feature (1)..(284): Homolog of NCBI NO: 25372891 NR Description: protein F2H15.16 [imported] - Arabidopsis >gi|9665071|gb|AAF97273.1|AC034106_16 F2H15.16 [Arabidopsis
  misc_feature (1)..(284): Homolog of NCBI NO: 15219459 NR Description: hypothetical protein; protein id: At1g73390.1, by cDNA: gi_18252172 [Arabidopsis thaliana]
  misc_feature (1)..(279): Homolog of NCBI NO: 38344447 NR Description: OSJNBa0038O10.19 [Oryza sativa (japonica
  misc_feature (1)..(282): Homolog of NCBI NO: 30684716 NR Description: expressed protein [Arabidopsis thaliana]
MFTSNQETEMSNVWYEVLSVLHLMAMLQMSQANLLLLPRGSSDGHNHPKVSEENRRTSIDIFLKAAGYLDCAVKHVLPQFSAEQRRSLPVDLAEGTLRALCLQALGQGVDIQLGMAIDSSKATLAVKRRLSCEMVKYWQQAQDNLMNLPLANGWGEKHGLFVKWKYVEAKAAAYYYHGLILDEGNTEKSHGMAVAALQAADECFKESKKASEAFNASAPTSRTPPLFGTMKYLTEKIPKDTSSKVRINRDLYSYEKIMETAPTLPDFALALKPDEYQLPLAEAS

SEQ ID NO: 77300 - DNA, 1965 bp, Arabidopsis thaliana
  misc_feature (1)..(1965): Ceres Seq. ID no. 12574991
  misc_feature: MA Experiment ID: 20000171 Result: Up-regulated in Transcription
  misc_feature: MA Experiment 20000171 PARAMETER Experiment Name: At_42deg_Heat_P Parameter: Age (day) Value: 14
  misc_feature: MA Experiment 20000171 PARAMETER Experiment Name: At_42deg_Heat_P Parameter: Organism Value: A. thaliana
  misc_feature: MA Experiment 20000171 PARAMETER Experiment Name: At_42deg_Heat_P Parameter: Plant Line Value: WS
  misc_feature: MA Experiment 20000171 PARAMETER Experiment Name: At_42deg_Heat_P Parameter: Temperature (deg C) Value: 42 vs. 22
  misc_feature: MA Experiment 20000171 PARAMETER Experiment Name: At_42deg_Heat_P Parameter: Timepoint (hr) Value: 1
  misc_feature: MA Experiment 20000171 PARAMETER Experiment Name: At_42deg_Heat_P Parameter: Tissue Value: Aerial
  misc_feature: MA Experiment ID: 20000234 Result: Down-regulated in Transcription
  misc_feature: MA Experiment 20000234 PARAMETER Experiment Name: At_Siliques_P Parameter: Age (day) Value: 21
  misc_feature: MA Experiment 20000234 PARAMETER Experiment Name: At_Siliques_P Parameter: Organism Value: A. thaliana
  misc_feature: MA Experiment 20000234 PARAMETER Experiment Name: At_Siliques_P Parameter: Plant Line Value: WS
  misc_feature: MA Experiment 20000234 PARAMETER Experiment Name: At_Siliques_P Parameter: Tissue Value: Less Than 5mm Siliques vs. Whole Plant
  misc_feature: MA Experiment ID: 20000235 Result: Down-regulated in Transcription
  misc_feature: MA Experiment 20000235 PARAMETER Experiment Name: At_Siliques_P Parameter: Age (day) Value: 21
  misc_feature: MA Experiment 20000235 PARAMETER Experiment Name: At_Siliques_P Parameter: Organism Value: A. thaliana
  misc_feature: MA Experiment 20000235 PARAMETER Experiment Name: At_Siliques_P Parameter: Plant Line Value: WS
  misc_feature: MA Experiment 20000235 PARAMETER Experiment Name: At_Siliques_P Parameter: Tissue Value: 5-10mm Siliques vs. Whole Plant
  misc_feature: MA Experiment ID: 20000264 Result: Down-regulated in Transcription
  misc_feature: MA Experiment 20000264 PARAMETER Experiment Name: At_Open_Flower_P Parameter: Age (day) Value: 21
  misc_feature: MA Experiment 20000264 PARAMETER Experiment Name: At_Open_Flower_P Parameter: Plant Line Value: WS
  misc_feature: MA Experiment 20000264 PARAMETER Experiment Name: At_Open_Flower_P Parameter: Tissue Value: Open Flower vs. Whole Plant
  misc_feature: MA Experiment ID: 20000437 Result: Down-regulated in Transcription
  misc_feature: MA Experiment 20000437 PARAMETER Experiment Name: At_Drought_P Parameter: Age (day) Value: 8
  misc_feature: MA Experiment 20000437 PARAMETER Experiment Name: At_Drought_P Parameter: Organism Value: A. thaliana
  misc_feature: MA Experiment 20000437 PARAMETER Experiment Name: At_Drought_P Parameter: Plant Line Value: WS
  misc_feature: MA Experiment 20000437 PARAMETER Experiment Name: At_Drought_P Parameter: Timepoint (hr) Value: 24
  misc_feature: MA Experiment 20000437 PARAMETER Experiment Name: At_Drought_P Parameter: Tissue Value: Whole Plant
  misc_feature: MA Experiment 20000437 PARAMETER Experiment Name: At_Drought_P Parameter: Treatment Value: Drought vs. No Drought
  misc_feature: MA Experiment ID: 20000445 Result: Up-regulated in Transcription
  misc_feature: MA Experiment 20000445 PARAMETER Experiment Name: At_100uM_NAA__P Parameter: Age (day) Value: 14
  misc_feature: MA Experiment 20000445 PARAMETER Experiment Name: At_100uM_NAA__P Parameter: Organism Value: A. thaliana
  misc_feature: MA Experiment 20000445 PARAMETER Experiment Name: At_100uM_NAA__P Parameter: Plant Line Value: WS
  misc_feature: MA Experiment 20000445 PARAMETER Experiment Name: At_100uM_NAA__P Parameter: Timepoint (hr) Value: 6
  misc_feature: MA Experiment 20000445 PARAMETER Experiment Name: At_100uM_NAA__P Parameter: Tissue Value: Aerial
  misc_feature: MA Experiment 20000445 PARAMETER Experiment Name: At_100uM_NAA__P Parameter: Treatment Value: 100uM NAA vs. No Treatment
  misc_feature: MA Experiment ID: 20000495 Result: Down-regulated in Transcription
  misc_feature: MA Experiment 20000495 PARAMETER Experiment Name: At_Guard_Cells_P Parameter: Harvest Date Value: 8/2/2002
  misc_feature: MA Experiment 20000495 PARAMETER Experiment Name: At_Guard_Cells_P Parameter: Organism Value: A. thaliana
  misc_feature: MA Experiment 20000495 PARAMETER Experiment Name: At_Guard_Cells_P Parameter: Tissue Value: Guard Cells vs. Leaves
  misc_feature: MA Experiment ID: 20001247 Result: Up-regulated in Transcription
  misc_feature: MA Experiment 20001247 PARAMETER Experiment Name: At_Far-red-induction_P Parameter: Age (day) Value: 7
  misc_feature: MA Experiment 20001247 PARAMETER Experiment Name: At_Far-red-induction_P Parameter: Light Value: Far-red vs. White
  misc_feature: MA Experiment 20001247 PARAMETER Experiment Name: At_Far-red-induction_P Parameter: Organism Value: A. thaliana
  misc_feature: MA Experiment 20001247 PARAMETER Experiment Name: At_Far-red-induction_P Parameter: Plant Line Value: Columbia
  misc_feature: MA Experiment 20001247 PARAMETER Experiment Name: At_Far-red-induction_P Parameter: Timepoint (hr) Value: 1
  misc_feature: MA Experiment 20001247 PARAMETER Experiment Name: At_Far-red-induction_P Parameter: Tissue Value: Whole Plant
  misc_feature: MA Experiment ID: 20001451 Result: Down-regulated in Transcription
  misc_feature: MA Experiment 20001451 PARAMETER Experiment Name: At_Far-red-induction_P Parameter: Age (day) Value: 7
  misc_feature: MA Experiment 20001451 PARAMETER Experiment Name: At_Far-red-induction_P Parameter: Light Value: Far-red vs. White
  misc_feature: MA Experiment 20001451 PARAMETER Experiment Name: At_Far-red-induction_P Parameter: Organism Value: A. thaliana
  misc_feature: MA Experiment 20001451 PARAMETER Experiment Name: At_Far-red-induction_P Parameter: Plant Line Value: Columbia
  misc_feature: MA Experiment 20001451 PARAMETER Experiment Name: At_Far-red-induction_P Parameter: Timepoint (hr) Value: 24
  misc_feature: MA Experiment 20001451 PARAMETER Experiment Name: At_Far-red-induction_P Parameter: Tissue Value: Whole Plant
  misc_feature: MA Experiment ID: 20001557 Result: Up-regulated in Transcription
  misc_feature: MA Experiment 20001557 PARAMETER Experiment Name: At_Drought_Soil_Dry_P Parameter: Age (day) Value: 27
  misc_feature: MA Experiment 20001557 PARAMETER Experiment Name: At_Drought_Soil_Dry_P Parameter: Organism Value: A. thaliana
  misc_feature: MA Experiment 20001557 PARAMETER Experiment Name: At_Drought_Soil_Dry_P Parameter: Plant Line Value: WS
  misc_feature: MA Experiment 20001557 PARAMETER Experiment Name: At_Drought_Soil_Dry_P Parameter: Post Timepoint (hr) Value: 3
  misc_feature: MA Experiment 20001557 PARAMETER Experiment Name: At_Drought_Soil_Dry_P Parameter: Post-Treatment Value: Re-Water vs. No Drought
  misc_feature: MA Experiment 20001557 PARAMETER Experiment Name: At_Drought_Soil_Dry_P Parameter: Timepoint (day) Value: 13
  misc_feature: MA Experiment 20001557 PARAMETER Experiment Name: At_Drought_Soil_Dry_P Parameter: Treatment Value: Drought vs. No Drought
  misc_feature: MA Experiment ID: 20001558 Result: Up-regulated in Transcription
  misc_feature: MA Experiment 20001558 PARAMETER Experiment Name: At_Drought_Soil_Dry_P Parameter: Age (day) Value: 27
  misc_feature: MA Experiment 20001558 PARAMETER Experiment Name: At_Drought_Soil_Dry_P Parameter: Organism Value: A. thaliana
  misc_feature: MA Experiment 20001558 PARAMETER Experiment Name: At_Drought_Soil_Dry_P Parameter: Plant Line Value: WS
  misc_feature: MA Experiment 20001558 PARAMETER Experiment Name: At_Drought_Soil_Dry_P Parameter: Post Timepoint (hr) Value: 6
  misc_feature: MA Experiment 20001558 PARAMETER Experiment Name: At_Drought_Soil_Dry_P Parameter: Post-Treatment Value: Re-Water vs. No Drought
  misc_feature: MA Experiment 20001558 PARAMETER Experiment Name: At_Drought_Soil_Dry_P Parameter: Timepoint (day) Value: 13
  misc_feature: MA Experiment 20001558 PARAMETER Experiment Name: At_Drought_Soil_Dry_P Parameter: Treatment Value: Drought vs. No Drought
  misc_feature: MA Experiment ID: 20001560 Result: Up-regulated in Transcription
  misc_feature: MA Experiment 20001560 PARAMETER Experiment Name: At_Drought_Soil_Dry_P Parameter: Age (day) Value: 28
  misc_feature: MA Experiment 20001560 PARAMETER Experiment Name: At_Drought_Soil_Dry_P Parameter: Organism Value: A. thaliana
  misc_feature: MA Experiment 20001560 PARAMETER Experiment Name: At_Drought_Soil_Dry_P Parameter: Plant Line Value: WS
  misc_feature: MA Experiment 20001560 PARAMETER Experiment Name: At_Drought_Soil_Dry_P Parameter: Post Timepoint (hr) Value: None
  misc_feature: MA Experiment 20001560 PARAMETER Experiment Name: At_Drought_Soil_Dry_P Parameter: Post-Treatment Value: None
  misc_feature: MA Experiment 20001560 PARAMETER Experiment Name: At_Drought_Soil_Dry_P Parameter: Timepoint (day) Value: 14
  misc_feature: MA Experiment 20001560 PARAMETER Experiment Name: At_Drought_Soil_Dry_P Parameter: Treatment Value: Drought vs. No Drought
  misc_feature: MA Experiment ID: 20001757 Result: Down-regulated in Transcription
  misc_feature: MA Experiment 20001757 PARAMETER Experiment Name: At_50mM_NH4NO3_L-to-H_P Parameter: Timepoint (hr) Value: 6
  misc_feature: MA Experiment 20001757 PARAMETER Experiment Name: At_50mM_NH4NO3_L-to-H_P Parameter: Tissue Value: Leaf
  misc_feature: MA Experiment 20001757 PARAMETER Experiment Name: At_50mM_NH4NO3_L-to-H_P Parameter: Treatment Value: 50mM NH4NO3 vs 100mM Mannitol
gtctctttgctttaataatttccttctcaccgaaacacacaccacaaccaattctcttctccttcttcctctttcacaaattcgtcatctgggtattcttaaatttctcacaaattcatttacttttttgttctgttccgagatttcaaggttcactatcgattctgaaactcttggaacaatccagattcttggttagcaggtggggaagcattaatcatgtatttatgatacactgctccattattattacgagagagttgaaagtttcctttttgactcgtttttaaaggcaaggaagaagaaagactttgtttttaaaatgccaatgtttcagccttctaagaacggtgggtttgatgggcatatcttagatctacactcggcggttaaagacggtgttcttggcggcggagatgggaaatttctggtggttgttaccgatgagaagaagaaattggatttgaaggagatgatttctgagctggaattacctgaaataccctctgttttcatctgtcctatctctctagagccgatgcaagatccagtgaccttgtgtactggtcaaacctacgagaggtccaacattctcaaatggttcaatatagggcattgtacttgcccaacgacgatgcaagagctttgggatgatttggtcactcctaacaagactcttcaccaattgatctacacttggttttcacagaagtatgttttgatgaagaaacgatctgaagatgtgcaaggacgtgctattgagattctgggtacgttgagaaaggctaaagggaaagcaaaggttcatgctttaagcgagcttaagcaagttgtgatggctcacgctattgctaagaagactgttgttgatgaaggtggagtctttgtgatctcttctcttttaagtccttttacttctcacgctgttggatctgaggctatagctattcttgttaatcttgagcttgactctgattccaaagctggattgatgcaaccagctagggtctcgttgatggttgatatgttgaatgatggttcgattgaaactaagatcaattgtgctagattgattggaaggttggtggaggagaaaggttttagagcagagcttgtttctagtcatagtttgcttgttggattaatgagattggttaaagataggagacgaagaaacggcgtttcgcctgcgttaacgctgctcaaatcggtttctgttcataaacaagttaggaacttgttggttaggattggtgcagttcctcaattggttgatgttttgccatgtttggatgtggagtgtttagagtcagctcttttcgtgttggattcgttatgtttagaaagcgaaggcagaattgctttgaaagattcggttaacacgattccgcataccgttaggttactgatgaaggtatcagagaaatgcacaaactatgcgatatcgattctttggtcagtttgcaaattagcttctgaagaatgttcatctcttgctgttgaagttggtttggctgcaaagcttttgcttgtgatacaaagtggatgtgatccagctttgaagcaacgttcagctgagctattgaagttatgtagtctacattattcagactcaatgtttatctccaaatgtaaactcacaagaactatccaataaaagactgatcaagttttcacctttcgggtcaaaatcacacaacggatctgccccatcttgttgatgtatatagaaatgaagaagctcaaggagtatgagagtaagaaacgagtttcgatgtgttgaattctattttgcaatgttatttgaataataatagttaagtagaagtaaactgtataaatctttttgttgtggttggttcattattcagtagaagaatagattgaagaaaggaatcatttttttggcctcttgtaagttactagctgtttgtgagtcataataattggagaaattattgatct

SEQ ID NO: 77301 - protein, 444 aa, Arabidopsis thaliana
  peptide (1)..(444): Ceres Seq. ID no. 12574992
  misc_feature (59)..(133): Pfam Name: U-box domain Pfam Description: U-box domain
  misc_feature (1)..(436): Homolog of NCBI NO: 7486518 NR Description: hypothetical protein F6H11.10 - Arabidopsis >gi|2827699|emb|CAA16672.1| predicted protein [Arabidopsis
  misc_feature (1)..(444): Homolog of NCBI NO: 15239204 NR Description: unknown protein; protein id: At5g65920.1, by cDNA: gi_17064799, supported by cDNA: gi_20259821 [Arabidopsis >gi|9759576|dbj|BAB11139.1| gene_id:K14B20.9~unknown protein
  misc_feature (1)..(444): Homolog of NCBI NO: 17064800 NR Description: Unknown protein [Arabidopsis thaliana]
  misc_feature (1)..(444): Homolog of NCBI NO: 18408953 NR Description: putative protein; protein id: At3g49810.1,
  misc_feature (1)..(444): Homolog of NCBI NO: 21536926 NR Description: unknown [Arabidopsis thaliana]
  misc_feature (1)..(416): Homolog of NCBI NO: 11358045 NR Description: hypothetical protein T16K5.160 - Arabidopsis >gi|6723426|emb|CAB66919.1| putative protein [Arabidopsis
  misc_feature (1)..(443): Homolog of NCBI NO: 20330772 NR Description: Unknown protein [Oryza sativa (japonica
  misc_feature (60)..(422): Homolog of NCBI NO: 13539578 NR Description: photoperiod responsive protein [Solanum tuberosum
  misc_feature (59)..(436): Homolog of NCBI NO: 25408431 NR Description: hypothetical protein At2g35930 [imported] - thaliana >gi|4510376|gb|AAD21464.1| unknown protein [Arabidopsis
  misc_feature (59)..(436): Homolog of NCBI NO: 30686609 NR Description: expressed protein [Arabidopsis thaliana]
MPMFQPSKNGGFDGHILDLHSAVKDGVLGGGDGKFLVVVTDEKKKLDLKEMISELELPEIPSVFICPISLEPMQDPVTLCTGQTYERSNILKWFNIGHCTCPTTMQELWDDLVTPNKTLHQLIYTWFSQKYVLMKKRSEDVQGRAIEILGTLRKAKGKAKVHALSELKQVVMAHAIAKKTVVDEGGVFVISSLLSPFTSHAVGSEAIAILVNLELDSDSKAGLMQPARVSLMVDMLNDGSIETKINCARLIGRLVEEKGFRAELVSSHSLLVGLMRLVKDRRRRNGVSPALTLLKSVSVHKQVRNLLVRIGAVPQLVDVLPCLDVECLESALFVLDSLCLESEGRIALKDSVNTIPHTVRLLMKVSEKCTNYAISILWSVCKLASEECSSLAVEVGLAAKLLLVIQSGCDPALKQRSAELLKLCSLHYSDSMFISKCKLTRTIQ

SEQ ID NO: 77302 - protein, 442 aa, Arabidopsis thaliana
  peptide (1)..(442): Ceres Seq. ID no. 12574993
  misc_feature (57)..(131): Pfam Name: U-box domain Pfam Description: U-box domain
  misc_feature (1)..(434): Homolog of NCBI NO: 7486518 NR Description: hypothetical protein F6H11.10 - Arabidopsis >gi|2827699|emb|CAA16672.1| predicted protein [Arabidopsis
  misc_feature (1)..(442): Homolog of NCBI NO: 15239204 NR Description: unknown protein; protein id: At5g65920.1, by cDNA: gi_17064799, supported by cDNA: gi_20259821 [Arabidopsis >gi|9759576|dbj|BAB11139.1| gene_id:K14B20.9~unknown protein
  misc_feature (1)..(442): Homolog of NCBI NO: 17064800 NR Description: Unknown protein [Arabidopsis thaliana]
  misc_feature (1)..(442): Homolog of NCBI NO: 18408953 NR Description: putative protein; protein id: At3g49810.1,
  misc_feature (1)..(442): Homolog of NCBI NO: 21536926 NR Description: unknown [Arabidopsis thaliana]
  misc_feature (1)..(414): Homolog of NCBI NO: 11358045 NR Description: hypothetical protein T16K5.160 - Arabidopsis >gi|6723426|emb|CAB66919.1| putative protein [Arabidopsis
  misc_feature (1)..(441): Homolog of NCBI NO: 20330772 NR Description: Unknown protein [Oryza sativa (japonica
  misc_feature (58)..(420): Homolog of NCBI NO: 13539578 NR Description: photoperiod responsive protein [Solanum tuberosum
  misc_feature (57)..(434): Homolog of NCBI NO: 25408431 NR Description: hypothetical protein At2g35930 [imported] - thaliana >gi|4510376|gb|AAD21464.1| unknown protein [Arabidopsis
  misc_feature (57)..(434): Homolog of NCBI NO: 30686609 NR Description: expressed protein [Arabidopsis thaliana]
MFQPSKNGGFDGHILDLHSAVKDGVLGGGDGKFLVVVTDEKKKLDLKEMISELELPEIPSVFICPISLEPMQDPVTLCTGQTYERSNILKWFNIGHCTCPTTMQELWDDLVTPNKTLHQLIYTWFSQKYVLMKKRSEDVQGRAIEILGTLRKAKGKAKVHALSELKQVVMAHAIAKKTVVDEGGVFVISSLLSPFTSHAVGSEAIAILVNLELDSDSKAGLMQPARVSLMVDMLNDGSIETKINCARLIGRLVEEKGFRAELVSSHSLLVGLMRLVKDRRRRNGVSPALTLLKSVSVHKQVRNLLVRIGAVPQLVDVLPCLDVECLESALFVLDSLCLESEGRIALKDSVNTIPHTVRLLMKVSEKCTNYAISILWSVCKLASEECSSLAVEVGLAAKLLLVIQSGCDPALKQRSAELLKLCSLHYSDSMFISKCKLTRTIQ

SEQ ID NO: 77303 - protein, 394 aa, Arabidopsis thaliana
  peptide (1)..(394): Ceres Seq. ID no. 12574994
  misc_feature (9)..(83): Pfam Name: U-box domain Pfam Description: U-box domain
  misc_feature (1)..(386): Homolog of NCBI NO: 7486518 NR Description: hypothetical protein F6H11.10 - Arabidopsis >gi|2827699|emb|CAA16672.1| predicted protein [Arabidopsis
  misc_feature (1)..(394): Homolog of NCBI NO: 15239204 NR Description: unknown protein; protein id: At5g65920.1, by cDNA: gi_17064799, supported by cDNA: gi_20259821 [Arabidopsis >gi|9759576|dbj|BAB11139.1| gene_id:K14B20.9~unknown protein
  misc_feature (1)..(394): Homolog of NCBI NO: 17064800 NR Description: Unknown protein [Arabidopsis thaliana]
  misc_feature (1)..(394): Homolog of NCBI NO: 18408953 NR Description: putative protein; protein id: At3g49810.1,
  misc_feature (1)..(394): Homolog of NCBI NO: 21536926 NR Description: unknown [Arabidopsis thaliana]
  misc_feature (1)..(366): Homolog of NCBI NO: 11358045 NR Description: hypothetical protein T16K5.160 - Arabidopsis >gi|6723426|emb|CAB66919.1| putative protein [Arabidopsis
  misc_feature (1)..(393): Homolog of NCBI NO: 20330772 NR Description: Unknown protein [Oryza sativa (japonica
  misc_feature (10)..(372): Homolog of NCBI NO: 13539578 NR Description: photoperiod responsive protein [Solanum tuberosum
  misc_feature (9)..(386): Homolog of NCBI NO: 25408431 NR Description: hypothetical protein At2g35930 [imported] - thaliana >gi|4510376|gb|AAD21464.1| unknown protein [Arabidopsis
  misc_feature (9)..(386): Homolog of NCBI NO: 30686609 NR Description: expressed protein [Arabidopsis thaliana]
MISELELPEIPSVFICPISLEPMQDPVTLCTGQTYERSNILKWFNIGHCTCPTTMQELWDDLVTPNKTLHQLIYTWFSQKYVLMKKRSEDVQGRAIEILGTLRKAKGKAKVHALSELKQVVMAHAIAKKTVVDEGGVFVISSLLSPFTSHAVGSEAIAILVNLELDSDSKAGLMQPARVSLMVDMLNDGSIETKINCARLIGRLVEEKGFRAELVSSHSLLVGLMRLVKDRRRRNGVSPALTLLKSVSVHKQVRNLLVRIGAVPQLVDVLPCLDVECLESALFVLDSLCLESEGRIALKDSVNTIPHTVRLLMKVSEKCTNYAISILWSVCKLASEECSSLAVEVGLAAKLLLVIQSGCDPALKQRSAELLKLCSLHYSDSMFISKCKLTRTIQ

SEQ ID NO: 77304 - DNA, 1143 bp, Arabidopsis thaliana
  misc_feature (1)..(1143): Ceres Seq. ID no. 12575106
  misc_feature: MA Experiment ID: 20000173 Result: Up-regulated in Transcription
  misc_feature: MA Experiment 20000173 PARAMETER Experiment Name: At_42deg_Heat_P Parameter: Age (day) Value: 14
  misc_feature: MA Experiment 20000173 PARAMETER Experiment Name: At_42deg_Heat_P Parameter: Organism Value: A. thaliana
  misc_feature: MA Experiment 20000173 PARAMETER Experiment Name: At_42deg_Heat_P Parameter: Plant Line Value: WS
  misc_feature: MA Experiment 20000173 PARAMETER Experiment Name: At_42deg_Heat_P Parameter: Temperature (deg C) Value: 42 vs. 22
  misc_feature: MA Experiment 20000173 PARAMETER Experiment Name: At_42deg_Heat_P Parameter: Timepoint (hr) Value: 6
  misc_feature: MA Experiment 20000173 PARAMETER Experiment Name: At_42deg_Heat_P Parameter: Tissue Value: Aerial
  misc_feature: MA Experiment ID: 20000234 Result: Down-regulated in Transcription
  misc_feature: MA Experiment 20000234 PARAMETER Experiment Name: At_Siliques_P Parameter: Age (day) Value: 21
  misc_feature: MA Experiment 20000234 PARAMETER Experiment Name: At_Siliques_P Parameter: Organism Value: A. thaliana
  misc_feature: MA Experiment 20000234 PARAMETER Experiment Name: At_Siliques_P Parameter: Plant Line Value: WS
  misc_feature: MA Experiment 20000234 PARAMETER Experiment Name: At_Siliques_P Parameter: Tissue Value: Less Than 5mm Siliques vs. Whole Plant
  misc_feature: MA Experiment ID: 20000438 Result: Up-regulated in Transcription
  misc_feature: MA Experiment 20000438 PARAMETER Experiment Name: At_Shoots__P Parameter: Age (day) Value: 14
  misc_feature: MA Experiment 20000438 PARAMETER Experiment Name: At_Shoots__P Parameter: Tissue Value: Shoots vs. Whole Plant
  misc_feature: MA Experiment ID: 20000496 Result: Down-regulated in Transcription
  misc_feature: MA Experiment 20000496 PARAMETER Experiment Name: At_Guard_Cells_P Parameter: Harvest Date Value: 7/19/2002
  misc_feature: MA Experiment 20000496 PARAMETER Experiment Name: At_Guard_Cells_P Parameter: Organism Value: Canola
  misc_feature: MA Experiment 20000496 PARAMETER Experiment Name: At_Guard_Cells_P Parameter: Tissue Value: Guard Cells vs. Leaves
  misc_feature: MA Experiment ID: 20000573 Result: Down-regulated in Transcription
  misc_feature: MA Experiment 20000573 PARAMETER Experiment Name: At_100uM_ABA_Mutants__P Parameter: Organism Value: A. thaliana
  misc_feature: MA Experiment 20000573 PARAMETER Experiment Name: At_100uM_ABA_Mutants__P Parameter: Plant Line Value: CS22 vs. Ler wt
  misc_feature: MA Experiment 20000573 PARAMETER Experiment Name: At_100uM_ABA_Mutants__P Parameter: Timepoint (hr) Value: N/A
  misc_feature: MA Experiment 20000573 PARAMETER Experiment Name: At_100uM_ABA_Mutants__P Parameter: Tissue Value: Whole Plant
  misc_feature: MA Experiment 20000573 PARAMETER Experiment Name: At_100uM_ABA_Mutants__P Parameter: Treatment Value: None
  misc_feature: MA Experiment ID: 20000574 Result: Down-regulated in Transcription
  misc_feature: MA Experiment 20000574 PARAMETER Experiment Name: At_100uM_ABA_Mutants__P Parameter: Organism Value: A. thaliana
  misc_feature: MA Experiment 20000574 PARAMETER Experiment Name: At_100uM_ABA_Mutants__P Parameter: Plant Line Value: CS23 vs. Ler wt
  misc_feature: MA Experiment 20000574 PARAMETER Experiment Name: At_100uM_ABA_Mutants__P Parameter: Timepoint (hr) Value: N/A
  misc_feature: MA Experiment 20000574 PARAMETER Experiment Name: At_100uM_ABA_Mutants__P Parameter: Tissue Value: Whole Plant
  misc_feature: MA Experiment 20000574 PARAMETER Experiment Name: At_100uM_ABA_Mutants__P Parameter: Treatment Value: None
  misc_feature: MA Experiment ID: 20000578 Result: Down-regulated in Transcription
  misc_feature: MA Experiment 20000578 PARAMETER Experiment Name: At_CS3726__P Parameter: Organism Value: A. thaliana
  misc_feature: MA Experiment 20000578 PARAMETER Experiment Name: At_CS3726__P Parameter: Plant Line Value: CS3726
  misc_feature: MA Experiment 20000578 PARAMETER Experiment Name: At_CS3726__P Parameter: Tissue Value: Whole Plant
  misc_feature: MA Experiment ID: 20000794 Result: Up-regulated in Transcription
  misc_feature: MA Experiment 20000794 PARAMETER Experiment Name: At_Petals_P Parameter: Age (day) Value: 23-25 days
  misc_feature: MA Experiment 20000794 PARAMETER Experiment Name: At_Petals_P Parameter: Plant Line Value: WS
  misc_feature: MA Experiment 20000794 PARAMETER Experiment Name: At_Petals_P Parameter: Tissue Value: Petals vs. Whole plant
  misc_feature: MA Experiment ID: 20001248 Result: Down-regulated in Transcription
  misc_feature: MA Experiment 20001248 PARAMETER Experiment Name: At_Far-red-induction_P Parameter: Age (day) Value: 7
  misc_feature: MA Experiment 20001248 PARAMETER Experiment Name: At_Far-red-induction_P Parameter: Light Value: Far-red vs. White
  misc_feature: MA Experiment 20001248 PARAMETER Experiment Name: At_Far-red-induction_P Parameter: Organism Value: A. thaliana
  misc_feature: MA Experiment 20001248 PARAMETER Experiment Name: At_Far-red-induction_P Parameter: Plant Line Value: Columbia
  misc_feature: MA Experiment 20001248 PARAMETER Experiment Name: At_Far-red-induction_P Parameter: Timepoint (hr) Value: 4
  misc_feature: MA Experiment 20001248 PARAMETER Experiment Name: At_Far-red-induction_P Parameter: Tissue Value: Whole Plant
  misc_feature: MA Experiment ID: 20001451 Result: Up-regulated in Transcription
  misc_feature: MA Experiment 20001451 PARAMETER Experiment Name: At_Far-red-induction_P Parameter: Age (day) Value: 7
  misc_feature: MA Experiment 20001451 PARAMETER Experiment Name: At_Far-red-induction_P Parameter: Light Value: Far-red vs. White
  misc_feature: MA Experiment 20001451 PARAMETER Experiment Name: At_Far-red-induction_P Parameter: Organism Value: A. thaliana
  misc_feature: MA Experiment 20001451 PARAMETER Experiment Name: At_Far-red-induction_P Parameter: Plant Line Value: Columbia
  misc_feature: MA Experiment 20001451 PARAMETER Experiment Name: At_Far-red-induction_P Parameter: Timepoint (hr) Value: 24
  misc_feature: MA Experiment 20001451 PARAMETER Experiment Name: At_Far-red-induction_P Parameter: Tissue Value: Whole Plant
  misc_feature: MA Experiment ID: 20001757 Result: Up-regulated in Transcription
  misc_feature: MA Experiment 20001757 PARAMETER Experiment Name: At_50mM_NH4NO3_L-to-H_P Parameter: Timepoint (hr) Value: 6
  misc_feature: MA Experiment 20001757 PARAMETER Experiment Name: At_50mM_NH4NO3_L-to-H_P Parameter: Tissue Value: Leaf
  misc_feature: MA Experiment 20001757 PARAMETER Experiment Name: At_50mM_NH4NO3_L-to-H_P Parameter: Treatment Value: 50mM NH4NO3 vs 100mM Mannitol
  misc_feature: MA Experiment ID: 20001905 Result: Up-regulated in Transcription
  misc_feature: MA Experiment 20001905 PARAMETER Experiment Name: At_Drought_Reproduction_P Parameter: Age (day) Value: 40
  misc_feature: MA Experiment 20001905 PARAMETER Experiment Name: At_Drought_Reproduction_P Parameter: Organism Value: A. thaliana
  misc_feature: MA Experiment 20001905 PARAMETER Experiment Name: At_Drought_Reproduction_P Parameter: Plant Line Value: WS
  misc_feature: MA Experiment 20001905 PARAMETER Experiment Name: At_Drought_Reproduction_P Parameter: Timepoint (day) Value: 10
  misc_feature: MA Experiment 20001905 PARAMETER Experiment Name: At_Drought_Reproduction_P Parameter: Tissue Value: Rosettes
  misc_feature: MA Experiment 20001905 PARAMETER Experiment Name: At_Drought_Reproduction_P Parameter: Treatment Value: Drought vs. No Drought
  misc_feature: MA Experiment ID: 20001911 Result: Up-regulated in Transcription
  misc_feature: MA Experiment 20001911 PARAMETER Experiment Name: At_Drought_Reproduction_P Parameter: Age (day) Value: 40
  misc_feature: MA Experiment 20001911 PARAMETER Experiment Name: At_Drought_Reproduction_P Parameter: Organism Value: A. thaliana
  misc_feature: MA Experiment 20001911 PARAMETER Experiment Name: At_Drought_Reproduction_P Parameter: Plant Line Value: WS
  misc_feature: MA Experiment 20001911 PARAMETER Experiment Name: At_Drought_Reproduction_P Parameter: Timepoint (day) Value: 10
  misc_feature: MA Experiment 20001911 PARAMETER Experiment Name: At_Drought_Reproduction_P Parameter: Tissue Value: Flowers
  misc_feature: MA Experiment 20001911 PARAMETER Experiment Name: At_Drought_Reproduction_P Parameter: Treatment Value: Drought vs. No Drought
ataatccccagacgaagacgaagccgaagataacggaacaatcaaatcaatcatacagaagcagctaatggcgttgagaatcaggaaggcgacgacgacacttctcttctccggtgggattactcatggaacggatcggatcgcgagaaccggagcattgctcagccgttggatctcctctgcttcgtcatcttccgctgttgtagcggatgatgaatctagtgggatttacggattgggaagtgtgttgaaagagtatgaagattataggagatctctctatggtgagatcactcataaggctttgcttgttgatgctgttggtactctccttgttcccgctcaacctactgctcagatatataagaatattggagagaagtacggagtggagtactcggaggctgagatacttactagatacagaagagcttatcagaaaccatggggtggatctcatcttagatatgtaaacgatgcaagacctttctggcagtatatagtgactgcatcaacaggctgctcggattcacagtactttgaagagctttacagctattttactacagaacaggcgtggaagttatgtgatccagatgcagggaaagtgtttaaggctattaaagaagcgggtgtaaaagttgcaatagtctccaacttcgatactcggttaagacctctcctacgtgcattgagatgtgaagattggtttgatgctgtagctgtttcagcagaagttgaagcggaaaaaccaaacccgactatcttcttaaaagcttgtgagttattagaagtgaatcccgaggatgcggttcatgtaggagatgaccgtaggaatgatgtatggggagctagagacgcaggctgtgacgcttggctctggggaagtgaagttacgtcatttaaacaggttgctcaacggataggagtgaaggtctgaagcaaaagcatatgagagaaatggttcagagacatgttcagacttcagttttagcttcttctttttttgtgtgagcagttttgtatattccatttctcttttgtagcataatgtgtgtaatatatgttgcggctaatgtagaaaaccagaaaacaatgtataataaaagatcaataataagcttcatgatcgttcttaatccg

SEQ ID NO: 77305 - protein, 290 aa, Arabidopsis thaliana
  peptide (1)..(290): Ceres Seq. ID no. 12575107
  misc_feature (77)..(275): Pfam Name: haloacid dehalogenase-like hydrolase Pfam Description: haloacid dehalogenase-like hydrolase
  misc_feature (1)..(290): Homolog of NCBI NO: 15227309 NR Description: hypothetical protein; protein id: At2g41250.1, by cDNA: gi_17979160 [Arabidopsis thaliana]
  misc_feature (1)..(281): Homolog of NCBI NO: 34899086 NR Description: contains ESTs to Arabidopsis thaliana chromosome 2, At2g41250~unknown protein
  misc_feature (77)..(286): Homolog of NCBI NO: 28393346 NR Description: unknown protein [Arabidopsis thaliana]
  misc_feature (77)..(286): Homolog of NCBI NO: 30683719 NR Description: haloacid dehalogenase-like hydrolase family
  misc_feature (78)..(266): Homolog of NCBI NO: 37520921 NR Description: hypothetical protein gll1352 [Gloeobacter
  misc_feature (78)..(271): Homolog of NCBI NO: 23041810 NR Description: hypothetical protein [Trichodesmium erythraeum
  misc_feature (78)..(274): Homolog of NCBI NO: 17553988 NR Description: Predicted CDS, haloacid dehalogenase-like [Caenorhabditis elegans] >gi|13548390|emb|CAC35822.1|
  misc_feature (78)..(271): Homolog of NCBI NO: 17231587 NR Description: hypothetical protein [Nostoc sp. PCC 7120]
  misc_feature (78)..(271): Homolog of NCBI NO: 23130292 NR Description: hypothetical protein [Nostoc punctiforme]
  misc_feature (78)..(271): Homolog of NCBI NO: 27714603 NR Description: similar to RIKEN cDNA 2810435D12 [Mus musculus]
MALRIRKATTTLLFSGGITHGTDRIARTGALLSRWISSASSSSAVVADDESSGIYGLGSVLKEYEDYRRSLYGEITHKALLVDAVGTLLVPAQPTAQIYKNIGEKYGVEYSEAEILTRYRRAYQKPWGGSHLRYVNDARPFWQYIVTASTGCSDSQYFEELYSYFTTEQAWKLCDPDAGKVFKAIKEAGVKVAIVSNFDTRLRPLLRALRCEDWFDAVAVSAEVEAEKPNPTIFLKACELLEVNPEDAVHVGDDRRNDVWGARDAGCDAWLWGSEVTSFKQVAQRIGVKV

SEQ ID NO: 77306 - DNA, 946 bp, Arabidopsis thaliana
  misc_feature (1)..(946): Ceres Seq. ID no. 12575188
  misc_feature: MA Experiment ID: 20000166 Result: Down-regulated in Transcription
  misc_feature: MA Experiment 20000166 PARAMETER Experiment Name: At_100uM_ABA_P Parameter: Age (day) Value: 14
  misc_feature: MA Experiment 20000166 PARAMETER Experiment Name: At_100uM_ABA_P Parameter: Organism Value: A. thaliana
  misc_feature: MA Experiment 20000166 PARAMETER Experiment Name: At_100uM_ABA_P Parameter: Plant Line Value: WS
  misc_feature: MA Experiment 20000166 PARAMETER Experiment Name: At_100uM_ABA_P Parameter: Timepoint (hr) Value: 1
  misc_feature: MA Experiment 20000166 PARAMETER Experiment Name: At_100uM_ABA_P Parameter: Tissue Value: Aerial
  misc_feature: MA Experiment 20000166 PARAMETER Experiment Name: At_100uM_ABA_P Parameter: Treatment Value: 100uM ABA vs. No Treatment
  misc_feature: MA Experiment ID: 20000227 Result: Down-regulated in Transcription
  misc_feature: MA Experiment 20000227 PARAMETER Experiment Name: At_Root-Tips-vs-Tops_P Parameter: Tissue Value: Root Tips vs. Root Tops
  misc_feature: MA Experiment ID: 20000234 Result: Down-regulated in Transcription
  misc_feature: MA Experiment 20000234 PARAMETER Experiment Name: At_Siliques_P Parameter: Age (day) Value: 21
  misc_feature: MA Experiment 20000234 PARAMETER Experiment Name: At_Siliques_P Parameter: Organism Value: A. thaliana
  misc_feature: MA Experiment 20000234 PARAMETER Experiment Name: At_Siliques_P Parameter: Plant Line Value: WS
  misc_feature: MA Experiment 20000234 PARAMETER Experiment Name: At_Siliques_P Parameter: Tissue Value: Less Than 5mm Siliques vs. Whole Plant
  misc_feature: MA Experiment ID: 20000264 Result: Down-regulated in Transcription
  misc_feature: MA Experiment 20000264 PARAMETER Experiment Name: At_Open_Flower_P Parameter: Age (day) Value: 21
  misc_feature: MA Experiment 20000264 PARAMETER Experiment Name: At_Open_Flower_P Parameter: Plant Line Value: WS
  misc_feature: MA Experiment 20000264 PARAMETER Experiment Name: At_Open_Flower_P Parameter: Tissue Value: Open Flower vs. Whole Plant
  misc_feature: MA Experiment ID: 20000265 Result: Down-regulated in Transcription
  misc_feature: MA Experiment 20000265 PARAMETER Experiment Name: At_Open_Flower_P Parameter: Age (day) Value: 21
  misc_feature: MA Experiment 20000265 PARAMETER Experiment Name: At_Open_Flower_P Parameter: Plant Line Value: WS
  misc_feature: MA Experiment 20000265 PARAMETER Experiment Name: At_Open_Flower_P Parameter: Tissue Value: Closed Flower vs. Whole Plant
  misc_feature: MA Experiment ID: 20000267 Result: Down-regulated in Transcription
  misc_feature: MA Experiment 20000267 PARAMETER Experiment Name: At_Drought_P Parameter: Age (day) Value: 7
  misc_feature: MA Experiment 20000267 PARAMETER Experiment Name: At_Drought_P Parameter: Organism Value: A. thaliana
  misc_feature: MA Experiment 20000267 PARAMETER Experiment Name: At_Drought_P Parameter: Plant Line Value: WS
  misc_feature: MA Experiment 20000267 PARAMETER Experiment Name: At_Drought_P Parameter: Timepoint (hr) Value: 6
  misc_feature: MA Experiment 20000267 PARAMETER Experiment Name: At_Drought_P Parameter: Tissue Value: Whole Plant
  misc_feature: MA Experiment 20000267 PARAMETER Experiment Name: At_Drought_P Parameter: Treatment Value: Drought vs. No Drought
  misc_feature: MA Experiment ID: 20000268 Result: Down-regulated in Transcription
  misc_feature: MA Experiment 20000268 PARAMETER Experiment Name: At_100mM_NaCl__P Parameter: Age (day) Value: 14
  misc_feature: MA Experiment 20000268 PARAMETER Experiment Name: At_100mM_NaCl__P Parameter: Organism Value: A. thaliana
  misc_feature: MA Experiment 20000268 PARAMETER Experiment Name: At_100mM_NaCl__P Parameter: Plant Line Value: WS
  misc_feature: MA Experiment 20000268 PARAMETER Experiment Name: At_100mM_NaCl__P Parameter: Timepoint (hr) Value: 6
  misc_feature: MA Experiment 20000268 PARAMETER Experiment Name: At_100mM_NaCl__P Parameter: Tissue Value: Whole Plant
  misc_feature: MA Experiment 20000268 PARAMETER Experiment Name: At_100mM_NaCl__P Parameter: Treatment Value: 100mM NaCl vs. No Treatment
  misc_feature: MA Experiment ID: 20000308 Result: Down-regulated in Transcription
  misc_feature: MA Experiment 20000308 PARAMETER Experiment Name: At_100mM_NaCl__P Parameter: Age (day) Value: 17
  misc_feature: MA Experiment 20000308 PARAMETER Experiment Name: At_100mM_NaCl__P Parameter: Organism Value: A. thaliana
  misc_feature: MA Experiment 20000308 PARAMETER Experiment Name: At_100mM_NaCl__P Parameter: Plant Line Value: WS
  misc_feature: MA Experiment 20000308 PARAMETER Experiment Name: At_100mM_NaCl__P Parameter: Timepoint (hr) Value: 72
  misc_feature: MA Experiment 20000308 PARAMETER Experiment Name: At_100mM_NaCl__P Parameter: Tissue Value: Whole Plant
  misc_feature: MA Experiment 20000308 PARAMETER Experiment Name: At_100mM_NaCl__P Parameter: Treatment Value: 100mM NaCl vs. No Treatment
  misc_feature: MA Experiment ID: 20000436 Result: Down-regulated in Transcription
  misc_feature: MA Experiment 20000436 PARAMETER Experiment Name: At_Drought_P Parameter: Age (day) Value: 7
  misc_feature: MA Experiment 20000436 PARAMETER Experiment Name: At_Drought_P Parameter: Organism Value: A. thaliana
  misc_feature: MA Experiment 20000436 PARAMETER Experiment Name: At_Drought_P Parameter: Plant Line Value: WS
  misc_feature: MA Experiment 20000436 PARAMETER Experiment Name: At_Drought_P Parameter: Timepoint (hr) Value: 12
  misc_feature: MA Experiment 20000436 PARAMETER Experiment Name: At_Drought_P Parameter: Tissue Value: Whole Plant
  misc_feature: MA Experiment 20000436 PARAMETER Experiment Name: At_Drought_P Parameter: Treatment Value: Drought vs. No Drought
  misc_feature: MA Experiment ID: 20000437 Result: Down-regulated in Transcription
  misc_feature: MA Experiment 20000437 PARAMETER Experiment Name: At_Drought_P Parameter: Age (day) Value: 8
  misc_feature: MA Experiment 20000437 PARAMETER Experiment Name: At_Drought_P Parameter: Organism Value: A. thaliana
  misc_feature: MA Experiment 20000437 PARAMETER Experiment Name: At_Drought_P Parameter: Plant Line Value: WS
  misc_feature: MA Experiment 20000437 PARAMETER Experiment Name: At_Drought_P Parameter: Timepoint (hr) Value: 24
  misc_feature: MA Experiment 20000437 PARAMETER Experiment Name: At_Drought_P Parameter: Tissue Value: Whole Plant
  misc_feature: MA Experiment 20000437 PARAMETER Experiment Name: At_Drought_P Parameter: Treatment Value: Drought vs. No Drought
  misc_feature: MA Experiment ID: 20000439 Result: Down-regulated in Transcription
  misc_feature: MA Experiment 20000439 PARAMETER Experiment Name: At_Roots__P Parameter: Age (day) Value: 14 vs. 21
  misc_feature: MA Experiment 20000439 PARAMETER Experiment Name: At_Roots__P Parameter: Organism Value: A. thaliana
  misc_feature: MA Experiment 20000439 PARAMETER Experiment Name: At_Roots__P Parameter: Tissue Value: Roots vs. Whole Plant
  misc_feature: MA Experiment ID: 20000453 Result: Down-regulated in Transcription
  misc_feature: MA Experiment 20000453 PARAMETER Experiment Name: At_100uM_ABA_P Parameter: Age (day) Value: 15
  misc_feature: MA Experiment 20000453 PARAMETER Experiment Name: At_100uM_ABA_P Parameter: Organism Value: A. thaliana
  misc_feature: MA Experiment 20000453 PARAMETER Experiment Name: At_100uM_ABA_P Parameter: Plant Line Value: WS
  misc_feature: MA Experiment 20000453 PARAMETER Experiment Name: At_100uM_ABA_P Parameter: Timepoint (hr) Value: 24
  misc_feature: MA Experiment 20000453 PARAMETER Experiment Name: At_100uM_ABA_P Parameter: Tissue Value: Aerial
  misc_feature: MA Experiment 20000453 PARAMETER Experiment Name: At_100uM_ABA_P Parameter: Treatment Value: 100uM ABA vs. No Treatment
  misc_feature: MA Experiment ID: 20000455 Result: Down-regulated in Transcription
  misc_feature: MA Experiment 20000455 PARAMETER Experiment Name: At_100uM_ABA_P Parameter: Age (day) Value: 16
  misc_feature: MA Experiment 20000455 PARAMETER Experiment Name: At_100uM_ABA_P Parameter: Organism Value: A. thaliana
  misc_feature: MA Experiment 20000455 PARAMETER Experiment Name: At_100uM_ABA_P Parameter: Plant Line Value: WS
  misc_feature: MA Experiment 20000455 PARAMETER Experiment Name: At_100uM_ABA_P Parameter: Timepoint (hr) Value: 48
  misc_feature: MA Experiment 20000455 PARAMETER Experiment Name: At_100uM_ABA_P Parameter: Tissue Value: Aerial
  misc_feature: MA Experiment 20000455 PARAMETER Experiment Name: At_100uM_ABA_P Parameter: Treatment Value: 100uM ABA vs. No Treatment
  misc_feature: MA Experiment ID: 20001450 Result: Up-regulated in Transcription
  misc_feature: MA Experiment 20001450 PARAMETER Experiment Name: At_Far-red-induction_P Parameter: Age (day) Value: 7
  misc_feature: MA Experiment 20001450 PARAMETER Experiment Name: At_Far-red-induction_P Parameter: Light Value: Far-red vs. White
  misc_feature: MA Experiment 20001450 PARAMETER Experiment Name: At_Far-red-induction_P Parameter: Organism Value: A. thaliana
  misc_feature: MA Experiment 20001450 PARAMETER Experiment Name: At_Far-red-induction_P Parameter: Plant Line Value: Columbia
  misc_feature: MA Experiment 20001450 PARAMETER Experiment Name: At_Far-red-induction_P Parameter: Timepoint (hr) Value: 8
  misc_feature: MA Experiment 20001450 PARAMETER Experiment Name: At_Far-red-induction_P Parameter: Tissue Value: Whole Plant
  misc_feature: MA Experiment ID: 20001451 Result: Up-regulated in Transcription
  misc_feature: MA Experiment 20001451 PARAMETER Experiment Name: At_Far-red-induction_P Parameter: Age (day) Value: 7
  misc_feature: MA Experiment 20001451 PARAMETER Experiment Name: At_Far-red-induction_P Parameter: Light Value: Far-red vs. White
  misc_feature: MA Experiment 20001451 PARAMETER Experiment Name: At_Far-red-induction_P Parameter: Organism Value: A. thaliana
  misc_feature: MA Experiment 20001451 PARAMETER Experiment Name: At_Far-red-induction_P Parameter: Plant Line Value: Columbia
  misc_feature: MA Experiment 20001451 PARAMETER Experiment Name: At_Far-red-induction_P Parameter: Timepoint (hr) Value: 24
  misc_feature: MA Experiment 20001451 PARAMETER Experiment Name: At_Far-red-induction_P Parameter: Tissue Value: Whole Plant
  misc_feature: MA Experiment ID: 20001554 Result: Down-regulated in Transcription
  misc_feature: MA Experiment 20001554 PARAMETER Experiment Name: At_Drought_Soil_Dry_P Parameter: Age (day) Value: 21
  misc_feature: MA Experiment 20001554 PARAMETER Experiment Name: At_Drought_Soil_Dry_P Parameter: Organism Value: A. thaliana
  misc_feature: MA Experiment 20001554 PARAMETER Experiment Name: At_Drought_Soil_Dry_P Parameter: Plant Line Value: WS
  misc_feature: MA Experiment 20001554 PARAMETER Experiment Name: At_Drought_Soil_Dry_P Parameter: Post Timepoint (hr) Value: None
  misc_feature: MA Experiment 20001554 PARAMETER Experiment Name: At_Drought_Soil_Dry_P Parameter: Post-Treatment Value: None
  misc_feature: MA Experiment 20001554 PARAMETER Experiment Name: At_Drought_Soil_Dry_P Parameter: Timepoint (day) Value: 7
  misc_feature: MA Experiment 20001554 PARAMETER Experiment Name: At_Drought_Soil_Dry_P Parameter: Treatment Value: Drought vs. No Drought
  misc_feature: MA Experiment ID: 20001555 Result: Down-regulated in Transcription
  misc_feature: MA Experiment 20001555 PARAMETER Experiment Name: At_Drought_Soil_Dry_P Parameter: Age (day) Value: 24
  misc_feature: MA Experiment 20001555 PARAMETER Experiment Name: At_Drought_Soil_Dry_P Parameter: Organism Value: A. thaliana
  misc_feature: MA Experiment 20001555 PARAMETER Experiment Name: At_Drought_Soil_Dry_P Parameter: Plant Line Value: WS
  misc_feature: MA Experiment 20001555 PARAMETER Experiment Name: At_Drought_Soil_Dry_P Parameter: Post Timepoint (hr) Value: None
  misc_feature: MA Experiment 20001555 PARAMETER Experiment Name: At_Drought_Soil_Dry_P Parameter: Post-Treatment Value: None
  misc_feature: MA Experiment 20001555 PARAMETER Experiment Name: At_Drought_Soil_Dry_P Parameter: Timepoint (day) Value: 10
  misc_feature: MA Experiment 20001555 PARAMETER Experiment Name: At_Drought_Soil_Dry_P Parameter: Treatment Value: Drought vs. No Drought
  misc_feature: MA Experiment ID: 20001556 Result: Down-regulated in Transcription
  misc_feature: MA Experiment 20001556 PARAMETER Experiment Name: At_Drought_Soil_Dry_P Parameter: Age (day) Value: 26
  misc_feature: MA Experiment 20001556 PARAMETER Experiment Name: At_Drought_Soil_Dry_P Parameter: Organism Value: A. thaliana
  misc_feature: MA Experiment 20001556 PARAMETER Experiment Name: At_Drought_Soil_Dry_P Parameter: Plant Line Value: WS
  misc_feature: MA Experiment 20001556 PARAMETER Experiment Name: At_Drought_Soil_Dry_P Parameter: Post Timepoint (hr) Value: None
  misc_feature: MA Experiment 20001556 PARAMETER Experiment Name: At_Drought_Soil_Dry_P Parameter: Post-Treatment Value: None
  misc_feature: MA Experiment 20001556 PARAMETER Experiment Name: At_Drought_Soil_Dry_P Parameter: Timepoint (day) Value: 12
  misc_feature: MA Experiment 20001556 PARAMETER Experiment Name: At_Drought_Soil_Dry_P Parameter: Treatment Value: Drought vs. No Drought
  misc_feature: MA Experiment ID: 20001757 Result: Up-regulated in Transcription
  misc_feature: MA Experiment 20001757 PARAMETER Experiment Name: At_50mM_NH4NO3_L-to-H_P Parameter: Timepoint (hr) Value: 6
  misc_feature: MA Experiment 20001757 PARAMETER Experiment Name: At_50mM_NH4NO3_L-to-H_P Parameter: Tissue Value: Leaf
  misc_feature: MA Experiment 20001757 PARAMETER Experiment Name: At_50mM_NH4NO3_L-to-H_P Parameter: Treatment Value: 50mM NH4NO3 vs 100mM Mannitol
  misc_feature: MA Experiment ID: 20001904 Result: Down-regulated in Transcription
  misc_feature: MA Experiment 20001904 PARAMETER Experiment Name: At_Drought_Reproduction_P Parameter: Age (day) Value: 37
  misc_feature: MA Experiment 20001904 PARAMETER Experiment Name: At_Drought_Reproduction_P Parameter: Organism Value: A. thaliana
  misc_feature: MA Experiment 20001904 PARAMETER Experiment Name: At_Drought_Reproduction_P Parameter: Plant Line Value: WS
  misc_feature: MA Experiment 20001904 PARAMETER Experiment Name: At_Drought_Reproduction_P Parameter: Timepoint (day) Value: 7
  misc_feature: MA Experiment 20001904 PARAMETER Experiment Name: At_Drought_Reproduction_P Parameter: Tissue Value: Rosettes
  misc_feature: MA Experiment 20001904 PARAMETER Experiment Name: At_Drought_Reproduction_P Parameter: Treatment Value: Drought vs. No Drought
  misc_feature: MA Experiment ID: 20001906 Result: Down-regulated in Transcription
  misc_feature: MA Experiment 20001906 PARAMETER Experiment Name: At_Drought_Reproduction_P Parameter: Age (day) Value: 35
  misc_feature: MA Experiment 20001906 PARAMETER Experiment Name: At_Drought_Reproduction_P Parameter: Organism Value: A. thaliana
  misc_feature: MA Experiment 20001906 PARAMETER Experiment Name: At_Drought_Reproduction_P Parameter: Plant Line Value: WS
  misc_feature: MA Experiment 20001906 PARAMETER Experiment Name: At_Drought_Reproduction_P Parameter: Timepoint (day) Value: 5
  misc_feature: MA Experiment 20001906 PARAMETER Experiment Name: At_Drought_Reproduction_P Parameter: Tissue Value: Siliques
  misc_feature: MA Experiment 20001906 PARAMETER Experiment Name: At_Drought_Reproduction_P Parameter: Treatment Value: Drought vs. No Drought
gatggaaaaagttttctccgacgaagaaatctccggtaaccatcactggtcggttaatggaatgacgtcgttgaatcgcagtgcttccgaatgggcattcaatcgtttcatacaagaatcctccgccgctgcagacgacggagaatctacgacggcgtgtggtgtttccgtctcctctcctcctaatgttcctgtagattcagaggaatacagagcatttctcaagagtaaacttaatcttgcttgtgctgctgtcgccatgaaaaggggaactttcatcaaacctcaggatacttctggtagatctgacaatggtggagccaatgaatcagaacaagcctctcttgcttcttccaaagctacaccaatgatgagcagtgctataacaagtggatctgagctctctggtgatgaagaagaagctgatggtgaaactaatatgaaccctactaatgttaaacgcgttaaaaggatgctctctaatagagaatcagctagacggtccagaagaagaaagcaagcacacttgagtgagctagagacacaagtttcacagcttcgtgtagagaattcaaaactcatgaagggtctcactgatgtaactcaaacattcaatgatgcatctgtagaaaacagagttttaaaagccaatattgagacactacgagcaaaggtgaaaatggctgaagagacagtgaagagactcactggctttaacccaatgttccacaatatgcctcagattgtttcaactgtctctcttccttcagagacatcaaattctccagacactacaagcagccaagtgactacaccagagatcattagctcggggaacaaaggcaaggccttgatagggtgcaagatgaacagaacagcttcgatgcgtagagttgagagcttggaacatctgcagaaacgtattcgaagcgttggggatcagtag

SEQ ID NO: 77307 - protein, 314 aa, Arabidopsis thaliana
  peptide (1)..(314): Ceres Seq. ID no. 12575189
  misc_feature (149)..(213): Pfam Name: bZIP transcription factor Pfam Description: bZIP transcription factor
  misc_feature (1)..(314): Homolog of NCBI NO: 30691978 NR Description: bZIP family transcription factor [Arabidopsis
  misc_feature (1)..(314): Homolog of NCBI NO: 7682779 NR Description: Hypothetical protein T32B20.c [Arabidopsis
  misc_feature (1)..(314): Homolog of NCBI NO: 30691973 NR Description: bZIP family transcription factor [Arabidopsis >gi|15450641|gb|AAK96592.1| AT5g28770/T32B20_60 [Arabidopsis >gi|17386126|gb|AAL38609.1|AF446876_1 AT5g28770/T32B20_60
  misc_feature (1)..(191): Homolog of NCBI NO: 10954099 NR Description: bZIP protein BZO2H3 [Arabidopsis thaliana]
  misc_feature (107)..(270): Homolog of NCBI NO: 100163 NR Description: light-induced protein CPRF-2 - parsley
  misc_feature (107)..(270): Homolog of NCBI NO: 2842757 NR Description: Light-inducible protein CPRF-2
  misc_feature (122)..(272): Homolog of NCBI NO: 542188 NR Description: OHP2 protein - maize >gi|168428|gb|AAA33439.1|
  misc_feature (23)..(99): Homolog of NCBI NO: 542188 NR Description: OHP2 protein - maize >gi|168428|gb|AAA33439.1|
  misc_feature (58)..(314): Homolog of NCBI NO: 30694089 NR Description: bZIP transcription factor-related protein
MEKVFSDEEISGNHHWSVNGMTSLNRSASEWAFNRFIQESSAAADDGESTTACGVSVSSPPNVPVDSEEYRAFLKSKLNLACAAVAMKRGTFIKPQDTSGRSDNGGANESEQASLASSKATPMMSSAITSGSELSGDEEEADGETNMNPTNVKRVKRMLSNRESARRSRRRKQAHLSELETQVSQLRVENSKLMKGLTDVTQTFNDASVENRVLKANIETLRAKVKMAEETVKRLTGFNPMFHNMPQIVSTVSLPSETSNSPDTTSSQVTTPEIISSGNKGKALIGCKMNRTASMRRVESLEHLQKRIRSVGDQ

SEQ ID NO: 77308 - protein, 294 aa, Arabidopsis thaliana
  peptide (1)..(294): Ceres Seq. ID no. 12575190
  misc_feature (129)..(193): Pfam Name: bZIP transcription factor Pfam Description: bZIP transcription factor
  misc_feature (1)..(294): Homolog of NCBI NO: 30691978 NR Description: bZIP family transcription factor [Arabidopsis
  misc_feature (1)..(294): Homolog of NCBI NO: 7682779 NR Description: Hypothetical protein T32B20.c [Arabidopsis
  misc_feature (1)..(294): Homolog of NCBI NO: 30691973 NR Description: bZIP family transcription factor [Arabidopsis >gi|15450641|gb|AAK96592.1| AT5g28770/T32B20_60 [Arabidopsis >gi|17386126|gb|AAL38609.1|AF446876_1 AT5g28770/T32B20_60
  misc_feature (1)..(171): Homolog of NCBI NO: 10954099 NR Description: bZIP protein BZO2H3 [Arabidopsis thaliana]
  misc_feature (87)..(250): Homolog of NCBI NO: 100163 NR Description: light-induced protein CPRF-2 - parsley
  misc_feature (87)..(250): Homolog of NCBI NO: 2842757 NR Description: Light-inducible protein CPRF-2
  misc_feature (102)..(252): Homolog of NCBI NO: 542188 NR Description: OHP2 protein - maize >gi|168428|gb|AAA33439.1|
  misc_feature (3)..(79): Homolog of NCBI NO: 542188 NR Description: OHP2 protein - maize >gi|168428|gb|AAA33439.1|
  misc_feature (38)..(294): Homolog of NCBI NO: 30694089 NR Description: bZIP transcription factor-related protein
MTSLNRSASEWAFNRFIQESSAAADDGESTTACGVSVSSPPNVPVDSEEYRAFLKSKLNLACAAVAMKRGTFIKPQDTSGRSDNGGANESEQASLASSKATPMMSSAITSGSELSGDEEEADGETNMNPTNVKRVKRMLSNRESARRSRRRKQAHLSELETQVSQLRVENSKLMKGLTDVTQTFNDASVENRVLKANIETLRAKVKMAEETVKRLTGFNPMFHNMPQIVSTVSLPSETSNSPDTTSSQVTTPEIISSGNKGKALIGCKMNRTASMRRVESLEHLQKRIRSVGDQ

SEQ ID NO: 77309 - protein, 228 aa, Arabidopsis thaliana
  peptide (1)..(228): Ceres Seq. ID no. 12575191
  misc_feature (63)..(127): Pfam Name: bZIP transcription factor Pfam Description: bZIP transcription factor
  misc_feature (1)..(228): Homolog of NCBI NO: 30691978 NR Description: bZIP family transcription factor [Arabidopsis
  misc_feature (1)..(228): Homolog of NCBI NO: 7682779 NR Description: Hypothetical protein T32B20.c [Arabidopsis
  misc_feature (1)..(228): Homolog of NCBI NO: 30691973 NR Description: bZIP family transcription factor [Arabidopsis >gi|15450641|gb|AAK96592.1| AT5g28770/T32B20_60 [Arabidopsis >gi|17386126|gb|AAL38609.1|AF446876_1 AT5g28770/T32B20_60
  misc_feature (1)..(105): Homolog of NCBI NO: 10954099 NR Description: bZIP protein BZO2H3 [Arabidopsis thaliana]
  misc_feature (21)..(184): Homolog of NCBI NO: 100163 NR Description: light-induced protein CPRF-2 - parsley
  misc_feature (21)..(184): Homolog of NCBI NO: 2842757 NR Description: Light-inducible protein CPRF-2
  misc_feature (36)..(186): Homolog of NCBI NO: 542188 NR Description: OHP2 protein - maize >gi|168428|gb|AAA33439.1|
  misc_feature (1)..(13): Homolog of NCBI NO: 542188 NR Description: OHP2 protein - maize >gi|168428|gb|AAA33439.1|
  misc_feature (1)..(228): Homolog of NCBI NO: 30694089 NR Description: bZIP transcription factor-related protein
MKRGTFIKPQDTSGRSDNGGANESEQASLASSKATPMMSSAITSGSELSGDEEEADGETNMNPTNVKRVKRMLSNRESARRSRRRKQAHLSELETQVSQLRVENSKLMKGLTDVTQTFNDASVENRVLKANIETLRAKVKMAEETVKRLTGFNPMFHNMPQIVSTVSLPSETSNSPDTTSSQVTTPEIISSGNKGKALIGCKMNRTASMRRVESLEHLQKRIRSVGDQ

SEQ ID NO: 77310 - DNA, 1983 bp, Arabidopsis thaliana
  misc_feature (1)..(1983): Ceres Seq. ID no. 12575255
  misc_feature: MA Experiment ID: 20000180 Result: Up-regulated in Transcription
  misc_feature: MA Experiment 20000180 PARAMETER Experiment Name: At_Germinating_Seeds_P Parameter: Age (hr) Value: 24 vs. 0
  misc_feature: MA Experiment 20000180 PARAMETER Experiment Name: At_Germinating_Seeds_P Parameter: Tissue Value: Germinating Seeds
  misc_feature: MA Experiment ID: 20000184 Result: Down-regulated in Transcription
  misc_feature: MA Experiment 20000184 PARAMETER Experiment Name: At_Shoots__P Parameter: Age (day) Value: 7
  misc_feature: MA Experiment 20000184 PARAMETER Experiment Name: At_Shoots__P Parameter: Tissue Value: Shoots vs. Whole Plant
  misc_feature: MA Experiment ID: 20000438 Result: Down-regulated in Transcription
  misc_feature: MA Experiment 20000438 PARAMETER Experiment Name: At_Shoots__P Parameter: Age (day) Value: 14
  misc_feature: MA Experiment 20000438 PARAMETER Experiment Name: At_Shoots__P Parameter: Tissue Value: Shoots vs. Whole Plant
  misc_feature: MA Experiment ID: 20000794 Result: Up-regulated in Transcription
  misc_feature: MA Experiment 20000794 PARAMETER Experiment Name: At_Petals_P Parameter: Age (day) Value: 23-25 days
  misc_feature: MA Experiment 20000794 PARAMETER Experiment Name: At_Petals_P Parameter: Plant Line Value: WS
  misc_feature: MA Experiment 20000794 PARAMETER Experiment Name: At_Petals_P Parameter: Tissue Value: Petals vs. Whole plant
atccaaaatactgattagtgtctgttttaaatgatcctaccttataaaaacgacgacacatctctctctcgtcttcttcttcctctaaacctgtgaaaaactttggatcaatcaacaatggcggatctctctcttcctcccgattccctcttcctcggcttcgacagctctacccagtcaatgaaagcaactgtgttggattcgaacctgaacattatcaaaaccgaactcgttcatttcgattctgatcttcctcaatacaaaaccaaagacggggtttacagagacactactgtaaacggaagaatcgtatctccaactctcatgtgggtcgaagcatttgatctcattctccagaagctctctaacgccaatttcgatttcgccaaagttatcgctgtttcaggcagcgggcaacaacacggtagtgtgtattggtcaaaaggtagttctgaggtattgagatcattggattcaaagagatcattgaaagaacaactcgaaaacgctttttcggttaaggaatctcctatatggatggatagtagtactacattgcaatgtaaagagattgagaatgctgttggtggagctatggagttgtcgaagatcactggctctcgtgcttatgagcggtttactggtccgcagatacggaagctttttatgactcagggggaggtgtataagagcacggagaggatttcgcttgttagctcttttatggcgtctttgttggttggagattatgcttgtattgatgaaactgatgctgctgggatgaatttgatggatattgagaaacgttgttggtctaaagctgcgttagaggctacagcgacaggtttggaggagaaacttgggaagttagctccagcttatgctactgctggttctatttctcagtattttgttcagaggttcggttttgaaaagaactgtgtggttgtgcagtggtcgggagataatcctaatagcttggcaggtctaactcttagtactcctggagatctggcgatcagtcttggaaccagtgacacggtatttgggattaccaaagaacttcaacccagtcttgagggtcatgtgttacctaatcctgtggaccctgagagttatatggtgatgttggtttacaagaatgcttctctcacccgggaagaaattcgtgaccgttgtgctgagggatcttgggatgtttttaataagtatttgcagcaaacacagccactaaacaatgggaaactcggcttctactacactgaaaatgaaattctgcccccacttcccgttggctctcatcgttacattcttgagaacttctctggtgagtctcttgagggtgtgaaggaacaagaggtcggtgagttcgaccctccctcagaggttagggcattgattgaaggtcagtttctttcaaagcgggctcatactgagagatttggtatgccctcccctcccctccgaataatagcaaccggaggtgcatctgctaacgagaatatcttgagtctgatctcagcaatcttcggatgtgatgtatatactgtccaaaggcctgattcagcatcacttggagctgcactaagagctgctcatggctggctctgcaacaaaaaaggaagctttgtaccaatctcaaatctctacgaagggaaattggaaacaacatctctgaactgcaagctcaaggtaaaagcaggagacgcgaacattgcttccacctatggtttgttgatgaagaagaggatggaaatagagaacaagcttgtggagaagttaggccacttctgagaagaaaaaaactcactactcaataattcaaataacttaaagagttgaaagaataacaagttctatctactaaaactaaaagacaagtttgcttgttgctcaaaataaaagcagaatacgatcttacgatctctgagtaacaaatgattcgtaagacattgctcttaatctagtttatgtcatacactt

SEQ ID NO: 77311 - protein, 558 aa, Arabidopsis thaliana
  peptide (1)..(558): Ceres Seq. ID no. 12575256
  misc_feature (11)..(290): Pfam Name: FGGY family of carbohydrate kinases, N-terminal domain Pfam Description: FGGY family of carbohydrate kinases, N-terminal
  misc_feature (1)..(558): Homolog of NCBI NO: 15240526 NR Description: xylulose kinase; protein id: At5g49650.1, by cDNA: gi_15292818 [Arabidopsis thaliana] putative xylulose kinase [Arabidopsis thaliana]
  misc_feature (1)..(558): Homolog of NCBI NO: 8809688 NR Description: xylulose kinase [Arabidopsis thaliana]
  misc_feature (5)..(556): Homolog of NCBI NO: 23237892 NR Description: putative xylulose kinase [Oryza sativa (japonica group)] >gi|27261103|dbj|BAC45216.1| putative xylulose kinase
  misc_feature (13)..(495): Homolog of NCBI NO: 19343554 NR Description: Similar to xylulokinase homolog (H. influenzae)
  misc_feature (13)..(495): Homolog of NCBI NO: 34866669 NR Description: similar to xylulokinase homolog; xylulokinase (H.
  misc_feature (8)..(510): Homolog of NCBI NO: 18860918 NR Description: xylulokinase homolog; xylulokinase (H.
  misc_feature (8)..(510): Homolog of NCBI NO: 3298502 NR Description: xylulokinase [Homo sapiens]
  misc_feature (7)..(505): Homolog of NCBI NO: 21356607 NR Description: CG3534-PA [Drosophila melanogaster]
  misc_feature (12)..(497): Homolog of NCBI NO: 17554530 NR Description: Predicted CDS, carbohydrate kinase like elegans] >gi|732210|sp|P30646|YNE7_CAEEL Hypothetical 60.3 kDa
  misc_feature (12)..(494): Homolog of NCBI NO: 39585048 NR Description: Hypothetical protein CBG06848 [Caenorhabditis
MADLSLPPDSLFLGFDSSTQSMKATVLDSNLNIIKTELVHFDSDLPQYKTKDGVYRDTTVNGRIVSPTLMWVEAFDLILQKLSNANFDFAKVIAVSGSGQQHGSVYWSKGSSEVLRSLDSKRSLKEQLENAFSVKESPIWMDSSTTLQCKEIENAVGGAMELSKITGSRAYERFTGPQIRKLFMTQGEVYKSTERISLVSSFMASLLVGDYACIDETDAAGMNLMDIEKRCWSKAALEATATGLEEKLGKLAPAYATAGSISQYFVQRFGFEKNCVVVQWSGDNPNSLAGLTLSTPGDLAISLGTSDTVFGITKELQPSLEGHVLPNPVDPESYMVMLVYKNASLTREEIRDRCAEGSWDVFNKYLQQTQPLNNGKLGFYYTENEILPPLPVGSHRYILENFSGESLEGVKEQEVGEFDPPSEVRALIEGQFLSKRAHTERFGMPSPPLRIIATGGASANENILSLISAIFGCDVYTVQRPDSASLGAALRAAHGWLCNKKGSFVPISNLYEGKLETTSLNCKLKVKAGDANIASTYGLLMKKRMEIENKLVEKLGHF

SEQ ID NO: 77312 - protein, 537 aa, Arabidopsis thaliana
  peptide (1)..(537): Ceres Seq. ID no. 12575257
  misc_feature (1)..(269): Pfam Name: FGGY family of carbohydrate kinases, N-terminal domain Pfam Description: FGGY family of carbohydrate kinases, N-terminal
  misc_feature (1)..(537): Homolog of NCBI NO: 15240526 NR Description: xylulose kinase; protein id: At5g49650.1, by cDNA: gi_15292818 [Arabidopsis thaliana] putative xylulose kinase [Arabidopsis thaliana]
  misc_feature (1)..(537): Homolog of NCBI NO: 8809688 NR Description: xylulose kinase [Arabidopsis thaliana]
  misc_feature (1)..(535): Homolog of NCBI NO: 23237892 NR Description: putative xylulose kinase [Oryza sativa (japonica group)] >gi|27261103|dbj|BAC45216.1| putative xylulose kinase
  misc_feature (1)..(474): Homolog of NCBI NO: 19343554 NR Description: Similar to xylulokinase homolog (H. influenzae)
  misc_feature (1)..(474): Homolog of NCBI NO: 34866669 NR Description: similar to xylulokinase homolog; xylulokinase (H.
  misc_feature (1)..(489): Homolog of NCBI NO: 18860918 NR Description: xylulokinase homolog; xylulokinase (H.
  misc_feature (1)..(489): Homolog of NCBI NO: 3298502 NR Description: xylulokinase [Homo sapiens]
  misc_feature (1)..(484): Homolog of NCBI NO: 21356607 NR Description: CG3534-PA [Drosophila melanogaster]
  misc_feature (1)..(476): Homolog of NCBI NO: 17554530 NR Description: Predicted CDS, carbohydrate kinase like elegans] >gi|732210|sp|P30646|YNE7_CAEEL Hypothetical 60.3 kDa
  misc_feature (1)..(473): Homolog of NCBI NO: 39585048 NR Description: Hypothetical protein CBG06848 [Caenorhabditis
MKATVLDSNLNIIKTELVHFDSDLPQYKTKDGVYRDTTVNGRIVSPTLMWVEAFDLILQKLSNANFDFAKVIAVSGSGQQHGSVYWSKGSSEVLRSLDSKRSLKEQLENAFSVKESPIWMDSSTTLQCKEIENAVGGAMELSKITGSRAYERFTGPQIRKLFMTQGEVYKSTERISLVSSFMASLLVGDYACIDETDAAGMNLMDIEKRCWSKAALEATATGLEEKLGKLAPAYATAGSISQYFVQRFGFEKNCVVVQWSGDNPNSLAGLTLSTPGDLAISLGTSDTVFGITKELQPSLEGHVLPNPVDPESYMVMLVYKNASLTREEIRDRCAEGSWDVFNKYLQQTQPLNNGKLGFYYTENEILPPLPVGSHRYILENFSGESLEGVKEQEVGEFDPPSEVRALIEGQFLSKRAHTERFGMPSPPLRIIATGGASANENILSLISAIFGCDVYTVQRPDSASLGAALRAAHGWLCNKKGSFVPISNLYEGKLETTSLNCKLKVKAGDANIASTYGLLMKKRMEIENKLVEKLGHF

SEQ ID NO: 77313 - protein, 489 aa, Arabidopsis thaliana
  peptide (1)..(489): Ceres Seq. ID no. 12575258
  misc_feature (1)..(221): Pfam Name: FGGY family of carbohydrate kinases, N-terminal domain Pfam Description: FGGY family of carbohydrate kinases, N-terminal
  misc_feature (1)..(489): Homolog of NCBI NO: 15240526 NR Description: xylulose kinase; protein id: At5g49650.1, by cDNA: gi_15292818 [Arabidopsis thaliana] putative xylulose kinase [Arabidopsis thaliana]
  misc_feature (1)..(489): Homolog of NCBI NO: 8809688 NR Description: xylulose kinase [Arabidopsis thaliana]
  misc_feature (1)..(487): Homolog of NCBI NO: 23237892 NR Description: putative xylulose kinase [Oryza sativa (japonica group)] >gi|27261103|dbj|BAC45216.1| putative xylulose kinase
  misc_feature (1)..(426): Homolog of NCBI NO: 19343554 NR Description: Similar to xylulokinase homolog (H. influenzae)
  misc_feature (1)..(426): Homolog of NCBI NO: 34866669 NR Description: similar to xylulokinase homolog; xylulokinase (H.
  misc_feature (1)..(441): Homolog of NCBI NO: 18860918 NR Description: xylulokinase homolog; xylulokinase (H.
  misc_feature (1)..(441): Homolog of NCBI NO: 3298502 NR Description: xylulokinase [Homo sapiens]
  misc_feature (1)..(436): Homolog of NCBI NO: 21356607 NR Description: CG3534-PA [Drosophila melanogaster]
  misc_feature (1)..(428): Homolog of NCBI NO: 17554530 NR Description: Predicted CDS, carbohydrate kinase like elegans] >gi|732210|sp|P30646|YNE7_CAEEL Hypothetical 60.3 kDa
  misc_feature (1)..(425): Homolog of NCBI NO: 39585048 NR Description: Hypothetical protein CBG06848 [Caenorhabditis
MWVEAFDLILQKLSNANFDFAKVIAVSGSGQQHGSVYWSKGSSEVLRSLDSKRSLKEQLENAFSVKESPIWMDSSTTLQCKEIENAVGGAMELSKITGSRAYERFTGPQIRKLFMTQGEVYKSTERISLVSSFMASLLVGDYACIDETDAAGMNLMDIEKRCWSKAALEATATGLEEKLGKLAPAYATAGSISQYFVQRFGFEKNCVVVQWSGDNPNSLAGLTLSTPGDLAISLGTSDTVFGITKELQPSLEGHVLPNPVDPESYMVMLVYKNASLTREEIRDRCAEGSWDVFNKYLQQTQPLNNGKLGFYYTENEILPPLPVGSHRYILENFSGESLEGVKEQEVGEFDPPSEVRALIEGQFLSKRAHTERFGMPSPPLRIIATGGASANENILSLISAIFGCDVYTVQRPDSASLGAALRAAHGWLCNKKGSFVPISNLYEGKLETTSLNCKLKVKAGDANIASTYGLLMKKRMEIENKLVEKLGHF

SEQ ID NO: 77314 - DNA, 2264 bp, Arabidopsis thaliana
  misc_feature (1)..(2264): Ceres Seq. ID no. 12575298
  misc_feature: MA Experiment ID: 20000180 Result: Down-regulated in Transcription
  misc_feature: MA Experiment 20000180 PARAMETER Experiment Name: At_Germinating_Seeds_P Parameter: Age (hr) Value: 24 vs. 0
  misc_feature: MA Experiment 20000180 PARAMETER Experiment Name: At_Germinating_Seeds_P Parameter: Tissue Value: Germinating Seeds
ggcgcaacgttgtaacaaaaatcgtcctctcagttccaatctctctcagattctcctcctcatcacaattcctcactcctttgattcttgtcccagagtcacgtcctctcctattcgggtctctacagagtctaactctgacccgacccgacccaattcactaaatggaggacgaaccaaagctcccaaccgatgacggtccaactttcaacgaatcgtgtaaaatctcgtctgagatattgaccgccggtgatcggaaattacttaaagttgaactcctcaaagaggagaccacgctcgtatcgtggaagaagcttatggatgaggctagcaaagaaaacggcggcttgttcgtttcggctcccgaacggcttcttaatgccaaccctaacctcgagtttcgccttgcaccgggggcacaaacagagaatgaaatggtgaatcaacctcatcctaatcgtcttaactctgttatagccaagattgagagactttatatgggtaaagacggtagtgatggggaagagttagacggtgctcctgacgatgatgactatgacactgaagattcatttatcgatgatgctgaattggatgagtattttgaagttgataattcgccaattaaacatgatggattttttgtcaatagaggaaagttagaacgaattgaaccttcagctacatcgaaccagcagcaaccaaagaaaaggcgaaggaaggagtcagcaaaaccttgtggcgatgttgttgatgtatccagaaaacgagccaagatggctaagacggctgggggaaaggatcaatctgcttctcctgggccctcttcgaagaaaatttccaatgattcaaagacggtgcaagattcgttttcccctttgaaagcgcaaaatggcaatgattccttagttttggaaaatgtgaagcatactgataaagcgaatcaccagccaatgaatgccacgagtccgaagtcaaaggcagctggatcttctggcccccttcatccgaagtgcagcagcaaaagtgttcatgaacaatctaattcccctccaggaaaatctcggccaaatgtttcggcaaaatcagcagtagttcgtcagcaagttaacaatggcatgcctgacctggacattgcaacggaaagcaaaacatctattcaaatatctaaaaaaagcggttcaaatggccggcctaaatactcgacacttgagaaagccatcaggaatttggagaagttggtcgctgaatcaaggcctcctgctgccactgagaatcaagatgccgatatctcttcccaagcagtgaagaggggattgccaggagatgtaaaattgcatcttgctaaagttgctagaatcgcgtatgcgagccaaggtgaaatatcaggagagttaatcaatcgtctcatgggcattgtcggtcatctaatacagattagatcacttaaggtgaaagctcttccattccagaaagagctaacaagatctgtatttgttagtgaaggagttcaagctcttacggaaacaaatcaagaagctggaacatcagacgattttcaggatgttggatctcttggaaagtcacctgtgaagaagtttgtcatggatgtggcgctggaggaaaaattgtgtgatctatatgacgtgtttgttgagggaatggatgaacattcaggttcacaaatcagaaagctttattcagatctagctcaactgtggcccaatagtttagttgacaatcatgagatcaggcgtgccatttgccgggaaaaggaaaggcggagagcattggaaggaaacattgggaaggagatggatcaaacgaagataacaaagaagaaacagacacaattggtccctaaatctgagggtattacttatcccgacaagacttcaggtgttgaagttaaagcaagtgttgtcctaactgcaaccaccacgtccttagtggactgtcaacctgcagcagactcgtcctttgaaaggtcaaagcagcaacatgagaaattaaagcgaacttcgagcttaagcaatcctgcagcagaaggaaagaaagtcagaagaaagacagaaccagctctagaagaaactcacctgcccgcagagaaacccctcgttctggccctgaagcggcagacacatctaaaatccaagacacataaacaggtacaggtacatccacagtccaaggcacataaacaggcacaggtacatccaaaggccaagacacagactcctccagacctgaacctgccaagttag

SEQ ID NO: 77315 - protein, 699 aa, Arabidopsis thaliana
  peptide (1)..(699): Ceres Seq. ID no. 12575299
  misc_feature (1)..(429): Homolog of NCBI NO: 7486999 NR Description: hypothetical protein T14N5.16 - Arabidopsis >gi|3540209|gb|AAC34359.1| Hypothetical protein [Arabidopsis
  misc_feature (12)..(699): Homolog of NCBI NO: 22329715 NR Description: unknown protein; protein id: At1g21610.1, by cDNA: gi_19699099 [Arabidopsis thaliana] At1g21610/F24J8_11 [Arabidopsis thaliana]
  misc_feature (12)..(699): Homolog of NCBI NO: 25361037 NR Description: F8K7.2 protein - Arabidopsis thaliana ESTs gb|T42839 and gb|AA395192 come from this gene. [Arabidopsis
  misc_feature (500)..(699): Homolog of NCBI NO: 4106388 NR Description: unknown [Arabidopsis thaliana]
  misc_feature (31)..(275): Homolog of NCBI NO: 20161447 NR Description: B1065E10.22 [Oryza sativa (japonica
  misc_feature (407)..(649): Homolog of NCBI NO: 20161447 NR Description: B1065E10.22 [Oryza sativa (japonica
  misc_feature (334)..(429): Homolog of NCBI NO: 20161447 NR Description: B1065E10.22 [Oryza sativa (japonica
  misc_feature (337)..(429): Homolog of NCBI NO: 16506638 NR Description: wound-responsive protein 14.05 [Castanea sativa]
  misc_feature (113)..(498): Homolog of NCBI NO: 7486999 NR Description: hypothetical protein T14N5.16 - Arabidopsis >gi|3540209|gb|AAC34359.1| Hypothetical protein [Arabidopsis
MEDEPKLPTDDGPTFNESCKISSEILTAGDRKLLKVELLKEETTLVSWKKLMDEASKENGGLFVSAPERLLNANPNLEFRLAPGAQTENEMVNQPHPNRLNSVIAKIERLYMGKDGSDGEELDGAPDDDDYDTEDSFIDDAELDEYFEVDNSPIKHDGFFVNRGKLERIEPSATSNQQQPKKRRRKESAKPCGDVVDVSRKRAKMAKTAGGKDQSASPGPSSKKISNDSKTVQDSFSPLKAQNGNDSLVLENVKHTDKANHQPMNATSPKSKAAGSSGPLHPKCSSKSVHEQSNSPPGKSRPNVSAKSAVVRQQVNNGMPDLDIATESKTSIQISKKSGSNGRPKYSTLEKAIRNLEKLVAESRPPAATENQDADISSQAVKRGLPGDVKLHLAKVARIAYASQGEISGELINRLMGIVGHLIQIRSLKVKALPFQKELTRSVFVSEGVQALTETNQEAGTSDDFQDVGSLGKSPVKKFVMDVALEEKLCDLYDVFVEGMDEHSGSQIRKLYSDLAQLWPNSLVDNHEIRRAICREKERRRALEGNIGKEMDQTKITKKKQTQLVPKSEGITYPDKTSGVEVKASVVLTATTTSLVDCQPAADSSFERSKQQHEKLKRTSSLSNPAAEGKKVRRKTEPALEETHLPAEKPLVLALKRQTHLKSKTHKQVQVHPQSKAHKQAQVHPKAKTQTPPDLNLPS

SEQ ID NO: 77316 - protein, 648 aa, Arabidopsis thaliana
  peptide (1)..(648): Ceres Seq. ID no. 12575300
  misc_feature (1)..(378): Homolog of NCBI NO: 7486999 NR Description: hypothetical protein T14N5.16 - Arabidopsis >gi|3540209|gb|AAC34359.1| Hypothetical protein [Arabidopsis
  misc_feature (1)..(648): Homolog of NCBI NO: 22329715 NR Description: unknown protein; protein id: At1g21610.1, by cDNA: gi_19699099 [Arabidopsis thaliana] At1g21610/F24J8_11 [Arabidopsis thaliana]
  misc_feature (1)..(648): Homolog of NCBI NO: 25361037 NR Description: F8K7.2 protein - Arabidopsis thaliana ESTs gb|T42839 and gb|AA395192 come from this gene. [Arabidopsis
  misc_feature (449)..(648): Homolog of NCBI NO: 4106388 NR Description: unknown [Arabidopsis thaliana]
  misc_feature (1)..(224): Homolog of NCBI NO: 20161447 NR Description: B1065E10.22 [Oryza sativa (japonica
  misc_feature (356)..(598): Homolog of NCBI NO: 20161447 NR Description: B1065E10.22 [Oryza sativa (japonica
  misc_feature (283)..(378): Homolog of NCBI NO: 20161447 NR Description: B1065E10.22 [Oryza sativa (japonica
  misc_feature (286)..(378): Homolog of NCBI NO: 16506638 NR Description: wound-responsive protein 14.05 [Castanea sativa]
  misc_feature (62)..(447): Homolog of NCBI NO: 7486999 NR Description: hypothetical protein T14N5.16 - Arabidopsis >gi|3540209|gb|AAC34359.1| Hypothetical protein [Arabidopsis
MDEASKENGGLFVSAPERLLNANPNLEFRLAPGAQTENEMVNQPHPNRLNSVIAKIERLYMGKDGSDGEELDGAPDDDDYDTEDSFIDDAELDEYFEVDNSPIKHDGFFVNRGKLERIEPSATSNQQQPKKRRRKESAKPCGDVVDVSRKRAKMAKTAGGKDQSASPGPSSKKISNDSKTVQDSFSPLKAQNGNDSLVLENVKHTDKANHQPMNATSPKSKAAGSSGPLHPKCSSKSVHEQSNSPPGKSRPNVSAKSAVVRQQVNNGMPDLDIATESKTSIQISKKSGSNGRPKYSTLEKAIRNLEKLVAESRPPAATENQDADISSQAVKRGLPGDVKLHLAKVARIAYASQGEISGELINRLMGIVGHLIQIRSLKVKALPFQKELTRSVFVSEGVQALTETNQEAGTSDDFQDVGSLGKSPVKKFVMDVALEEKLCDLYDVFVEGMDEHSGSQIRKLYSDLAQLWPNSLVDNHEIRRAICREKERRRALEGNIGKEMDQTKITKKKQTQLVPKSEGITYPDKTSGVEVKASVVLTATTTSLVDCQPAADSSFERSKQQHEKLKRTSSLSNPAAEGKKVRRKTEPALEETHLPAEKPLVLALKRQTHLKSKTHKQVQVHPQSKAHKQAQVHPKAKTQTPPDLNLPS

SEQ ID NO: 77317 - protein, 609 aa, Arabidopsis thaliana
  peptide (1)..(609): Ceres Seq. ID no. 12575301
  misc_feature (1)..(339): Homolog of NCBI NO: 7486999 NR Description: hypothetical protein T14N5.16 - Arabidopsis >gi|3540209|gb|AAC34359.1| Hypothetical protein [Arabidopsis
  misc_feature (1)..(609): Homolog of NCBI NO: 22329715 NR Description: unknown protein; protein id: At1g21610.1, by cDNA: gi_19699099 [Arabidopsis thaliana] At1g21610/F24J8_11 [Arabidopsis thaliana]
  misc_feature (1)..(609): Homolog of NCBI NO: 25361037 NR Description: F8K7.2 protein - Arabidopsis thaliana ESTs gb|T42839 and gb|AA395192 come from this gene. [Arabidopsis
  misc_feature (410)..(609): Homolog of NCBI NO: 4106388 NR Description: unknown [Arabidopsis thaliana]
  misc_feature (1)..(185): Homolog of NCBI NO: 20161447 NR Description: B1065E10.22 [Oryza sativa (japonica
  misc_feature (317)..(559): Homolog of NCBI NO: 20161447 NR Description: B1065E10.22 [Oryza sativa (japonica
  misc_feature (244)..(339): Homolog of NCBI NO: 20161447 NR Description: B1065E10.22 [Oryza sativa (japonica
  misc_feature (247)..(339): Homolog of NCBI NO: 16506638 NR Description: wound-responsive protein 14.05 [Castanea sativa]
  misc_feature (23)..(408): Homolog of NCBI NO: 7486999 NR Description: hypothetical protein T14N5.16 - Arabidopsis >gi|3540209|gb|AAC34359.1| Hypothetical protein [Arabidopsis
MVNQPHPNRLNSVIAKIERLYMGKDGSDGEELDGAPDDDDYDTEDSFIDDAELDEYFEVDNSPIKHDGFFVNRGKLERIEPSATSNQQQPKKRRRKESAKPCGDVVDVSRKRAKMAKTAGGKDQSASPGPSSKKISNDSKTVQDSFSPLKAQNGNDSLVLENVKHTDKANHQPMNATSPKSKAAGSSGPLHPKCSSKSVHEQSNSPPGKSRPNVSAKSAVVRQQVNNGMPDLDIATESKTSIQISKKSGSNGRPKYSTLEKAIRNLEKLVAESRPPAATENQDADISSQAVKRGLPGDVKLHLAKVARIAYASQGEISGELINRLMGIVGHLIQIRSLKVKALPFQKELTRSVFVSEGVQALTETNQEAGTSDDFQDVGSLGKSPVKKFVMDVALEEKLCDLYDVFVEGMDEHSGSQIRKLYSDLAQLWPNSLVDNHEIRRAICREKERRRALEGNIGKEMDQTKITKKKQTQLVPKSEGITYPDKTSGVEVKASVVLTATTTSLVDCQPAADSSFERSKQQHEKLKRTSSLSNPAAEGKKVRRKTEPALEETHLPAEKPLVLALKRQTHLKSKTHKQVQVHPQSKAHKQAQVHPKAKTQTPPDLNLPS

SEQ ID NO: 77318 - DNA, 1296 bp, Arabidopsis thaliana
  misc_feature (1)..(1296): Ceres Seq. ID no. 12575415
  misc_feature: MA Experiment ID: 20000166 Result: Up-regulated in Transcription
  misc_feature: MA Experiment 20000166 PARAMETER Experiment Name: At_100uM_ABA_P Parameter: Age (day) Value: 14
  misc_feature: MA Experiment 20000166 PARAMETER Experiment Name: At_100uM_ABA_P Parameter: Organism Value: A. thaliana
  misc_feature: MA Experiment 20000166 PARAMETER Experiment Name: At_100uM_ABA_P Parameter: Plant Line Value: WS
  misc_feature: MA Experiment 20000166 PARAMETER Experiment Name: At_100uM_ABA_P Parameter: Timepoint (hr) Value: 1
  misc_feature: MA Experiment 20000166 PARAMETER Experiment Name: At_100uM_ABA_P Parameter: Tissue Value: Aerial
  misc_feature: MA Experiment 20000166 PARAMETER Experiment Name: At_100uM_ABA_P Parameter: Treatment Value: 100uM ABA vs. No Treatment
  misc_feature: MA Experiment ID: 20000180 Result: Up-regulated in Transcription
  misc_feature: MA Experiment 20000180 PARAMETER Experiment Name: At_Germinating_Seeds_P Parameter: Age (hr) Value: 24 vs. 0
  misc_feature: MA Experiment 20000180 PARAMETER Experiment Name: At_Germinating_Seeds_P Parameter: Tissue Value: Germinating Seeds
  misc_feature: MA Experiment ID: 20000184 Result: Up-regulated in Transcription
  misc_feature: MA Experiment 20000184 PARAMETER Experiment Name: At_Shoots__P Parameter: Age (day) Value: 7
  misc_feature: MA Experiment 20000184 PARAMETER Experiment Name: At_Shoots__P Parameter: Tissue Value: Shoots vs. Whole Plant
  misc_feature: MA Experiment ID: 20000456 Result: Down-regulated in Transcription
  misc_feature: MA Experiment 20000456 PARAMETER Experiment Name: At_100uM_BA_P Parameter: Age (day) Value: 14
  misc_feature: MA Experiment 20000456 PARAMETER Experiment Name: At_100uM_BA_P Parameter: Organism Value: A. thaliana
  misc_feature: MA Experiment 20000456 PARAMETER Experiment Name: At_100uM_BA_P Parameter: Plant Line Value: WS
  misc_feature: MA Experiment 20000456 PARAMETER Experiment Name: At_100uM_BA_P Parameter: Timepoint (hr) Value: 6
  misc_feature: MA Experiment 20000456 PARAMETER Experiment Name: At_100uM_BA_P Parameter: Tissue Value: Aerial
  misc_feature: MA Experiment 20000456 PARAMETER Experiment Name: At_100uM_BA_P Parameter: Treatment Value: 100uM BA vs. No Treatment
  misc_feature: MA Experiment ID: 20000527 Result: Up-regulated in Transcription
  misc_feature: MA Experiment 20000527 PARAMETER Experiment Name: At_10percent_PEG_P Parameter: Age (day) Value: 20
  misc_feature: MA Experiment 20000527 PARAMETER Experiment Name: At_10percent_PEG_P Parameter: Organism Value: A. thaliana
  misc_feature: MA Experiment 20000527 PARAMETER Experiment Name: At_10percent_PEG_P Parameter: Plant Line Value: WS
  misc_feature: MA Experiment 20000527 PARAMETER Experiment Name: At_10percent_PEG_P Parameter: Timepoint (day) Value: 20
  misc_feature: MA Experiment 20000527 PARAMETER Experiment Name: At_10percent_PEG_P Parameter: Tissue Value: Whole Plant
  misc_feature: MA Experiment 20000527 PARAMETER Experiment Name: At_10percent_PEG_P Parameter: Treatment Value: 10percent PEG vs. No Treatment
  misc_feature: MA Experiment ID: 20000573 Result: Down-regulated in Transcription
  misc_feature: MA Experiment 20000573 PARAMETER Experiment Name: At_100uM_ABA_Mutants__P Parameter: Organism Value: A. thaliana
  misc_feature: MA Experiment 20000573 PARAMETER Experiment Name: At_100uM_ABA_Mutants__P Parameter: Plant Line Value: CS22 vs. Ler wt
  misc_feature: MA Experiment 20000573 PARAMETER Experiment Name: At_100uM_ABA_Mutants__P Parameter: Timepoint (hr) Value: N/A
  misc_feature: MA Experiment 20000573 PARAMETER Experiment Name: At_100uM_ABA_Mutants__P Parameter: Tissue Value: Whole Plant
  misc_feature: MA Experiment 20000573 PARAMETER Experiment Name: At_100uM_ABA_Mutants__P Parameter: Treatment Value: None
  misc_feature: MA Experiment ID: 20001247 Result: Down-regulated in Transcription
  misc_feature: MA Experiment 20001247 PARAMETER Experiment Name: At_Far-red-induction_P Parameter: Age (day) Value: 7
  misc_feature: MA Experiment 20001247 PARAMETER Experiment Name: At_Far-red-induction_P Parameter: Light Value: Far-red vs. White
  misc_feature: MA Experiment 20001247 PARAMETER Experiment Name: At_Far-red-induction_P Parameter: Organism Value: A. thaliana
  misc_feature: MA Experiment 20001247 PARAMETER Experiment Name: At_Far-red-induction_P Parameter: Plant Line Value: Columbia
  misc_feature: MA Experiment 20001247 PARAMETER Experiment Name: At_Far-red-induction_P Parameter: Timepoint (hr) Value: 1
  misc_feature: MA Experiment 20001247 PARAMETER Experiment Name: At_Far-red-induction_P Parameter: Tissue Value: Whole Plant
  misc_feature: MA Experiment ID: 20001248 Result: Down-regulated in Transcription
  misc_feature: MA Experiment 20001248 PARAMETER Experiment Name: At_Far-red-induction_P Parameter: Age (day) Value: 7
  misc_feature: MA Experiment 20001248 PARAMETER Experiment Name: At_Far-red-induction_P Parameter: Light Value: Far-red vs. White
  misc_feature: MA Experiment 20001248 PARAMETER Experiment Name: At_Far-red-induction_P Parameter: Organism Value: A. thaliana
  misc_feature: MA Experiment 20001248 PARAMETER Experiment Name: At_Far-red-induction_P Parameter: Plant Line Value: Columbia
  misc_feature: MA Experiment 20001248 PARAMETER Experiment Name: At_Far-red-induction_P Parameter: Timepoint (hr) Value: 4
  misc_feature: MA Experiment 20001248 PARAMETER Experiment Name: At_Far-red-induction_P Parameter: Tissue Value: Whole Plant
  misc_feature: MA Experiment ID: 20001757 Result: Up-regulated in Transcription
  misc_feature: MA Experiment 20001757 PARAMETER Experiment Name: At_50mM_NH4NO3_L-to-H_P Parameter: Timepoint (hr) Value: 6
  misc_feature: MA Experiment 20001757 PARAMETER Experiment Name: At_50mM_NH4NO3_L-to-H_P Parameter: Tissue Value: Leaf
  misc_feature: MA Experiment 20001757 PARAMETER Experiment Name: At_50mM_NH4NO3_L-to-H_P Parameter: Treatment Value: 50mM NH4NO3 vs 100mM Mannitol
ataacgagagattttttatatataaaaaataaaggaagcacgagttcaccttaaaaatttgagtttctcttttcttgaccctgaagtttcgttttgatcaatttcacccatttctttgttcgtcgtcttttctttcaaaagggtttcatctttgtattataaaaatccaaactttatatcttcacaagcagcaaagatctctatttcaatcctctcatggaaactgcttctctttctttccctgtcccaaacacgagcttcggtgtaaacaaatctatgcctctcggtctaaaccagctcacaccataccaaattcatcagattcagaaccagcttaaccatagacgtagcacaatctcaaacctctctccaaaccgtatcagaatgaagaacttaacaccttctacctccaaaaccaagaatctctacagaggcgtaaggcaaaggcactgggggaaatgggtcgctgagatccgtttgcccaagaaccggacccgtctctggctcgggacattcgaaaccgccgaaaaagccgccttagcttacgaccaagctgcttttcagctccgtggagatatcgcgaagcttaacttcccaaacctcatacacgaagacatgaatcctctcccttcctctgttgataccaagcttcaagctatctgcaaaagtttgagaaaaacagaggaaatttgctctgtttctgatcaaacaaaggagtactctgtttactctgtttcagataaaacagagcttttcctgccaaaagcagagcttttcttgcctaaaagagagcatttggagacaaatgagctctctaatgagtcaccgagaagcgatgagacctcgttgttggatgagtcgcaggcggaatattcatcgtcggataaaacattcctggatttctcggatactgagtttgaagagattggaagtttcgggcttcggaagtttccttcggtggagattgattgggatgcaattagtaaactggccaattcttaaagtcttctattttatattaatcttctgtgcaactgaaattttcaacaagttgcagatgagtttattaggtttgaatctgtcctagttttctttgttggtcgtatagagttttactatgtagctaatctccatgtttggtttggcttggtaagtttttaaggtcctcgtcatcaacaaaccggagaaagtttatgtattcaaaagctatgtattatatcctcacatctacttatgagagtgagatcaaagtttgtaaaatgaagtcttgatttcttcttttagttctctcttttt

SEQ ID NO: 77319 - protein, 261 aa, Arabidopsis thaliana
  peptide (1)..(261): Ceres Seq. ID no. 12575416
  misc_feature (68)..(132): Pfam Name: AP2 domain Pfam Description: AP2 domain
  misc_feature (1)..(261): Homolog of NCBI NO: 15227162 NR Description: AP2 domain transcription factor RAP2, putative; id: At2g22200.1, supported by cDNA: gi_19699340 [Arabidopsis >gi|25350214|pir||B84610 AP2 domain transcription factor
  misc_feature (1)..(261): Homolog of NCBI NO: 19699341 NR Description: At2g22200/T26C19.14 [Arabidopsis thaliana]
  misc_feature (3)..(261): Homolog of NCBI NO: 15236020 NR Description: AP2 domain transcription factor RAP2, putative; id: At4g39780.1 [Arabidopsis thaliana] >gi|7487213|pir||T05015
  misc_feature (13)..(255): Homolog of NCBI NO: 27436378 NR Description: dehydration-responsive element binding protein 3
  misc_feature (1)..(255): Homolog of NCBI NO: 37572971 NR Description: AP2-domain DRE binding factor DBF1 [Oryza sativa
  misc_feature (16)..(255): Homolog of NCBI NO: 6573771 NR Description: F28K19.29 [Arabidopsis thaliana]
  misc_feature (16)..(255): Homolog of NCBI NO: 15218204 NR Description: AP2 domain protein RAP2.4; protein id: supported by cDNA: gi_13877778 [Arabidopsis thaliana]
  misc_feature (49)..(260): Homolog of NCBI NO: 15219839 NR Description: AP2 domain transcription factor RAP2, putative; id: At1g22190.1, supported by cDNA: gi_15292782 [Arabidopsis
  misc_feature (16)..(255): Homolog of NCBI NO: 13877779 NR Description: putative AP2 domain-containing protein
  misc_feature (45)..(255): Homolog of NCBI NO: 8571476 NR Description: apetala2 domain-containing protein [Atriplex
METASLSFPVPNTSFGVNKSMPLGLNQLTPYQIHQIQNQLNHRRSTISNLSPNRIRMKNLTPSTSKTKNLYRGVRQRHWGKWVAEIRLPKNRTRLWLGTFETAEKAALAYDQAAFQLRGDIAKLNFPNLIHEDMNPLPSSVDTKLQAICKSLRKTEEICSVSDQTKEYSVYSVSDKTELFLPKAELFLPKREHLETNELSNESPRSDETSLLDESQAEYSSSDKTFLDFSDTEFEEIGSFGLRKFPSVEIDWDAISKLANS

SEQ ID NO: 77320 - protein, 241 aa, Arabidopsis thaliana
  peptide (1)..(241): Ceres Seq. ID no. 12575417
  misc_feature (48)..(112): Pfam Name: AP2 domain Pfam Description: AP2 domain
  misc_feature (1)..(241): Homolog of NCBI NO: 15227162 NR Description: AP2 domain transcription factor RAP2, putative; id: At2g22200.1, supported by cDNA: gi_19699340 [Arabidopsis >gi|25350214|pir||B84610 AP2 domain transcription factor
  misc_feature (1)..(241): Homolog of NCBI NO: 19699341 NR Description: At2g22200/T26C19.14 [Arabidopsis thaliana]
  misc_feature (1)..(241): Homolog of NCBI NO: 15236020 NR Description: AP2 domain transcription factor RAP2, putative; id: At4g39780.1 [Arabidopsis thaliana] >gi|7487213|pir||T05015
  misc_feature (1)..(235): Homolog of NCBI NO: 27436378 NR Description: dehydration-responsive element binding protein 3
  misc_feature (1)..(235): Homolog of NCBI NO: 37572971 NR Description: AP2-domain DRE binding factor DBF1 [Oryza sativa
  misc_feature (1)..(235): Homolog of NCBI NO: 6573771 NR Description: F28K19.29 [Arabidopsis thaliana]
  misc_feature (1)..(235): Homolog of NCBI NO: 15218204 NR Description: AP2 domain protein RAP2.4; protein id: supported by cDNA: gi_13877778 [Arabidopsis thaliana]
  misc_feature (29)..(240): Homolog of NCBI NO: 15219839 NR Description: AP2 domain transcription factor RAP2, putative; id: At1g22190.1, supported by cDNA: gi_15292782 [Arabidopsis
  misc_feature (1)..(235): Homolog of NCBI NO: 13877779 NR Description: putative AP2 domain-containing protein
  misc_feature (25)..(235): Homolog of NCBI NO: 8571476 NR Description: apetala2 domain-containing protein [Atriplex
MPLGLNQLTPYQIHQIQNQLNHRRSTISNLSPNRIRMKNLTPSTSKTKNLYRGVRQRHWGKWVAEIRLPKNRTRLWLGTFETAEKAALAYDQAAFQLRGDIAKLNFPNLIHEDMNPLPSSVDTKLQAICKSLRKTEEICSVSDQTKEYSVYSVSDKTELFLPKAELFLPKREHLETNELSNESPRSDETSLLDESQAEYSSSDKTFLDFSDTEFEEIGSFGLRKFPSVEIDWDAISKLANS

SEQ ID NO: 77321 - protein, 205 aa, Arabidopsis thaliana
  peptide (1)..(205): Ceres Seq. ID no. 12575418
  misc_feature (12)..(76): Pfam Name: AP2 domain Pfam Description: AP2 domain
  misc_feature (1)..(205): Homolog of NCBI NO: 15227162 NR Description: AP2 domain transcription factor RAP2, putative; id: At2g22200.1, supported by cDNA: gi_19699340 [Arabidopsis >gi|25350214|pir||B84610 AP2 domain transcription factor
  misc_feature (1)..(205): Homolog of NCBI NO: 19699341 NR Description: At2g22200/T26C19.14 [Arabidopsis thaliana]
  misc_feature (1)..(205): Homolog of NCBI NO: 15236020 NR Description: AP2 domain transcription factor RAP2, putative; id: At4g39780.1 [Arabidopsis thaliana] >gi|7487213|pir||T05015
  misc_feature (1)..(199): Homolog of NCBI NO: 27436378 NR Description: dehydration-responsive element binding protein 3
  misc_feature (1)..(199): Homolog of NCBI NO: 37572971 NR Description: AP2-domain DRE binding factor DBF1 [Oryza sativa
  misc_feature (1)..(199): Homolog of NCBI NO: 6573771 NR Description: F28K19.29 [Arabidopsis thaliana]
  misc_feature (1)..(199): Homolog of NCBI NO: 15218204 NR Description: AP2 domain protein RAP2.4; protein id: supported by cDNA: gi_13877778 [Arabidopsis thaliana]
  misc_feature (1)..(204): Homolog of NCBI NO: 15219839 NR Description: AP2 domain transcription factor RAP2, putative; id: At1g22190.1, supported by cDNA: gi_15292782 [Arabidopsis
  misc_feature (1)..(199): Homolog of NCBI NO: 13877779 NR Description: putative AP2 domain-containing protein
  misc_feature (1)..(199): Homolog of NCBI NO: 8571476 NR Description: apetala2 domain-containing protein [Atriplex
MKNLTPSTSKTKNLYRGVRQRHWGKWVAEIRLPKNRTRLWLGTFETAEKAALAYDQAAFQLRGDIAKLNFPNLIHEDMNPLPSSVDTKLQAICKSLRKTEEICSVSDQTKEYSVYSVSDKTELFLPKAELFLPKREHLETNELSNESPRSDETSLLDESQAEYSSSDKTFLDFSDTEFEEIGSFGLRKFPSVEIDWDAISKLANS

SEQ ID NO: 77322 - DNA, 1740 bp, Arabidopsis thaliana
  misc_feature (1)..(1740): Ceres Seq. ID no. 12575490
  misc_feature: MA Experiment ID: 20000180 Result: Up-regulated in Transcription
  misc_feature: MA Experiment 20000180 PARAMETER Experiment Name: At_Germinating_Seeds_P Parameter: Age (hr) Value: 24 vs. 0
  misc_feature: MA Experiment 20000180 PARAMETER Experiment Name: At_Germinating_Seeds_P Parameter: Tissue Value: Germinating Seeds
  misc_feature: MA Experiment ID: 20000184 Result: Up-regulated in Transcription
  misc_feature: MA Experiment 20000184 PARAMETER Experiment Name: At_Shoots__P Parameter: Age (day) Value: 7
  misc_feature: MA Experiment 20000184 PARAMETER Experiment Name: At_Shoots__P Parameter: Tissue Value: Shoots vs. Whole Plant
  misc_feature: MA Experiment ID: 20000185 Result: Down-regulated in Transcription
  misc_feature: MA Experiment 20000185 PARAMETER Experiment Name: At_Roots__P Parameter: Age (day) Value: 7 vs. 21
  misc_feature: MA Experiment 20000185 PARAMETER Experiment Name: At_Roots__P Parameter: Organism Value: A. thaliana
  misc_feature: MA Experiment 20000185 PARAMETER Experiment Name: At_Roots__P Parameter: Tissue Value: Roots vs. Whole Plant
  misc_feature: MA Experiment ID: 20000438 Result: Up-regulated in Transcription
  misc_feature: MA Experiment 20000438 PARAMETER Experiment Name: At_Shoots__P Parameter: Age (day) Value: 14
  misc_feature: MA Experiment 20000438 PARAMETER Experiment Name: At_Shoots__P Parameter: Tissue Value: Shoots vs. Whole Plant
  misc_feature: MA Experiment ID: 20000439 Result: Down-regulated in Transcription
  misc_feature: MA Experiment 20000439 PARAMETER Experiment Name: At_Roots__P Parameter: Age (day) Value: 14 vs. 21
  misc_feature: MA Experiment 20000439 PARAMETER Experiment Name: At_Roots__P Parameter: Organism Value: A. thaliana
  misc_feature: MA Experiment 20000439 PARAMETER Experiment Name: At_Roots__P Parameter: Tissue Value: Roots vs. Whole Plant
  misc_feature: MA Experiment ID: 20001557 Result: Down-regulated in Transcription
  misc_feature: MA Experiment 20001557 PARAMETER Experiment Name: At_Drought_Soil_Dry_P Parameter: Age (day) Value: 27
  misc_feature: MA Experiment 20001557 PARAMETER Experiment Name: At_Drought_Soil_Dry_P Parameter: Organism Value: A. thaliana
  misc_feature: MA Experiment 20001557 PARAMETER Experiment Name: At_Drought_Soil_Dry_P Parameter: Plant Line Value: WS
  misc_feature: MA Experiment 20001557 PARAMETER Experiment Name: At_Drought_Soil_Dry_P Parameter: Post Timepoint (hr) Value: 3
  misc_feature: MA Experiment 20001557 PARAMETER Experiment Name: At_Drought_Soil_Dry_P Parameter: Post-Treatment Value: Re-Water vs. No Drought
  misc_feature: MA Experiment 20001557 PARAMETER Experiment Name: At_Drought_Soil_Dry_P Parameter: Timepoint (day) Value: 13
  misc_feature: MA Experiment 20001557 PARAMETER Experiment Name: At_Drought_Soil_Dry_P Parameter: Treatment Value: Drought vs. No Drought
  misc_feature: MA Experiment ID: 20001558 Result: Down-regulated in Transcription
  misc_feature: MA Experiment 20001558 PARAMETER Experiment Name: At_Drought_Soil_Dry_P Parameter: Age (day) Value: 27
  misc_feature: MA Experiment 20001558 PARAMETER Experiment Name: At_Drought_Soil_Dry_P Parameter: Organism Value: A. thaliana
  misc_feature: MA Experiment 20001558 PARAMETER Experiment Name: At_Drought_Soil_Dry_P Parameter: Plant Line Value: WS
  misc_feature: MA Experiment 20001558 PARAMETER Experiment Name: At_Drought_Soil_Dry_P Parameter: Post Timepoint (hr) Value: 6
  misc_feature: MA Experiment 20001558 PARAMETER Experiment Name: At_Drought_Soil_Dry_P Parameter: Post-Treatment Value: Re-Water vs. No Drought
  misc_feature: MA Experiment 20001558 PARAMETER Experiment Name: At_Drought_Soil_Dry_P Parameter: Timepoint (day) Value: 13
  misc_feature: MA Experiment 20001558 PARAMETER Experiment Name: At_Drought_Soil_Dry_P Parameter: Treatment Value: Drought vs. No Drought
  misc_feature: MA Experiment ID: 20001905 Result: Down-regulated in Transcription
  misc_feature: MA Experiment 20001905 PARAMETER Experiment Name: At_Drought_Reproduction_P Parameter: Age (day) Value: 40
  misc_feature: MA Experiment 20001905 PARAMETER Experiment Name: At_Drought_Reproduction_P Parameter: Organism Value: A. thaliana
  misc_feature: MA Experiment 20001905 PARAMETER Experiment Name: At_Drought_Reproduction_P Parameter: Plant Line Value: WS
  misc_feature: MA Experiment 20001905 PARAMETER Experiment Name: At_Drought_Reproduction_P Parameter: Timepoint (day) Value: 10
  misc_feature: MA Experiment 20001905 PARAMETER Experiment Name: At_Drought_Reproduction_P Parameter: Tissue Value: Rosettes
  misc_feature: MA Experiment 20001905 PARAMETER Experiment Name: At_Drought_Reproduction_P Parameter: Treatment Value: Drought vs. No Drought
atggctttcgctgtctcggttcagtcacatttcgcaatcagagcgttaaaacgagaccacttcaagaacccttctcctcgtactttctgctcgtgttttaaatcgaggcctgactcgtcttaccttagtttaaaggaacgtacttgcttcgtttccaaaccgggtttagtcactactagatacagacatatattccaggtcggagctgagacgggaggagagttcgccgacagtggagaagtagctgattcgcttgcttctgatgcaccagagtcattttcttggtcttctgtgatactcccgtttatcttcccggctttgggaggattattgtttgggtatgacattggggctacctccggtgctacgctctcacttcagtcacctgcgcttagcggaactacatggtttaacttctcacctgttcagctaggacttgtggttagcggatccttgtatggagcccttcttggctcaatttctgtctatggcgttgctgatttccttggaagaaggcgggaacttattatagctgctgttctctatctcctcgggtctctgatcactggctgtgcccctgatcttaatattctcttagttggaaggcttctctatggctttggtattggtttggtgagctccggaaacctgaatcgttatgacatgcccatctcaaatccgtggaactttgatatctctgaaagaactcttcatcgtattgggaattttggtaagtgtctgatgtcaatctcttcccagtatgatttctgcgtaaatattgatttccttcttgtgcagttgggtttttctgttggaagcttccagattgatgtagttggagggtggcgttacatgtatggatttggtacgcctgttgctttgctgatgggactaggcatgtggagtctccctgcatctcctcgctggttgctgcttagagctgtccaaggtaaaggacaattacaagaatacaaagagaaggccatgcttgccctcagcaaattacgtggcagacctccaggtgataaaatctcagagaagttggtagatgatgcctatttatctgtgaaaacggcctatgaagatgagaaatctgggggaaacttcctggaagtattccaagggcctaatttgaaagctttgacaattggtggaggtttagtcctcttccaacagataactggacagcctagtgttctttattatgcgggttcgattcttcagactgctggattctctgctgctgctgatgcaactcgagtctctgttattattggtgttttcaagttactgatgacatgggtagctgttgcgaaagttgatgatctcggcagacgacctttactgattggaggtgtcagcggcattgcgttgtccttgtttctactgtcagcatactacaagtttctcggaggctttccccttgtcgctgttggtgcactgcttctctatgttggttgttaccagatctcatttggacccatcagctggctaatggtgtcagagattttcccgctccgcacaagagggagagggatcagtcttgcagttcttacaaactttggctccaatgctattgtgacatttgcattttcacctttaaaggaatttcttggagccgagaatcttttccttctctttgggggcatagcactggtatcactgctgtttgtaatactagtagttccagagaccaagggtctcagcttggaagaaattgaatcaaaaatcttgaagtga

SEQ ID NO: 77323 - protein, 579 aa, Arabidopsis thaliana
  peptide (1)..(579): Ceres Seq. ID no. 12575491
  misc_feature (101)..(215): Pfam Name: Sugar (and other) transporter Pfam Description: Sugar (and other) transporter
  misc_feature (1)..(579): Homolog of NCBI NO: 15237848 NR Description: D-xylose-H+ symporter - like protein; protein id:
  misc_feature (265)..(579): Homolog of NCBI NO: 9759246 NR Description: sugar transporter-like protein [Arabidopsis
  misc_feature (1)..(215): Homolog of NCBI NO: 9759246 NR Description: sugar transporter-like protein [Arabidopsis
  misc_feature (268)..(579): Homolog of NCBI NO: 34897404 NR Description: putative sugar transporter protein [Oryza sativa
  misc_feature (122)..(215): Homolog of NCBI NO: 34897404 NR Description: putative sugar transporter protein [Oryza sativa
  misc_feature (267)..(577): Homolog of NCBI NO: 37537174 NR Description: putative sugar transporter protein [Oryza sativa
  misc_feature (89)..(211): Homolog of NCBI NO: 37537174 NR Description: putative sugar transporter protein [Oryza sativa
  misc_feature (268)..(578): Homolog of NCBI NO: 30678759 NR Description: sugar transporter family [Arabidopsis thaliana]
  misc_feature (67)..(211): Homolog of NCBI NO: 30678759 NR Description: sugar transporter family [Arabidopsis thaliana]
  misc_feature (268)..(578): Homolog of NCBI NO: 6714427 NR Description: hypothetical protein [Arabidopsis thaliana]
MAFAVSVQSHFAIRALKRDHFKNPSPRTFCSCFKSRPDSSYLSLKERTCFVSKPGLVTTRYRHIFQVGAETGGEFADSGEVADSLASDAPESFSWSSVILPFIFPALGGLLFGYDIGATSGATLSLQSPALSGTTWFNFSPVQLGLVVSGSLYGALLGSISVYGVADFLGRRRELIIAAVLYLLGSLITGCAPDLNILLVGRLLYGFGIGLVSSGNLNRYDMPISNPWNFDISERTLHRIGNFGKCLMSISSQYDFCVNIDFLLVQLGFSVGSFQIDVVGGWRYMYGFGTPVALLMGLGMWSLPASPRWLLLRAVQGKGQLQEYKEKAMLALSKLRGRPPGDKISEKLVDDAYLSVKTAYEDEKSGGNFLEVFQGPNLKALTIGGGLVLFQQITGQPSVLYYAGSILQTAGFSAAADATRVSVIIGVFKLLMTWVAVAKVDDLGRRPLLIGGVSGIALSLFLLSAYYKFLGGFPLVAVGALLLYVGCYQISFGPISWLMVSEIFPLRTRGRGISLAVLTNFGSNAIVTFAFSPLKEFLGAENLFLLFGGIALVSLLFVILVVPETKGLSLEEIESKILK

SEQ ID NO: 77324 - protein, 358 aa, Arabidopsis thaliana
  peptide (1)..(358): Ceres Seq. ID no. 12575492
  misc_feature (44)..(356): Pfam Name: Sugar (and other) transporter Pfam Description: Sugar (and other) transporter
  misc_feature (1)..(358): Homolog of NCBI NO: 15237848 NR Description: D-xylose-H+ symporter - like protein; protein id:
  misc_feature (44)..(358): Homolog of NCBI NO: 9759246 NR Description: sugar transporter-like protein [Arabidopsis
  misc_feature (47)..(358): Homolog of NCBI NO: 34897404 NR Description: putative sugar transporter protein [Oryza sativa
  misc_feature (46)..(356): Homolog of NCBI NO: 37537174 NR Description: putative sugar transporter protein [Oryza sativa
  misc_feature (47)..(357): Homolog of NCBI NO: 30678759 NR Description: sugar transporter family [Arabidopsis thaliana]
  misc_feature (47)..(357): Homolog of NCBI NO: 6714427 NR Description: hypothetical protein [Arabidopsis thaliana]
  misc_feature (47)..(172): Homolog of NCBI NO: 15237892 NR Description: sugar transporter - like protein; protein id:
  misc_feature (249)..(357): Homolog of NCBI NO: 15237892 NR Description: sugar transporter - like protein; protein id:
  misc_feature (47)..(172): Homolog of NCBI NO: 30686148 NR Description: sugar transporter family [Arabidopsis thaliana]
  misc_feature (249)..(357): Homolog of NCBI NO: 30686148 NR Description: sugar transporter family [Arabidopsis thaliana]
MPISNPWNFDISERTLHRIGNFGKCLMSISSQYDFCVNIDFLLVQLGFSVGSFQIDVVGGWRYMYGFGTPVALLMGLGMWSLPASPRWLLLRAVQGKGQLQEYKEKAMLALSKLRGRPPGDKISEKLVDDAYLSVKTAYEDEKSGGNFLEVFQGPNLKALTIGGGLVLFQQITGQPSVLYYAGSILQTAGFSAAADATRVSVIIGVFKLLMTWVAVAKVDDLGRRPLLIGGVSGIALSLFLLSAYYKFLGGFPLVAVGALLLYVGCYQISFGPISWLMVSEIFPLRTRGRGISLAVLTNFGSNAIVTFAFSPLKEFLGAENLFLLFGGIALVSLLFVILVVPETKGLSLEEIESKILK

SEQ ID NO: 77325 - protein, 332 aa, Arabidopsis thaliana
  peptide (1)..(332): Ceres Seq. ID no. 12575493
  misc_feature (18)..(330): Pfam Name: Sugar (and other) transporter Pfam Description: Sugar (and other) transporter
  misc_feature (1)..(332): Homolog of NCBI NO: 15237848 NR Description: D-xylose-H+ symporter - like protein; protein id:
  misc_feature (18)..(332): Homolog of NCBI NO: 9759246 NR Description: sugar transporter-like protein [Arabidopsis
  misc_feature (21)..(332): Homolog of NCBI NO: 34897404 NR Description: putative sugar transporter protein [Oryza sativa
  misc_feature (20)..(330): Homolog of NCBI NO: 37537174 NR Description: putative sugar transporter protein [Oryza sativa
  misc_feature (21)..(331): Homolog of NCBI NO: 30678759 NR Description: sugar transporter family [Arabidopsis thaliana]
  misc_feature (21)..(331): Homolog of NCBI NO: 6714427 NR Description: hypothetical protein [Arabidopsis thaliana]
  misc_feature (21)..(146): Homolog of NCBI NO: 15237892 NR Description: sugar transporter - like protein; protein id:
  misc_feature (223)..(331): Homolog of NCBI NO: 15237892 NR Description: sugar transporter - like protein; protein id:
  misc_feature (21)..(146): Homolog of NCBI NO: 30686148 NR Description: sugar transporter family [Arabidopsis thaliana]
  misc_feature (223)..(331): Homolog of NCBI NO: 30686148 NR Description: sugar transporter family [Arabidopsis thaliana]
MSISSQYDFCVNIDFLLVQLGFSVGSFQIDVVGGWRYMYGFGTPVALLMGLGMWSLPASPRWLLLRAVQGKGQLQEYKEKAMLALSKLRGRPPGDKISEKLVDDAYLSVKTAYEDEKSGGNFLEVFQGPNLKALTIGGGLVLFQQITGQPSVLYYAGSILQTAGFSAAADATRVSVIIGVFKLLMTWVAVAKVDDLGRRPLLIGGVSGIALSLFLLSAYYKFLGGFPLVAVGALLLYVGCYQISFGPISWLMVSEIFPLRTRGRGISLAVLTNFGSNAIVTFAFSPLKEFLGAENLFLLFGGIALVSLLFVILVVPETKGLSLEEIESKILK

SEQ ID NO: 77326 - DNA, 1156 bp, Arabidopsis thaliana
  misc_feature (1)..(1156): Ceres Seq. ID no. 12575658
  misc_feature: MA Experiment ID: 20000440 Result: Up-regulated in Transcription
  misc_feature: MA Experiment 20000440 PARAMETER Experiment Name: At_Closed-Flower__Sub_P Parameter: Tissue Value: Closed Flower vs. Whole Plant
aagttcggttcccttcttctctcctcctccaccttctctccattttcttacctctcaacaagtttacacaaacaaaaaaacaaaaaaaaaacaaaaaaatgacaagttgttttttttaaaattcttttcttagacaaagacagagacagagagaggggaagattttgggtttggngtttttctccttttcttcattgaaagttgtcttcttttttaatcttctttgattaaaatgggtaatgtgacgtcaaatgtggcggccaagttcgcattcttcccgccggagccagcaacatacggcgtaacgaaggatgacgagaccgggaagctggtcttcgccggagtgtcggctgacaagaacgtggaagtccaccaactcaccacaaagtccggcaacaaagttgttgccacgttttggagacacccttttgcgagattcacgcttctctattcccatggcaatgccgctgatcttggccaaatggtcgagctattcatcgaactccgtgctcatctccgcgtcaacatcatgaggtatatcttaaaaactttaatgccgtctgaattcaacacgtattatgacatagaggcagtgtacagttgcttgcggagcgattatgggatcaagcaagaggagataattctgtacggtcagtctgtaggaagcggtccaacgttgcacatggcttctcggttgaagaggcttagaggagttgttcttcacagcgccattctctctggaatcagagtcttgtatcctgtcaaaatgactctctggttcgatatattcaaagtaagaaaagcacacacaaaagatttgcttttggttgggttacatatatactctaacatagacaagattcgccatgtcaactcacaagtccttgtcatacatggcacaaatgacgagattgttgatttgtctcacgggaaacgactgtgggagctggcgaaggagaagtatgatccgttatgggtgaagggaggagggcattgcaacctcgagacttaccctgagtacatcaagcacctcaaaaagttcgtaaatgcaatggagaaactctctctaaccaatccaccacccaaacaactaactaatgagcccagtatcaccgagactaagcacaatcggtgcttgaaattcgggaaacggtag

SEQ ID NO: 77327 - protein, 307 aa, Arabidopsis thaliana
  peptide (1)..(307): Ceres Seq. ID no. 12575659
  misc_feature (1)..(307): Homolog of NCBI NO: 25352163 NR Description: hypothetical protein AT4g31020 [imported] - thaliana >gi|2980764|emb|CAA18191.1| putative protein thaliana] >gi|7270004|emb|CAB79820.1| putative protein
  misc_feature (1)..(307): Homolog of NCBI NO: 30688887 NR Description: expressed protein [Arabidopsis thaliana]
  misc_feature (1)..(307): Homolog of NCBI NO: 15224121 NR Description: hypothetical protein; protein id: At2g24320.1
  misc_feature (1)..(307): Homolog of NCBI NO: 28393521 NR Description: unknown protein [Arabidopsis thaliana]
  misc_feature (1)..(187): Homolog of NCBI NO: 15230760 NR Description: unknown protein; protein id: At3g30380.1 thaliana] >gi|9294341|dbj|BAB02238.1| contains similarity to
  misc_feature (203)..(290): Homolog of NCBI NO: 15230760 NR Description: unknown protein; protein id: At3g30380.1 thaliana] >gi|9294341|dbj|BAB02238.1| contains similarity to
  misc_feature (41)..(187): Homolog of NCBI NO: 34911338 NR Description: P0519D04.38 [Oryza sativa (japonica
  misc_feature (203)..(288): Homolog of NCBI NO: 34911338 NR Description: P0519D04.38 [Oryza sativa (japonica
  misc_feature (1)..(39): Homolog of NCBI NO: 34911338 NR Description: P0519D04.38 [Oryza sativa (japonica
  misc_feature (2)..(202): Homolog of NCBI NO: 34905260 NR Description: P0577B11.1 [Oryza sativa (japonica >gi|29170589|dbj|BAC57808.2| putative TPA: Cgi67 serine protease
MGNVTSNVAAKFAFFPPEPATYGVTKDDETGKLVFAGVSADKNVEVHQLTTKSGNKVVATFWRHPFARFTLLYSHGNAADLGQMVELFIELRAHLRVNIMRYILKTLMPSEFNTYYDIEAVYSCLRSDYGIKQEEIILYGQSVGSGPTLHMASRLKRLRGVVLHSAILSGIRVLYPVKMTLWFDIFKVRKAHTKDLLLVGLHIYSNIDKIRHVNSQVLVIHGTNDEIVDLSHGKRLWELAKEKYDPLWVKGGGHCNLETYPEYIKHLKKFVNAMEKLSLTNPPPKQLTNEPSITETKHNRCLKFGKR

SEQ ID NO: 77328 - protein, 224 aa, Arabidopsis thaliana
  peptide (1)..(224): Ceres Seq. ID no. 12575660
  misc_feature (1)..(224): Homolog of NCBI NO: 25352163 NR Description: hypothetical protein AT4g31020 [imported] - thaliana >gi|2980764|emb|CAA18191.1| putative protein thaliana] >gi|7270004|emb|CAB79820.1| putative protein
  misc_feature (1)..(224): Homolog of NCBI NO: 30688887 NR Description: expressed protein [Arabidopsis thaliana]
  misc_feature (1)..(224): Homolog of NCBI NO: 15224121 NR Description: hypothetical protein; protein id: At2g24320.1
  misc_feature (1)..(224): Homolog of NCBI NO: 28393521 NR Description: unknown protein [Arabidopsis thaliana]
  misc_feature (1)..(104): Homolog of NCBI NO: 15230760 NR Description: unknown protein; protein id: At3g30380.1 thaliana] >gi|9294341|dbj|BAB02238.1| contains similarity to
  misc_feature (120)..(207): Homolog of NCBI NO: 15230760 NR Description: unknown protein; protein id: At3g30380.1 thaliana] >gi|9294341|dbj|BAB02238.1| contains similarity to
  misc_feature (1)..(104): Homolog of NCBI NO: 34911338 NR Description: P0519D04.38 [Oryza sativa (japonica
  misc_feature (120)..(205): Homolog of NCBI NO: 34911338 NR Description: P0519D04.38 [Oryza sativa (japonica
  misc_feature (1)..(119): Homolog of NCBI NO: 34905260 NR Description: P0577B11.1 [Oryza sativa (japonica >gi|29170589|dbj|BAC57808.2| putative TPA: Cgi67 serine protease
  misc_feature (120)..(195): Homolog of NCBI NO: 34905260 NR Description: P0577B11.1 [Oryza sativa (japonica >gi|29170589|dbj|BAC57808.2| putative TPA: Cgi67 serine protease
MVELFIELRAHLRVNIMRYILKTLMPSEFNTYYDIEAVYSCLRSDYGIKQEEIILYGQSVGSGPTLHMASRLKRLRGVVLHSAILSGIRVLYPVKMTLWFDIFKVRKAHTKDLLLVGLHIYSNIDKIRHVNSQVLVIHGTNDEIVDLSHGKRLWELAKEKYDPLWVKGGGHCNLETYPEYIKHLKKFVNAMEKLSLTNPPPKQLTNEPSITETKHNRCLKFGKR

SEQ ID NO: 77329 - protein, 208 aa, Arabidopsis thaliana
  peptide (1)..(208): Ceres Seq. ID no. 12575661
  misc_feature (1)..(208): Homolog of NCBI NO: 25352163 NR Description: hypothetical protein AT4g31020 [imported] - thaliana >gi|2980764|emb|CAA18191.1| putative protein thaliana] >gi|7270004|emb|CAB79820.1| putative protein
  misc_feature (1)..(208): Homolog of NCBI NO: 30688887 NR Description: expressed protein [Arabidopsis thaliana]
  misc_feature (1)..(208): Homolog of NCBI NO: 15224121 NR Description: hypothetical protein; protein id: At2g24320.1
  misc_feature (1)..(208): Homolog of NCBI NO: 28393521 NR Description: unknown protein [Arabidopsis thaliana]
  misc_feature (1)..(88): Homolog of NCBI NO: 15230760 NR Description: unknown protein; protein id: At3g30380.1 thaliana] >gi|9294341|dbj|BAB02238.1| contains similarity to
  misc_feature (104)..(191): Homolog of NCBI NO: 15230760 NR Description: unknown protein; protein id: At3g30380.1 thaliana] >gi|9294341|dbj|BAB02238.1| contains similarity to
  misc_feature (1)..(88): Homolog of NCBI NO: 34911338 NR Description: P0519D04.38 [Oryza sativa (japonica
  misc_feature (104)..(189): Homolog of NCBI NO: 34911338 NR Description: P0519D04.38 [Oryza sativa (japonica
  misc_feature (1)..(103): Homolog of NCBI NO: 34905260 NR Description: P0577B11.1 [Oryza sativa (japonica >gi|29170589|dbj|BAC57808.2| putative TPA: Cgi67 serine protease
  misc_feature (104)..(179): Homolog of NCBI NO: 34905260 NR Description: P0577B11.1 [Oryza sativa (japonica >gi|29170589|dbj|BAC57808.2| putative TPA: Cgi67 serine protease
MRYILKTLMPSEFNTYYDIEAVYSCLRSDYGIKQEEIILYGQSVGSGPTLHMASRLKRLRGVVLHSAILSGIRVLYPVKMTLWFDIFKVRKAHTKDLLLVGLHIYSNIDKIRHVNSQVLVIHGTNDEIVDLSHGKRLWELAKEKYDPLWVKGGGHCNLETYPEYIKHLKKFVNAMEKLSLTNPPPKQLTNEPSITETKHNRCLKFGKR

SEQ ID NO: 77330 - DNA, 2258 bp, Arabidopsis thaliana
  misc_feature (1)..(2258): Ceres Seq. ID no. 12575666
  misc_feature: MA Experiment ID: 20000184 Result: Down-regulated in Transcription
  misc_feature: MA Experiment 20000184 PARAMETER Experiment Name: At_Shoots__P Parameter: Age (day) Value: 7
  misc_feature: MA Experiment 20000184 PARAMETER Experiment Name: At_Shoots__P Parameter: Tissue Value: Shoots vs. Whole Plant
  misc_feature: MA Experiment ID: 20000496 Result: Up-regulated in Transcription
  misc_feature: MA Experiment 20000496 PARAMETER Experiment Name: At_Guard_Cells_P Parameter: Harvest Date Value: 7/19/2002
  misc_feature: MA Experiment 20000496 PARAMETER Experiment Name: At_Guard_Cells_P Parameter: Organism Value: Canola
  misc_feature: MA Experiment 20000496 PARAMETER Experiment Name: At_Guard_Cells_P Parameter: Tissue Value: Guard Cells vs. Leaves
  misc_feature: MA Experiment ID: 20001247 Result: Down-regulated in Transcription
  misc_feature: MA Experiment 20001247 PARAMETER Experiment Name: At_Far-red-induction_P Parameter: Age (day) Value: 7
  misc_feature: MA Experiment 20001247 PARAMETER Experiment Name: At_Far-red-induction_P Parameter: Light Value: Far-red vs. White
  misc_feature: MA Experiment 20001247 PARAMETER Experiment Name: At_Far-red-induction_P Parameter: Organism Value: A. thaliana
  misc_feature: MA Experiment 20001247 PARAMETER Experiment Name: At_Far-red-induction_P Parameter: Plant Line Value: Columbia
  misc_feature: MA Experiment 20001247 PARAMETER Experiment Name: At_Far-red-induction_P Parameter: Timepoint (hr) Value: 1
  misc_feature: MA Experiment 20001247 PARAMETER Experiment Name: At_Far-red-induction_P Parameter: Tissue Value: Whole Plant
  misc_feature: MA Experiment ID: 20001451 Result: Down-regulated in Transcription
  misc_feature: MA Experiment 20001451 PARAMETER Experiment Name: At_Far-red-induction_P Parameter: Age (day) Value: 7
  misc_feature: MA Experiment 20001451 PARAMETER Experiment Name: At_Far-red-induction_P Parameter: Light Value: Far-red vs. White
  misc_feature: MA Experiment 20001451 PARAMETER Experiment Name: At_Far-red-induction_P Parameter: Organism Value: A. thaliana
  misc_feature: MA Experiment 20001451 PARAMETER Experiment Name: At_Far-red-induction_P Parameter: Plant Line Value: Columbia
  misc_feature: MA Experiment 20001451 PARAMETER Experiment Name: At_Far-red-induction_P Parameter: Timepoint (hr) Value: 24
  misc_feature: MA Experiment 20001451 PARAMETER Experiment Name: At_Far-red-induction_P Parameter: Tissue Value: Whole Plant
agaattatcgggagaacttcagacatgctctgctccgaccgaatctcatcatctatcaatttcatgtgacttattaaattgttctgtattctaagaagtggttccgtagaagcggagcaatgccgatttctatggaacttccagttttctctactctccgagtaccattgttctctcgtttagctttacttcctacttttggagttccgttttcgtcccttggtgctacgacgcgattgaactgtacatctcgaaaggcgcgtcggatttgcgtgatgtgcttagtgagggattctgctccgatagagacgtgcgagagagctggagaagatgggtctgacgagttcattgaggttcttgtcatcggtagtcgcaaggagtctatcatggattcatgcttggattctccttttccttctcttcctctgcgattttggagtattagcaaggacagctctggaggtttagtgttacagcagaggctcaatcaccaagataatgccttgaagaccatgaatccaattgagctgttacagtcacgtccaagggccttcatccttgtggctagtgctggatatggttctgaccaggttgaagctattaatattcttagtgcagtaagatctgggggtaacttagctgttgctgtgctattaaagcctttcagctttgaaggccgaaagcgtctagaagaggttaacgagttggctagaaaactgcagcaacacaccaatttctgtatagatatcgacatagaggttttactacagaaggatttggtaactttggacgaggcgctgagaaatgcaaacaatgctgtgtctatggcaataaatgcagcttccgctctgataagtgggatgcatggaaacttcatcgatgtgatgcataaagatcttaaagaacttgaaggttcagaagttaaaacgattctagaaagttacaaagaggcaaaggttggttttggagttggtcacaaccttaagacttcgatattacgagctatatatgactgcccattctttcgacctggtctaaaggatctaaacgctattatatgcattgtggctagttcggtacctctccagaagaaagacgtgaaaacaattcttcgtactttccgtcaaactatggagtacactggagatattatagtatctactgttcatgagcctgatctggagcctaaactccaaaaagaaacaaatattggacttggagagacgccagtttcaattaaagattcagcagactctactgacgtaaaaacttccaatcagaatattgaggaatttgaaattgactctgaggacctcctggaagtttctgagaacggtgatgatagtgaatacccattaaaagagggggaaccatccagaaacagtcgtctggatcttaaagatgaaaatggtgctgaaagggagcctattgccaattggagtatggatcagggatatcagattgagcagaaatggcaagctgattctggagacactgcagtgcttagcctgggaattgtcaaccttcctgttggtgtgagaccttcgaagaaattgaacagtaatctcagtgttgccagtcaactctctaggaaggctgattccagagaagaatcatttttcaaccctaatggctcgacaaaagactctagtgatactgcatctaccctgctatctgagaaatatgctgattttacaaagcaaagaaatctatccgctcgagcatcgtctatgctggaagctgaacgagattcatcaaaaagatggagtcctattcttgagatgcagtacagaggaggacttttcaagggaagatgccaaggaggccttcccgaaggaaagacagacttcttagttaatccgaaagtaacagctgactattcccaccagggtcgtttggtacttggagatggaagcatatatgatggaatgtggcacaacggtaaaagatctggtctcggaacattctacttcaagaatggagacgtgttccaaggcacatggagagaagatttaatacacggaaagggttggttttatttccacaaaggtgatcgatggtttgcaaatttctggaaaggaaaagccagtggcgaaggccggttctattcaaagtccggtgagatattctttggacatttcaaagatggttggcgccacggacaattcctctgtatagatttggatggaacaagatactctgaaacttgggacgacggtgttctcattgaccggaaacaagtggacgccggagattga

SEQ ID NO: 77331 - protein, 712 aa, Arabidopsis thaliana
  peptide (1)..(712): Ceres Seq. ID no. 12575667
  misc_feature (624)..(646): Pfam Name: MORN repeat Pfam Description: MORN repeat
  misc_feature (590)..(697): Homolog of NCBI NO: 29346157 NR Description: putative phosphatidylinositol-4-phosphate 5-kinase
  misc_feature (559)..(700): Homolog of NCBI NO: 40062709 NR Description: MORN repeat protein [uncultured bacterium 314]
  misc_feature (557)..(701): Homolog of NCBI NO: 22330351 NR Description: putative phosphatidylinositol-4-phosphate protein id: At1g60890.1, supported by cDNA: gi_18491176
  misc_feature (557)..(701): Homolog of NCBI NO: 25404297 NR Description: hypothetical protein T7P1.4 [imported] -
  misc_feature (555)..(702): Homolog of NCBI NO: 29247595 NR Description: GLP_302_43026_44162 [Giardia lamblia ATCC 50803]
  misc_feature (598)..(700): Homolog of NCBI NO: 40063384 NR Description: MORN repeat family protein [uncultured bacterium
  misc_feature (559)..(701): Homolog of NCBI NO: 29346157 NR Description: putative phosphatidylinositol-4-phosphate 5-kinase
  misc_feature (556)..(701): Homolog of NCBI NO: 40062709 NR Description: MORN repeat protein [uncultured bacterium 314]
  misc_feature (554)..(699): Homolog of NCBI NO: 23508109 NR Description: hypothetical protein [Plasmodium falciparum 3D7]
  misc_feature (590)..(708): Homolog of NCBI NO: 28211437 NR Description: putative phosphatidylinositol 4-phosphate
MPISMELPVFSTLRVPLFSRLALLPTFGVPFSSLGATTRLNCTSRKARRICVMCLVRDSAPIETCERAGEDGSDEFIEVLVIGSRKESIMDSCLDSPFPSLPLRFWSISKDSSGGLVLQQRLNHQDNALKTMNPIELLQSRPRAFILVASAGYGSDQVEAINILSAVRSGGNLAVAVLLKPFSFEGRKRLEEVNELARKLQQHTNFCIDIDIEVLLQKDLVTLDEALRNANNAVSMAINAASALISGMHGNFIDVMHKDLKELEGSEVKTILESYKEAKVGFGVGHNLKTSILRAIYDCPFFRPGLKDLNAIICIVASSVPLQKKDVKTILRTFRQTMEYTGDIIVSTVHEPDLEPKLQKETNIGLGETPVSIKDSADSTDVKTSNQNIEEFEIDSEDLLEVSENGDDSEYPLKEGEPSRNSRLDLKDENGAEREPIANWSMDQGYQIEQKWQADSGDTAVLSLGIVNLPVGVRPSKKLNSNLSVASQLSRKADSREESFFNPNGSTKDSSDTASTLLSEKYADFTKQRNLSARASSMLEAERDSSKRWSPILEMQYRGGLFKGRCQGGLPEGKTDFLVNPKVTADYSHQGRLVLGDGSIYDGMWHNGKRSGLGTFYFKNGDVFQGTWREDLIHGKGWFYFHKGDRWFANFWKGKASGEGRFYSKSGEIFFGHFKDGWRHGQFLCIDLDGTRYSETWDDGVLIDRKQVDAGD

SEQ ID NO: 77332 - protein, 708 aa, Arabidopsis thaliana
  peptide (1)..(708): Ceres Seq. ID no. 12575668
  misc_feature (620)..(642): Pfam Name: MORN repeat Pfam Description: MORN repeat
  misc_feature (586)..(693): Homolog of NCBI NO: 29346157 NR Description: putative phosphatidylinositol-4-phosphate 5-kinase
  misc_feature (555)..(696): Homolog of NCBI NO: 40062709 NR Description: MORN repeat protein [uncultured bacterium 314]
  misc_feature (553)..(697): Homolog of NCBI NO: 22330351 NR Description: putative phosphatidylinositol-4-phosphate protein id: At1g60890.1, supported by cDNA: gi_18491176
  misc_feature (553)..(697): Homolog of NCBI NO: 25404297 NR Description: hypothetical protein T7P1.4 [imported] -
  misc_feature (551)..(698): Homolog of NCBI NO: 29247595 NR Description: GLP_302_43026_44162 [Giardia lamblia ATCC 50803]
  misc_feature (594)..(696): Homolog of NCBI NO: 40063384 NR Description: MORN repeat family protein [uncultured bacterium
  misc_feature (555)..(697): Homolog of NCBI NO: 29346157 NR Description: putative phosphatidylinositol-4-phosphate 5-kinase
  misc_feature (552)..(697): Homolog of NCBI NO: 40062709 NR Description: MORN repeat protein [uncultured bacterium 314]
  misc_feature (550)..(695): Homolog of NCBI NO: 23508109 NR Description: hypothetical protein [Plasmodium falciparum 3D7]
  misc_feature (586)..(704): Homolog of NCBI NO: 28211437 NR Description: putative phosphatidylinositol 4-phosphate
MELPVFSTLRVPLFSRLALLPTFGVPFSSLGATTRLNCTSRKARRICVMCLVRDSAPIETCERAGEDGSDEFIEVLVIGSRKESIMDSCLDSPFPSLPLRFWSISKDSSGGLVLQQRLNHQDNALKTMNPIELLQSRPRAFILVASAGYGSDQVEAINILSAVRSGGNLAVAVLLKPFSFEGRKRLEEVNELARKLQQHTNFCIDIDIEVLLQKDLVTLDEALRNANNAVSMAINAASALISGMHGNFIDVMHKDLKELEGSEVKTILESYKEAKVGFGVGHNLKTSILRAIYDCPFFRPGLKDLNAIICIVASSVPLQKKDVKTILRTFRQTMEYTGDIIVSTVHEPDLEPKLQKETNIGLGETPVSIKDSADSTDVKTSNQNIEEFEIDSEDLLEVSENGDDSEYPLKEGEPSRNSRLDLKDENGAEREPIANWSMDQGYQIEQKWQADSGDTAVLSLGIVNLPVGVRPSKKLNSNLSVASQLSRKADSREESFFNPNGSTKDSSDTASTLLSEKYADFTKQRNLSARASSMLEAERDSSKRWSPILEMQYRGGLFKGRCQGGLPEGKTDFLVNPKVTADYSHQGRLVLGDGSIYDGMWHNGKRSGLGTFYFKNGDVFQGTWREDLIHGKGWFYFHKGDRWFANFWKGKASGEGRFYSKSGEIFFGHFKDGWRHGQFLCIDLDGTRYSETWDDGVLIDRKQVDAGD

SEQ ID NO: 77333 - protein, 660 aa, Arabidopsis thaliana
  peptide (1)..(660): Ceres Seq. ID no. 12575669
  misc_feature (572)..(594): Pfam Name: MORN repeat Pfam Description: MORN repeat
  misc_feature (538)..(645): Homolog of NCBI NO: 29346157 NR Description: putative phosphatidylinositol-4-phosphate 5-kinase
  misc_feature (507)..(648): Homolog of NCBI NO: 40062709 NR Description: MORN repeat protein [uncultured bacterium 314]
  misc_feature (505)..(649): Homolog of NCBI NO: 22330351 NR Description: putative phosphatidylinositol-4-phosphate protein id: At1g60890.1, supported by cDNA: gi_18491176
  misc_feature (505)..(649): Homolog of NCBI NO: 25404297 NR Description: hypothetical protein T7P1.4 [imported] -
  misc_feature (503)..(650): Homolog of NCBI NO: 29247595 NR Description: GLP_302_43026_44162 [Giardia lamblia ATCC 50803]
  misc_feature (546)..(648): Homolog of NCBI NO: 40063384 NR Description: MORN repeat family protein [uncultured bacterium
  misc_feature (507)..(649): Homolog of NCBI NO: 29346157 NR Description: putative phosphatidylinositol-4-phosphate 5-kinase
  misc_feature (504)..(649): Homolog of NCBI NO: 40062709 NR Description: MORN repeat protein [uncultured bacterium 314]
  misc_feature (502)..(647): Homolog of NCBI NO: 23508109 NR Description: hypothetical protein [Plasmodium falciparum 3D7]
  misc_feature (538)..(656): Homolog of NCBI NO: 28211437 NR Description: putative phosphatidylinositol 4-phosphate
MCLVRDSAPIETCERAGEDGSDEFIEVLVIGSRKESIMDSCLDSPFPSLPLRFWSISKDSSGGLVLQQRLNHQDNALKTMNPIELLQSRPRAFILVASAGYGSDQVEAINILSAVRSGGNLAVAVLLKPFSFEGRKRLEEVNELARKLQQHTNFCIDIDIEVLLQKDLVTLDEALRNANNAVSMAINAASALISGMHGNFIDVMHKDLKELEGSEVKTILESYKEAKVGFGVGHNLKTSILRAIYDCPFFRPGLKDLNAIICIVASSVPLQKKDVKTILRTFRQTMEYTGDIIVSTVHEPDLEPKLQKETNIGLGETPVSIKDSADSTDVKTSNQNIEEFEIDSEDLLEVSENGDDSEYPLKEGEPSRNSRLDLKDENGAEREPIANWSMDQGYQIEQKWQADSGDTAVLSLGIVNLPVGVRPSKKLNSNLSVASQLSRKADSREESFFNPNGSTKDSSDTASTLLSEKYADFTKQRNLSARASSMLEAERDSSKRWSPILEMQYRGGLFKGRCQGGLPEGKTDFLVNPKVTADYSHQGRLVLGDGSIYDGMWHNGKRSGLGTFYFKNGDVFQGTWREDLIHGKGWFYFHKGDRWFANFWKGKASGEGRFYSKSGEIFFGHFKDGWRHGQFLCIDLDGTRYSETWDDGVLIDRKQVDAGD

SEQ ID NO: 77334 - DNA, 1689 bp, Arabidopsis thaliana
  misc_feature (1)..(1689): Ceres Seq. ID no. 12575749
  misc_feature: MA Experiment ID: 20000166 Result: Down-regulated in Transcription
  misc_feature: MA Experiment 20000166 PARAMETER Experiment Name: At_100uM_ABA_P Parameter: Age (day) Value: 14
  misc_feature: MA Experiment 20000166 PARAMETER Experiment Name: At_100uM_ABA_P Parameter: Organism Value: A. thaliana
  misc_feature: MA Experiment 20000166 PARAMETER Experiment Name: At_100uM_ABA_P Parameter: Plant Line Value: WS
  misc_feature: MA Experiment 20000166 PARAMETER Experiment Name: At_100uM_ABA_P Parameter: Timepoint (hr) Value: 1
  misc_feature: MA Experiment 20000166 PARAMETER Experiment Name: At_100uM_ABA_P Parameter: Tissue Value: Aerial
  misc_feature: MA Experiment 20000166 PARAMETER Experiment Name: At_100uM_ABA_P Parameter: Treatment Value: 100uM ABA vs. No Treatment
  misc_feature: MA Experiment ID: 20000173 Result: Down-regulated in Transcription
  misc_feature: MA Experiment 20000173 PARAMETER Experiment Name: At_42deg_Heat_P Parameter: Age (day) Value: 14
  misc_feature: MA Experiment 20000173 PARAMETER Experiment Name: At_42deg_Heat_P Parameter: Organism Value: A. thaliana
  misc_feature: MA Experiment 20000173 PARAMETER Experiment Name: At_42deg_Heat_P Parameter: Plant Line Value: WS
  misc_feature: MA Experiment 20000173 PARAMETER Experiment Name: At_42deg_Heat_P Parameter: Temperature (deg C) Value: 42 vs. 22
  misc_feature: MA Experiment 20000173 PARAMETER Experiment Name: At_42deg_Heat_P Parameter: Timepoint (hr) Value: 6
  misc_feature: MA Experiment 20000173 PARAMETER Experiment Name: At_42deg_Heat_P Parameter: Tissue Value: Aerial
  misc_feature: MA Experiment ID: 20000185 Result: Down-regulated in Transcription
  misc_feature: MA Experiment 20000185 PARAMETER Experiment Name: At_Roots__P Parameter: Age (day) Value: 7 vs. 21
  misc_feature: MA Experiment 20000185 PARAMETER Experiment Name: At_Roots__P Parameter: Organism Value: A. thaliana
  misc_feature: MA Experiment 20000185 PARAMETER Experiment Name: At_Roots__P Parameter: Tissue Value: Roots vs. Whole Plant
  misc_feature: MA Experiment ID: 20000264 Result: Down-regulated in Transcription
  misc_feature: MA Experiment 20000264 PARAMETER Experiment Name: At_Open_Flower_P Parameter: Age (day) Value: 21
  misc_feature: MA Experiment 20000264 PARAMETER Experiment Name: At_Open_Flower_P Parameter: Plant Line Value: WS
  misc_feature: MA Experiment 20000264 PARAMETER Experiment Name: At_Open_Flower_P Parameter: Tissue Value: Open Flower vs. Whole Plant
  misc_feature: MA Experiment ID: 20000265 Result: Down-regulated in Transcription
  misc_feature: MA Experiment 20000265 PARAMETER Experiment Name: At_Open_Flower_P Parameter: Age (day) Value: 21
  misc_feature: MA Experiment 20000265 PARAMETER Experiment Name: At_Open_Flower_P Parameter: Plant Line Value: WS
  misc_feature: MA Experiment 20000265 PARAMETER Experiment Name: At_Open_Flower_P Parameter: Tissue Value: Closed Flower vs. Whole Plant
  misc_feature: MA Experiment ID: 20000268 Result: Down-regulated in Transcription
  misc_feature: MA Experiment 20000268 PARAMETER Experiment Name: At_100mM_NaCl__P Parameter: Age (day) Value: 14
  misc_feature: MA Experiment 20000268 PARAMETER Experiment Name: At_100mM_NaCl__P Parameter: Organism Value: A. thaliana
  misc_feature: MA Experiment 20000268 PARAMETER Experiment Name: At_100mM_NaCl__P Parameter: Plant Line Value: WS
  misc_feature: MA Experiment 20000268 PARAMETER Experiment Name: At_100mM_NaCl__P Parameter: Timepoint (hr) Value: 6
  misc_feature: MA Experiment 20000268 PARAMETER Experiment Name: At_100mM_NaCl__P Parameter: Tissue Value: Whole Plant
  misc_feature: MA Experiment 20000268 PARAMETER Experiment Name: At_100mM_NaCl__P Parameter: Treatment Value: 100mM NaCl vs. No Treatment
  misc_feature: MA Experiment ID: 20000286 Result: Down-regulated in Transcription
  misc_feature: MA Experiment 20000286 PARAMETER Experiment Name: At_Open_Flower_P Parameter: Age (day) Value: 21
  misc_feature: MA Experiment 20000286 PARAMETER Experiment Name: At_Open_Flower_P Parameter: Plant Line Value: WS
  misc_feature: MA Experiment 20000286 PARAMETER Experiment Name: At_Open_Flower_P Parameter: Tissue Value: Half Open vs. Whole Plant
  misc_feature: MA Experiment ID: 20000436 Result: Down-regulated in Transcription
  misc_feature: MA Experiment 20000436 PARAMETER Experiment Name: At_Drought_P Parameter: Age (day) Value: 7
  misc_feature: MA Experiment 20000436 PARAMETER Experiment Name: At_Drought_P Parameter: Organism Value: A. thaliana
  misc_feature: MA Experiment 20000436 PARAMETER Experiment Name: At_Drought_P Parameter: Plant Line Value: WS
  misc_feature: MA Experiment 20000436 PARAMETER Experiment Name: At_Drought_P Parameter: Timepoint (hr) Value: 12
  misc_feature: MA Experiment 20000436 PARAMETER Experiment Name: At_Drought_P Parameter: Tissue Value: Whole Plant
  misc_feature: MA Experiment 20000436 PARAMETER Experiment Name: At_Drought_P Parameter: Treatment Value: Drought vs. No Drought
  misc_feature: MA Experiment ID: 20000437 Result: Down-regulated in Transcription
  misc_feature: MA Experiment 20000437 PARAMETER Experiment Name: At_Drought_P Parameter: Age (day) Value: 8
  misc_feature: MA Experiment 20000437 PARAMETER Experiment Name: At_Drought_P Parameter: Organism Value: A. thaliana
  misc_feature: MA Experiment 20000437 PARAMETER Experiment Name: At_Drought_P Parameter: Plant Line Value: WS
  misc_feature: MA Experiment 20000437 PARAMETER Experiment Name: At_Drought_P Parameter: Timepoint (hr) Value: 24
  misc_feature: MA Experiment 20000437 PARAMETER Experiment Name: At_Drought_P Parameter: Tissue Value: Whole Plant
  misc_feature: MA Experiment 20000437 PARAMETER Experiment Name: At_Drought_P Parameter: Treatment Value: Drought vs. No Drought
  misc_feature: MA Experiment ID: 20000439 Result: Down-regulated in Transcription
  misc_feature: MA Experiment 20000439 PARAMETER Experiment Name: At_Roots__P Parameter: Age (day) Value: 14 vs. 21
  misc_feature: MA Experiment 20000439 PARAMETER Experiment Name: At_Roots__P Parameter: Organism Value: A. thaliana
  misc_feature: MA Experiment 20000439 PARAMETER Experiment Name: At_Roots__P Parameter: Tissue Value: Roots vs. Whole Plant
  misc_feature: MA Experiment ID: 20000453 Result: Down-regulated in Transcription
  misc_feature: MA Experiment 20000453 PARAMETER Experiment Name: At_100uM_ABA_P Parameter: Age (day) Value: 15
  misc_feature: MA Experiment 20000453 PARAMETER Experiment Name: At_100uM_ABA_P Parameter: Organism Value: A. thaliana
  misc_feature: MA Experiment 20000453 PARAMETER Experiment Name: At_100uM_ABA_P Parameter: Plant Line Value: WS
  misc_feature: MA Experiment 20000453 PARAMETER Experiment Name: At_100uM_ABA_P Parameter: Timepoint (hr) Value: 24
  misc_feature: MA Experiment 20000453 PARAMETER Experiment Name: At_100uM_ABA_P Parameter: Tissue Value: Aerial
  misc_feature: MA Experiment 20000453 PARAMETER Experiment Name: At_100uM_ABA_P Parameter: Treatment Value: 100uM ABA vs. No Treatment
  misc_feature: MA Experiment ID: 20000495 Result: Down-regulated in Transcription
  misc_feature: MA Experiment 20000495 PARAMETER Experiment Name: At_Guard_Cells_P Parameter: Harvest Date Value: 8/2/2002
  misc_feature: MA Experiment 20000495 PARAMETER Experiment Name: At_Guard_Cells_P Parameter: Organism Value: A. thaliana
  misc_feature: MA Experiment 20000495 PARAMETER Experiment Name: At_Guard_Cells_P Parameter: Tissue Value: Guard Cells vs. Leaves
  misc_feature: MA Experiment ID: 20000794 Result: Down-regulated in Transcription
  misc_feature: MA Experiment 20000794 PARAMETER Experiment Name: At_Petals_P Parameter: Age (day) Value: 23-25 days
  misc_feature: MA Experiment 20000794 PARAMETER Experiment Name: At_Petals_P Parameter: Plant Line Value: WS
  misc_feature: MA Experiment 20000794 PARAMETER Experiment Name: At_Petals_P Parameter: Tissue Value: Petals vs. Whole plant
  misc_feature: MA Experiment ID: 20001247 Result: Up-regulated in Transcription
  misc_feature: MA Experiment 20001247 PARAMETER Experiment Name: At_Far-red-induction_P Parameter: Age (day) Value: 7
  misc_feature: MA Experiment 20001247 PARAMETER Experiment Name: At_Far-red-induction_P Parameter: Light Value: Far-red vs. White
  misc_feature: MA Experiment 20001247 PARAMETER Experiment Name: At_Far-red-induction_P Parameter: Organism Value: A. thaliana
  misc_feature: MA Experiment 20001247 PARAMETER Experiment Name: At_Far-red-induction_P Parameter: Plant Line Value: Columbia
  misc_feature: MA Experiment 20001247 PARAMETER Experiment Name: At_Far-red-induction_P Parameter: Timepoint (hr) Value: 1
  misc_feature: MA Experiment 20001247 PARAMETER Experiment Name: At_Far-red-induction_P Parameter: Tissue Value: Whole Plant
  misc_feature: MA Experiment ID: 20001554 Result: Down-regulated in Transcription
  misc_feature: MA Experiment 20001554 PARAMETER Experiment Name: At_Drought_Soil_Dry_P Parameter: Age (day) Value: 21
  misc_feature: MA Experiment 20001554 PARAMETER Experiment Name: At_Drought_Soil_Dry_P Parameter: Organism Value: A. thaliana
  misc_feature: MA Experiment 20001554 PARAMETER Experiment Name: At_Drought_Soil_Dry_P Parameter: Plant Line Value: WS
  misc_feature: MA Experiment 20001554 PARAMETER Experiment Name: At_Drought_Soil_Dry_P Parameter: Post Timepoint (hr) Value: None
  misc_feature: MA Experiment 20001554 PARAMETER Experiment Name: At_Drought_Soil_Dry_P Parameter: Post-Treatment Value: None
  misc_feature: MA Experiment 20001554 PARAMETER Experiment Name: At_Drought_Soil_Dry_P Parameter: Timepoint (day) Value: 7
  misc_feature: MA Experiment 20001554 PARAMETER Experiment Name: At_Drought_Soil_Dry_P Parameter: Treatment Value: Drought vs. No Drought
  misc_feature: MA Experiment ID: 20001555 Result: Down-regulated in Transcription
  misc_feature: MA Experiment 20001555 PARAMETER Experiment Name: At_Drought_Soil_Dry_P Parameter: Age (day) Value: 24
  misc_feature: MA Experiment 20001555 PARAMETER Experiment Name: At_Drought_Soil_Dry_P Parameter: Organism Value: A. thaliana
  misc_feature: MA Experiment 20001555 PARAMETER Experiment Name: At_Drought_Soil_Dry_P Parameter: Plant Line Value: WS
  misc_feature: MA Experiment 20001555 PARAMETER Experiment Name: At_Drought_Soil_Dry_P Parameter: Post Timepoint (hr) Value: None
  misc_feature: MA Experiment 20001555 PARAMETER Experiment Name: At_Drought_Soil_Dry_P Parameter: Post-Treatment Value: None
  misc_feature: MA Experiment 20001555 PARAMETER Experiment Name: At_Drought_Soil_Dry_P Parameter: Timepoint (day) Value: 10
  misc_feature: MA Experiment 20001555 PARAMETER Experiment Name: At_Drought_Soil_Dry_P Parameter: Treatment Value: Drought vs. No Drought
  misc_feature: MA Experiment ID: 20001556 Result: Down-regulated in Transcription
  misc_feature: MA Experiment 20001556 PARAMETER Experiment Name: At_Drought_Soil_Dry_P Parameter: Age (day) Value: 26
  misc_feature: MA Experiment 20001556 PARAMETER Experiment Name: At_Drought_Soil_Dry_P Parameter: Organism Value: A. thaliana
  misc_feature: MA Experiment 20001556 PARAMETER Experiment Name: At_Drought_Soil_Dry_P Parameter: Plant Line Value: WS
  misc_feature: MA Experiment 20001556 PARAMETER Experiment Name: At_Drought_Soil_Dry_P Parameter: Post Timepoint (hr) Value: None
  misc_feature: MA Experiment 20001556 PARAMETER Experiment Name: At_Drought_Soil_Dry_P Parameter: Post-Treatment Value: None
  misc_feature: MA Experiment 20001556 PARAMETER Experiment Name: At_Drought_Soil_Dry_P Parameter: Timepoint (day) Value: 12
  misc_feature: MA Experiment 20001556 PARAMETER Experiment Name: At_Drought_Soil_Dry_P Parameter: Treatment Value: Drought vs. No Drought
  misc_feature: MA Experiment ID: 20001558 Result: Up-regulated in Transcription
  misc_feature: MA Experiment 20001558 PARAMETER Experiment Name: At_Drought_Soil_Dry_P Parameter: Age (day) Value: 27
  misc_feature: MA Experiment 20001558 PARAMETER Experiment Name: At_Drought_Soil_Dry_P Parameter: Organism Value: A. thaliana
  misc_feature: MA Experiment 20001558 PARAMETER Experiment Name: At_Drought_Soil_Dry_P Parameter: Plant Line Value: WS
  misc_feature: MA Experiment 20001558 PARAMETER Experiment Name: At_Drought_Soil_Dry_P Parameter: Post Timepoint (hr) Value: 6
  misc_feature: MA Experiment 20001558 PARAMETER Experiment Name: At_Drought_Soil_Dry_P Parameter: Post-Treatment Value: Re-Water vs. No Drought
  misc_feature: MA Experiment 20001558 PARAMETER Experiment Name: At_Drought_Soil_Dry_P Parameter: Timepoint (day) Value: 13
  misc_feature: MA Experiment 20001558 PARAMETER Experiment Name: At_Drought_Soil_Dry_P Parameter: Treatment Value: Drought vs. No Drought
  misc_feature: MA Experiment ID: 20001904 Result: Down-regulated in Transcription
  misc_feature: MA Experiment 20001904 PARAMETER Experiment Name: At_Drought_Reproduction_P Parameter: Age (day) Value: 37
  misc_feature: MA Experiment 20001904 PARAMETER Experiment Name: At_Drought_Reproduction_P Parameter: Organism Value: A. thaliana
  misc_feature: MA Experiment 20001904 PARAMETER Experiment Name: At_Drought_Reproduction_P Parameter: Plant Line Value: WS
  misc_feature: MA Experiment 20001904 PARAMETER Experiment Name: At_Drought_Reproduction_P Parameter: Timepoint (day) Value: 7
  misc_feature: MA Experiment 20001904 PARAMETER Experiment Name: At_Drought_Reproduction_P Parameter: Tissue Value: Rosettes
  misc_feature: MA Experiment 20001904 PARAMETER Experiment Name: At_Drought_Reproduction_P Parameter: Treatment Value: Drought vs. No Drought
  misc_feature: MA Experiment ID: 20001906 Result: Down-regulated in Transcription
  misc_feature: MA Experiment 20001906 PARAMETER Experiment Name: At_Drought_Reproduction_P Parameter: Age (day) Value: 35
  misc_feature: MA Experiment 20001906 PARAMETER Experiment Name: At_Drought_Reproduction_P Parameter: Organism Value: A. thaliana
  misc_feature: MA Experiment 20001906 PARAMETER Experiment Name: At_Drought_Reproduction_P Parameter: Plant Line Value: WS
  misc_feature: MA Experiment 20001906 PARAMETER Experiment Name: At_Drought_Reproduction_P Parameter: Timepoint (day) Value: 5
  misc_feature: MA Experiment 20001906 PARAMETER Experiment Name: At_Drought_Reproduction_P Parameter: Tissue Value: Siliques
  misc_feature: MA Experiment 20001906 PARAMETER Experiment Name: At_Drought_Reproduction_P Parameter: Treatment Value: Drought vs. No Drought
  misc_feature: MA Experiment ID: 20001911 Result: Down-regulated in Transcription
  misc_feature: MA Experiment 20001911 PARAMETER Experiment Name: At_Drought_Reproduction_P Parameter: Age (day) Value: 40
  misc_feature: MA Experiment 20001911 PARAMETER Experiment Name: At_Drought_Reproduction_P Parameter: Organism Value: A. thaliana
  misc_feature: MA Experiment 20001911 PARAMETER Experiment Name: At_Drought_Reproduction_P Parameter: Plant Line Value: WS
  misc_feature: MA Experiment 20001911 PARAMETER Experiment Name: At_Drought_Reproduction_P Parameter: Timepoint (day) Value: 10
  misc_feature: MA Experiment 20001911 PARAMETER Experiment Name: At_Drought_Reproduction_P Parameter: Tissue Value: Flowers
  misc_feature: MA Experiment 20001911 PARAMETER Experiment Name: At_Drought_Reproduction_P Parameter: Treatment Value: Drought vs. No Drought
aaattctctctaattcgaatctctcaaagttcaaatttcaaattccgaagaagaagaagaagaaacactcgaaggtttttgtgatggatccatgtccatttgtacggctaacaatagattcactagctttgagactaccggagacagcgacgaacaagcaaatcggcggcgaagtacatccttcttctacgccgtgttactgcaaactccggatcaaacatttcccttcacagaaagcacttctccctctctcttccttctccgacgcttcatctccaccggaatcttccacttcagctccgggatttcacctcgacgccgacgcgatccgacgaatttccggtaagaagatctcactccgtgtctctgtttacgccggtcgtactggtcacacttgcggcgtcgcttcagggaaacttctaggtaaagtcgaagtagcggtggatctcgcggcggcgttgtctagaaccgtcgcgtttcataacggatggaagaaactcggtggagatggagataaaccgtcggctagattacatctattggtttgtgctgaaccggatcctcggtttgtgtttcaatttggaggtgaaccggaatgtagtcctgtggtttaccagattcaagataatctcaaacaacctgtcttcagctgcaaattcagctccgatcgtaacggaagatctcggtctctaccatcaggatttacatatagtagtagaggatggattacaagaacattatcaggtgaccagtgggaaaagaaacaagcgagagaacgtaaaggttggatgataacgatccatgatctttcgggatcacctgtagcagcagcttcaatgatcactcctttcgtggcatctccagggtctgatcgtgtttctagatcaaaccctggtgcgtggctaatccttaggcctcatgggacttgtgtcagtagttggaaaccgtggggacgtcttgaggcttggcgtgagagaggagctattgatggattgggttacaagttcgagctcgtgagggataacagtactagcaccggcattcctattgcagaagggacaatgagcacaaaacaaggaggaaagttcagcattgacaggagagtctcaggccagggagagtctccggcaatatcatcgccggtgaaagggttcgtgatgggttcgagcgtcgaaggagaagggaaagtgagcaagcctgtggtccacgtgggagcacagcatgtgacttgcatggccgacgcagctctcttcgttgctctctctgccgccgttgatctaagtgtcgacgcgtgtcagctcttctctcgtaagcttcgtaaagagctctgtcacgacgaccaaagctccctcacgtgaaaatatgttatctcatcagtgaagatacatacgtacattttgacttgacaaaagaccaatccatgaacttatgacaaagctctcttcgtcgctagctatctcggtttttcattttttttgagggatcaatttgatatgaaagtcgacaaagctgtacagacaacaatgatctttgtgttgtttgcaactttgtatcatatttatttattttttaattctttttcttctgattctctccatatgtgtgttgattatttttattatttcatatcttcattctttttaatacattggggttattcttataccaaatatactcactttctttgtg

SEQ ID NO: 77335 - protein, 451 aa, Arabidopsis thaliana
  peptide (1)..(451): Ceres Seq. ID no. 12575750
  misc_feature (279)..(447): Pfam Name: Protein of unknown function (DUF1005) Pfam Description: Protein of unknown function (DUF1005)
  misc_feature (28)..(451): Homolog of NCBI NO: 15233530 NR Description: putative protein; protein id: At4g29310.1, by cDNA: gi_20260629 [Arabidopsis thaliana]
  misc_feature (28)..(380): Homolog of NCBI NO: 15218372 NR Description: unknown protein; protein id: At1g10020.1
  misc_feature (28)..(369): Homolog of NCBI NO: 15222861 NR Description: hypothetical protein; protein id: At1g50040.1, by cDNA: gi_18389271, supported by cDNA: gi_20258934 [Arabidopsis
  misc_feature (331)..(442): Homolog of NCBI NO: 15222861 NR Description: hypothetical protein; protein id: At1g50040.1, by cDNA: gi_18389271, supported by cDNA: gi_20258934 [Arabidopsis
  misc_feature (175)..(447): Homolog of NCBI NO: 34909364 NR Description: P0638D12.14 [Oryza sativa (japonica
  misc_feature (28)..(398): Homolog of NCBI NO: 36104436 NR Description: unknown protein [Oryza sativa (japonica
  misc_feature (126)..(425): Homolog of NCBI NO: 18176372 NR Description: unknown protein [Arabidopsis thaliana]
  misc_feature (28)..(136): Homolog of NCBI NO: 18176372 NR Description: unknown protein [Arabidopsis thaliana]
  misc_feature (126)..(425): Homolog of NCBI NO: 15230917 NR Description: unknown protein; protein id: At3g19680.1, by cDNA: gi_18176371 [Arabidopsis thaliana]
  misc_feature (28)..(136): Homolog of NCBI NO: 15230917 NR Description: unknown protein; protein id: At3g19680.1, by cDNA: gi_18176371 [Arabidopsis thaliana]
ILSNSNLSKFKFQIPKKKKKKHSKVFVMDPCPFVRLTIDSLALRLPETATNKQIGGEVHPSSTPCYCKLRIKHFPSQKALLPLSSFSDASSPPESSTSAPGFHLDADAIRRISGKKISLRVSVYAGRTGHTCGVASGKLLGKVEVAVDLAAALSRTVAFHNGWKKLGGDGDKPSARLHLLVCAEPDPRFVFQFGGEPECSPVVYQIQDNLKQPVFSCKFSSDRNGRSRSLPSGFTYSSRGWITRTLSGDQWEKKQARERKGWMITIHDLSGSPVAAASMITPFVASPGSDRVSRSNPGAWLILRPHGTCVSSWKPWGRLEAWRERGAIDGLGYKFELVRDNSTSTGIPIAEGTMSTKQGGKFSIDRRVSGQGESPAISSPVKGFVMGSSVEGEGKVSKPVVHVGAQHVTCMADAALFVALSAAVDLSVDACQLFSRKLRKELCHDDQSSLT

SEQ ID NO: 77336 - protein, 424 aa, Arabidopsis thaliana
  peptide (1)..(424): Ceres Seq. ID no. 12575751
  misc_feature (252)..(420): Pfam Name: Protein of unknown function (DUF1005) Pfam Description: Protein of unknown function (DUF1005)
  misc_feature (1)..(424): Homolog of NCBI NO: 15233530 NR Description: putative protein; protein id: At4g29310.1, by cDNA: gi_20260629 [Arabidopsis thaliana]
  misc_feature (1)..(353): Homolog of NCBI NO: 15218372 NR Description: unknown protein; protein id: At1g10020.1
  misc_feature (1)..(342): Homolog of NCBI NO: 15222861 NR Description: hypothetical protein; protein id: At1g50040.1, by cDNA: gi_18389271, supported by cDNA: gi_20258934 [Arabidopsis
  misc_feature (304)..(415): Homolog of NCBI NO: 15222861 NR Description: hypothetical protein; protein id: At1g50040.1, by cDNA: gi_18389271, supported by cDNA: gi_20258934 [Arabidopsis
  misc_feature (148)..(420): Homolog of NCBI NO: 34909364 NR Description: P0638D12.14 [Oryza sativa (japonica
  misc_feature (1)..(371): Homolog of NCBI NO: 36104436 NR Description: unknown protein [Oryza sativa (japonica
  misc_feature (99)..(398): Homolog of NCBI NO: 18176372 NR Description: unknown protein [Arabidopsis thaliana]
  misc_feature (1)..(109): Homolog of NCBI NO: 18176372 NR Description: unknown protein [Arabidopsis thaliana]
  misc_feature (99)..(398): Homolog of NCBI NO: 15230917 NR Description: unknown protein; protein id: At3g19680.1, by cDNA: gi_18176371 [Arabidopsis thaliana]
  misc_feature (1)..(109): Homolog of NCBI NO: 15230917 NR Description: unknown protein; protein id: At3g19680.1, by cDNA: gi_18176371 [Arabidopsis thaliana]
MDPCPFVRLTIDSLALRLPETATNKQIGGEVHPSSTPCYCKLRIKHFPSQKALLPLSSFSDASSPPESSTSAPGFHLDADAIRRISGKKISLRVSVYAGRTGHTCGVASGKLLGKVEVAVDLAAALSRTVAFHNGWKKLGGDGDKPSARLHLLVCAEPDPRFVFQFGGEPECSPVVYQIQDNLKQPVFSCKFSSDRNGRSRSLPSGFTYSSRGWITRTLSGDQWEKKQARERKGWMITIHDLSGSPVAAASMITPFVASPGSDRVSRSNPGAWLILRPHGTCVSSWKPWGRLEAWRERGAIDGLGYKFELVRDNSTSTGIPIAEGTMSTKQGGKFSIDRRVSGQGESPAISSPVKGFVMGSSVEGEGKVSKPVVHVGAQHVTCMADAALFVALSAAVDLSVDACQLFSRKLRKELCHDDQSSLT

SEQ ID NO: 77337 - DNA, 1695 bp, Arabidopsis thaliana
  misc_feature (1)..(1695): Ceres Seq. ID no. 12575777
  misc_feature: MA Experiment ID: 20000171 Result: Down-regulated in Transcription
  misc_feature: MA Experiment 20000171 PARAMETER Experiment Name: At_42deg_Heat_P Parameter: Age (day) Value: 14
  misc_feature: MA Experiment 20000171 PARAMETER Experiment Name: At_42deg_Heat_P Parameter: Organism Value: A. thaliana
  misc_feature: MA Experiment 20000171 PARAMETER Experiment Name: At_42deg_Heat_P Parameter: Plant Line Value: WS
  misc_feature: MA Experiment 20000171 PARAMETER Experiment Name: At_42deg_Heat_P Parameter: Temperature (deg C) Value: 42 vs. 22
  misc_feature: MA Experiment 20000171 PARAMETER Experiment Name: At_42deg_Heat_P Parameter: Timepoint (hr) Value: 1
  misc_feature: MA Experiment 20000171 PARAMETER Experiment Name: At_42deg_Heat_P Parameter: Tissue Value: Aerial
  misc_feature: MA Experiment ID: 20000173 Result: Down-regulated in Transcription
  misc_feature: MA Experiment 20000173 PARAMETER Experiment Name: At_42deg_Heat_P Parameter: Age (day) Value: 14
  misc_feature: MA Experiment 20000173 PARAMETER Experiment Name: At_42deg_Heat_P Parameter: Organism Value: A. thaliana
  misc_feature: MA Experiment 20000173 PARAMETER Experiment Name: At_42deg_Heat_P Parameter: Plant Line Value: WS
  misc_feature: MA Experiment 20000173 PARAMETER Experiment Name: At_42deg_Heat_P Parameter: Temperature (deg C) Value: 42 vs. 22
  misc_feature: MA Experiment 20000173 PARAMETER Experiment Name: At_42deg_Heat_P Parameter: Timepoint (hr) Value: 6
  misc_feature: MA Experiment 20000173 PARAMETER Experiment Name: At_42deg_Heat_P Parameter: Tissue Value: Aerial
  misc_feature: MA Experiment ID: 20000184 Result: Down-regulated in Transcription
  misc_feature: MA Experiment 20000184 PARAMETER Experiment Name: At_Shoots__P Parameter: Age (day) Value: 7
  misc_feature: MA Experiment 20000184 PARAMETER Experiment Name: At_Shoots__P Parameter: Tissue Value: Shoots vs. Whole Plant
  misc_feature: MA Experiment ID: 20000794 Result: Up-regulated in Transcription
  misc_feature: MA Experiment 20000794 PARAMETER Experiment Name: At_Petals_P Parameter: Age (day) Value: 23-25 days
  misc_feature: MA Experiment 20000794 PARAMETER Experiment Name: At_Petals_P Parameter: Plant Line Value: WS
  misc_feature: MA Experiment 20000794 PARAMETER Experiment Name: At_Petals_P Parameter: Tissue Value: Petals vs. Whole plant
  misc_feature: MA Experiment ID: 20001248 Result: Down-regulated in Transcription
  misc_feature: MA Experiment 20001248 PARAMETER Experiment Name: At_Far-red-induction_P Parameter: Age (day) Value: 7
  misc_feature: MA Experiment 20001248 PARAMETER Experiment Name: At_Far-red-induction_P Parameter: Light Value: Far-red vs. White
  misc_feature: MA Experiment 20001248 PARAMETER Experiment Name: At_Far-red-induction_P Parameter: Organism Value: A. thaliana
  misc_feature: MA Experiment 20001248 PARAMETER Experiment Name: At_Far-red-induction_P Parameter: Plant Line Value: Columbia
  misc_feature: MA Experiment 20001248 PARAMETER Experiment Name: At_Far-red-induction_P Parameter: Timepoint (hr) Value: 4
  misc_feature: MA Experiment 20001248 PARAMETER Experiment Name: At_Far-red-induction_P Parameter: Tissue Value: Whole Plant
  misc_feature: MA Experiment ID: 20001911 Result: Up-regulated in Transcription
  misc_feature: MA Experiment 20001911 PARAMETER Experiment Name: At_Drought_Reproduction_P Parameter: Age (day) Value: 40
  misc_feature: MA Experiment 20001911 PARAMETER Experiment Name: At_Drought_Reproduction_P Parameter: Organism Value: A. thaliana
  misc_feature: MA Experiment 20001911 PARAMETER Experiment Name: At_Drought_Reproduction_P Parameter: Plant Line Value: WS
  misc_feature: MA Experiment 20001911 PARAMETER Experiment Name: At_Drought_Reproduction_P Parameter: Timepoint (day) Value: 10
  misc_feature: MA Experiment 20001911 PARAMETER Experiment Name: At_Drought_Reproduction_P Parameter: Tissue Value: Flowers
  misc_feature: MA Experiment 20001911 PARAMETER Experiment Name: At_Drought_Reproduction_P Parameter: Treatment Value: Drought vs. No Drought
gatgttactcttgtctgaatcttcctcaaatctactcatgtagacctccctatctcgatctaaatttccgccaaactttttttaatcccaaagattctttaaacagaatcatcatcaatcatgaaagaaatcaagaagacgatgacgaagcagatgacggcaagacgtgacgacacgccgttacacacggcggttagagaaggcaaaacggaccttcttttggagatgatcggagaacacgacggcgtggagctgaaagagttgttggccgagcaaaaccagtccggtgaaacggctttgtacgttgcggctgagtacggttacaccgacatggttaagattctgatgaaacactccgactctgtcttagccggaaccaaagccaagaacggcttcgatgcctttcacatcgccgccaaaaacggaaatctacaggttcttgatgtgttaatagaggcaaatccagaactctcatttacatttgattcatccaaaaccacggcgcttcataccgcggcttcacagggtcatggagagattgtttgtttcttgttggataaaggtgtggacttagctgctattgcgagaagcaatggtaaaaccgctttgcactctgcagctaggaacgggcacacggtgattgtgaagaagttgattgaaaagaaggctggtatggttacaagagtcgacaagaaaggtcaaaccgctcttcatatggcggttaaaggacaaaacactgagattgtggatgtgttgatggaagcagatggttcgttgatcaattccgcggataataaaggaaacactccattgcatatagcagtccgtaaaaacagagcagagattgttcagacagttttaaagtattgtgaagtcagtagagtggcggttaataaatcaggagaaacagctcttgatatcgctgagaaaaccggactacatgagatcgtaccgcttctgcaaaagatcggtatgcagaacgcaagatccatcaagccagctgaaaaagtggaaccatcaggctcttctaggaaactgaaagaaacagttagtgaaataggccatgaggtgcatactcagcttgaacaaaccgggagaacgagaagagagatccaaggaatcgctaaacgggtcaacaaaatgcacacggaaggactcaacaacgcgataaactccactaccctagtagccattctcatagcaaccgttgcttttgcagctatcttcaacgttccaggccagtacacggacgaccctaaagacgtacctccaggatattcactcggagaagcaagagcagctccaagacccgagttcttgatattcgtcgtgtttgattctttcgcgcttttcatctctttagcggtggttgtggttcagacatcagtggtggttatagagaggagagcaaagaagcaaatgatggctataatcaacaagctcatgtggatggcttgcattatgatctcagtagcgttcgtatcactgtcttttgttgtcgtgggagagaaagagaagcctttggcggttggagtaaccgccattggagctttgatcatggtttcaacactagggactatgtgttattgggtgattgctaaccggattgaaggatctaagtcatctccagcttccatgatgtcagatcctgagttagctgattccaaacataaccggaaactttatgcggtttga

SEQ ID NO: 77338 - protein, 524 aa, Arabidopsis thaliana
  peptide (1)..(524): Ceres Seq. ID no. 12575778
  misc_feature (226)..(259): Pfam Name: Ankyrin repeat Pfam Description: Ankyrin repeat
  misc_feature (1)..(524): Homolog of NCBI NO: 30679697 NR Description: ankyrin repeat protein family [Arabidopsis
  misc_feature (8)..(524): Homolog of NCBI NO: 11357168 NR Description: ankyrin-like protein - Arabidopsis thaliana
  misc_feature (5)..(524): Homolog of NCBI NO: 15222993 NR Description: hypothetical protein; protein id: At1g07710.1
  misc_feature (4)..(506): Homolog of NCBI NO: 15238604 NR Description: ankyrin-like protein; protein id: At5g60070.1
  misc_feature (5)..(524): Homolog of NCBI NO: 24796797 NR Description: putative ankyrin repeat containing protein [Oryza
  misc_feature (15)..(524): Homolog of NCBI NO: 15225141 NR Description: ankyrin-like protein; protein id: At2g31820.1
  misc_feature (15)..(524): Homolog of NCBI NO: 15220595 NR Description: unknown protein; protein id: At1g05640.1
  misc_feature (5)..(495): Homolog of NCBI NO: 15230470 NR Description: ankyrin-like protein; protein id: At3g12360.1
  misc_feature (5)..(495): Homolog of NCBI NO: 21553618 NR Description: ankyrin-like protein [Arabidopsis thaliana]
  misc_feature (35)..(502): Homolog of NCBI NO: 18379277 NR Description: expressed protein; protein id: At2g01680.1, by cDNA: 121540. [Arabidopsis thaliana] >gi|25410921|pir||G84427
MKEIKKTMTKQMTARRDDTPLHTAVREGKTDLLLEMIGEHDGVELKELLAEQNQSGETALYVAAEYGYTDMVKILMKHSDSVLAGTKAKNGFDAFHIAAKNGNLQVLDVLIEANPELSFTFDSSKTTALHTAASQGHGEIVCFLLDKGVDLAAIARSNGKTALHSAARNGHTVIVKKLIEKKAGMVTRVDKKGQTALHMAVKGQNTEIVDVLMEADGSLINSADNKGNTPLHIAVRKNRAEIVQTVLKYCEVSRVAVNKSGETALDIAEKTGLHEIVPLLQKIGMQNARSIKPAEKVEPSGSSRKLKETVSEIGHEVHTQLEQTGRTRREIQGIAKRVNKMHTEGLNNAINSTTLVAILIATVAFAAIFNVPGQYTDDPKDVPPGYSLGEARAAPRPEFLIFVVFDSFALFISLAVVVVQTSVVVIERRAKKQMMAIINKLMWMACIMISVAFVSLSFVVVGEKEKPLAVGVTAIGALIMVSTLGTMCYWVIANRIEGSKSSPASMMSDPELADSKHNRKLYAV

SEQ ID NO: 77339 - protein, 517 aa, Arabidopsis thaliana
  peptide (1)..(517): Ceres Seq. ID no. 12575779
  misc_feature (219)..(252): Pfam Name: Ankyrin repeat Pfam Description: Ankyrin repeat
  misc_feature (1)..(517): Homolog of NCBI NO: 30679697 NR Description: ankyrin repeat protein family [Arabidopsis
  misc_feature (1)..(517): Homolog of NCBI NO: 11357168 NR Description: ankyrin-like protein - Arabidopsis thaliana
  misc_feature (1)..(517): Homolog of NCBI NO: 15222993 NR Description: hypothetical protein; protein id: At1g07710.1
  misc_feature (1)..(499): Homolog of NCBI NO: 15238604 NR Description: ankyrin-like protein; protein id: At5g60070.1
  misc_feature (1)..(517): Homolog of NCBI NO: 24796797 NR Description: putative ankyrin repeat containing protein [Oryza
  misc_feature (8)..(517): Homolog of NCBI NO: 15225141 NR Description: ankyrin-like protein; protein id: At2g31820.1
  misc_feature (8)..(517): Homolog of NCBI NO: 15220595 NR Description: unknown protein; protein id: At1g05640.1
  misc_feature (1)..(488): Homolog of NCBI NO: 15230470 NR Description: ankyrin-like protein; protein id: At3g12360.1
  misc_feature (1)..(488): Homolog of NCBI NO: 21553618 NR Description: ankyrin-like protein [Arabidopsis thaliana]
  misc_feature (28)..(495): Homolog of NCBI NO: 18379277 NR Description: expressed protein; protein id: At2g01680.1, by cDNA: 121540. [Arabidopsis thaliana] >gi|25410921|pir||G84427
MTKQMTARRDDTPLHTAVREGKTDLLLEMIGEHDGVELKELLAEQNQSGETALYVAAEYGYTDMVKILMKHSDSVLAGTKAKNGFDAFHIAAKNGNLQVLDVLIEANPELSFTFDSSKTTALHTAASQGHGEIVCFLLDKGVDLAAIARSNGKTALHSAARNGHTVIVKKLIEKKAGMVTRVDKKGQTALHMAVKGQNTEIVDVLMEADGSLINSADNKGNTPLHIAVRKNRAEIVQTVLKYCEVSRVAVNKSGETALDIAEKTGLHEIVPLLQKIGMQNARSIKPAEKVEPSGSSRKLKETVSEIGHEVHTQLEQTGRTRREIQGIAKRVNKMHTEGLNNAINSTTLVAILIATVAFAAIFNVPGQYTDDPKDVPPGYSLGEARAAPRPEFLIFVVFDSFALFISLAVVVVQTSVVVIERRAKKQMMAIINKLMWMACIMISVAFVSLSFVVVGEKEKPLAVGVTAIGALIMVSTLGTMCYWVIANRIEGSKSSPASMMSDPELADSKHNRKLYAV

SEQ ID NO: 77340 - protein, 513 aa, Arabidopsis thaliana
  peptide (1)..(513): Ceres Seq. ID no. 12575780
  misc_feature (215)..(248): Pfam Name: Ankyrin repeat Pfam Description: Ankyrin repeat
  misc_feature (1)..(513): Homolog of NCBI NO: 30679697 NR Description: ankyrin repeat protein family [Arabidopsis
  misc_feature (1)..(513): Homolog of NCBI NO: 11357168 NR Description: ankyrin-like protein - Arabidopsis thaliana
  misc_feature (1)..(513): Homolog of NCBI NO: 15222993 NR Description: hypothetical protein; protein id: At1g07710.1
  misc_feature (1)..(495): Homolog of NCBI NO: 15238604 NR Description: ankyrin-like protein; protein id: At5g60070.1
  misc_feature (1)..(513): Homolog of NCBI NO: 24796797 NR Description: putative ankyrin repeat containing protein [Oryza
  misc_feature (4)..(513): Homolog of NCBI NO: 15225141 NR Description: ankyrin-like protein; protein id: At2g31820.1
  misc_feature (4)..(513): Homolog of NCBI NO: 15220595 NR Description: unknown protein; protein id: At1g05640.1
  misc_feature (1)..(484): Homolog of NCBI NO: 15230470 NR Description: ankyrin-like protein; protein id: At3g12360.1
  misc_feature (1)..(484): Homolog of NCBI NO: 21553618 NR Description: ankyrin-like protein [Arabidopsis thaliana]
  misc_feature (24)..(491): Homolog of NCBI NO: 18379277 NR Description: expressed protein; protein id: At2g01680.1, by cDNA: 121540. [Arabidopsis thaliana] >gi|25410921|pir||G84427
MTARRDDTPLHTAVREGKTDLLLEMIGEHDGVELKELLAEQNQSGETALYVAAEYGYTDMVKILMKHSDSVLAGTKAKNGFDAFHIAAKNGNLQVLDVLIEANPELSFTFDSSKTTALHTAASQGHGEIVCFLLDKGVDLAAIARSNGKTALHSAARNGHTVIVKKLIEKKAGMVTRVDKKGQTALHMAVKGQNTEIVDVLMEADGSLINSADNKGNTPLHIAVRKNRAEIVQTVLKYCEVSRVAVNKSGETALDIAEKTGLHEIVPLLQKIGMQNARSIKPAEKVEPSGSSRKLKETVSEIGHEVHTQLEQTGRTRREIQGIAKRVNKMHTEGLNNAINSTTLVAILIATVAFAAIFNVPGQYTDDPKDVPPGYSLGEARAAPRPEFLIFVVFDSFALFISLAVVVVQTSVVVIERRAKKQMMAIINKLMWMACIMISVAFVSLSFVVVGEKEKPLAVGVTAIGALIMVSTLGTMCYWVIANRIEGSKSSPASMMSDPELADSKHNRKLYAV

SEQ ID NO: 77341 - DNA, 2189 bp, Arabidopsis thaliana
  misc_feature (1)..(2189): Ceres Seq. ID no. 12575781
  misc_feature: MA Experiment ID: 20000355 Result: Up-regulated in Transcription
  misc_feature: MA Experiment 20000355 PARAMETER Experiment Name: At_Siliques_Sub_P Parameter: Age (day) Value: 21
  misc_feature: MA Experiment 20000355 PARAMETER Experiment Name: At_Siliques_Sub_P Parameter: Organism Value: A. thaliana
  misc_feature: MA Experiment 20000355 PARAMETER Experiment Name: At_Siliques_Sub_P Parameter: Plant Line Value: WS
  misc_feature: MA Experiment 20000355 PARAMETER Experiment Name: At_Siliques_Sub_P Parameter: Tissue Value: Less Than 5mm Siliques vs. Whole Plant
aaagtaatgctgtctctcttctcttcaaaattattgttaacctctcgtaactaaaatcttccatggtagtagtaacaaagaagaccatgaagattcaaattcatctcctttactcgttcttgttcctctgtttctctactctcactctatcttctgagcccagaaaccctgaagttgaggcgttgataagtataaggaacaatttgcatgatcctcatggagctttgaacaattgggacgagttttcagttgatccttgtagctgggctatgatcacttgctctcccgacaacctcgtcattggactaggagcgccgagccagtctctctcgggaggtttatctgagtctatcggaaatctcacaaatctccgacaagtgtcattgcaaaataacaacatctccggcaaaattccaccggagctcggttttctacccaaattacaaaccttggatctttccaacaaccgattctccggtgacatccctgtttccatcgaccagctaagcagccttcaatatctgagactcaacaacaactctttgtctgggcccttccctgcttctttgtcccaaattcctcacctctccttcttggacttgtcttacaacaatctcagtggccctgttcctaaattcccagcaaggactttcaacgttgctggtaatcctttgatttgtagaagcaacccacctgagatttgttctggatcaatcaatgcaagtccactttctgtttctttgagctcttcatcaggacgcaggtctaatagattggcaatagctcttagtgtaagccttggctctgttgttatactagtccttgctctcgggtccttttgttggtaccgaaagaaacaaagaaggctactgatccttaacttaaacgataaacaagaggaagggcttcaaggacttgggaatctaagaagcttcacattcagagaactccatgtttatacagatggtttcagttccaagaacattctcggcgctggtggattcggtaatgtgtacagaggcaagcttggagatgggacaatggtggcagtgaaacggttgaaggatattaatggaacctcaggggattcacagtttcgtatggagctagagatgattagcttagctgttcataagaatctgcttcggttaattggttattgcgcaacttctggtgaaaggcttcttgtttacccttacatgcctaatggaagcgtcgcctctaagcttaaatctaaaccggcattggactggaacatgaggaagaggatagcaattggtgcagcgagaggtttgttgtatctacatgagcaatgtgatcccaagatcattcatagagatgtaaaggcagctaatattctcttagacgagtgctttgaagctgttgttggtgactttggactcgcaaagctccttaaccatgcggattctcatgtcacaactgcggtccgtggtacggttggccacattgcacctgaatatctctccactggtcagtcttctgagaaaaccgatgtgtttgggttcggtatactattgctcgagctcataaccggactgagagctcttgagtttggtaaaaccgttagccagaaaggagctatgcttgaatgggtgaggaaattacatgaagagatgaaagtagaggaactattggatcgagaactcggaactaactacgataagattgaagttggagagatgttgcaagtggctttgctatgcacacaatatctgccagctcatcgtcctaaaatgtctgaagttgttttgatgcttgaaggcgatggattagccgagagatgggctgcttcgcataaccattcacatttctaccatgccaatatctctttcaagacaatctcttctctgtctactacttctgtctcaaggcttgacgcacattgcaatgatccaacttatcaaatgtttggatcttcggctttcgatgatgacgatgatcatcagcctttagattcctttgccatggaactatccggtccaagataacacaatgaaagaaagatatcatttttacgatggatcaaacaatccaatgaaaaaagctctacacttttataatatagacatgtatatggtggtgaaaattgatgaaaaatatctctacagtttgagattatgtgttcgttatgttgatgatgtatatattaacttttaattgtgagtttc

SEQ ID NO: 77342 - protein, 648 aa, Arabidopsis thaliana
  peptide (1)..(648): Ceres Seq. ID no. 12575782
  misc_feature (303)..(498): Pfam Name: Protein kinase domain Pfam Description: Protein kinase domain
  misc_feature (83)..(648): Homolog of NCBI NO: 15224077 NR Description: putative LRR receptor protein kinase; protein id:
  misc_feature (158)..(648): Homolog of NCBI NO: 25407653 NR Description: receptor-like kinase homolog [imported] -
  misc_feature (25)..(648): Homolog of NCBI NO: 11862956 NR Description: putative protein kinase [Oryza sativa (japonica
  misc_feature (17)..(584): Homolog of NCBI NO: 15237242 NR Description: receptor protein kinase-like protein; protein id:
  misc_feature (17)..(584): Homolog of NCBI NO: 21593619 NR Description: receptor protein kinase-like protein [Arabidopsis
  misc_feature (17)..(584): Homolog of NCBI NO: 22331326 NR Description: somatic embryogenesis receptor-like kinase, protein id: At3g25560.1, supported by cDNA: gi_19715614 thaliana] >gi|19715615|gb|AAL91629.1| AT3g25560/MWL2_18
  misc_feature (17)..(584): Homolog of NCBI NO: 9279736 NR Description: receptor-like kinase [Arabidopsis thaliana]
  misc_feature (21)..(586): Homolog of NCBI NO: 15219817 NR Description: receptor-like kinase, putative; protein id: [Arabidopsis thaliana] >gi|15810511|gb|AAL07143.1| putative kinase [Arabidopsis thaliana] >gi|23297726|gb|AAN12912.1|
  misc_feature (35)..(581): Homolog of NCBI NO: 13897310 NR Description: SERK2 protein [Zea mays]
  misc_feature (4)..(581): Homolog of NCBI NO: 30678986 NR Description: leucine-rich repeat protein kinase family thaliana] >gi|15810409|gb|AAL07092.1| unknown protein
MVVVTKKTMKIQIHLLYSFLFLCFSTLTLSSEPRNPEVEALISIRNNLHDPHGALNNWDEFSVDPCSWAMITCSPDNLVIGLGAPSQSLSGGLSESIGNLTNLRQVSLQNNNISGKIPPELGFLPKLQTLDLSNNRFSGDIPVSIDQLSSLQYLRLNNNSLSGPFPASLSQIPHLSFLDLSYNNLSGPVPKFPARTFNVAGNPLICRSNPPEICSGSINASPLSVSLSSSSGRRSNRLAIALSVSLGSVVILVLALGSFCWYRKKQRRLLILNLNDKQEEGLQGLGNLRSFTFRELHVYTDGFSSKNILGAGGFGNVYRGKLGDGTMVAVKRLKDINGTSGDSQFRMELEMISLAVHKNLLRLIGYCATSGERLLVYPYMPNGSVASKLKSKPALDWNMRKRIAIGAARGLLYLHEQCDPKIIHRDVKAANILLDECFEAVVGDFGLAKLLNHADSHVTTAVRGTVGHIAPEYLSTGQSSEKTDVFGFGILLLELITGLRALEFGKTVSQKGAMLEWVRKLHEEMKVEELLDRELGTNYDKIEVGEMLQVALLCTQYLPAHRPKMSEVVLMLEGDGLAERWAASHNHSHFYHANISFKTISSLSTTSVSRLDAHCNDPTYQMFGSSAFDDDDDHQPLDSFAMELSGPR

SEQ ID NO: 77343 - protein, 640 aa, Arabidopsis thaliana
  peptide (1)..(640): Ceres Seq. ID no. 12575783
  misc_feature (295)..(490): Pfam Name: Protein kinase domain Pfam Description: Protein kinase domain
  misc_feature (75)..(640): Homolog of NCBI NO: 15224077 NR Description: putative LRR receptor protein kinase; protein id:
  misc_feature (150)..(640): Homolog of NCBI NO: 25407653 NR Description: receptor-like kinase homolog [imported] -
  misc_feature (17)..(640): Homolog of NCBI NO: 11862956 NR Description: putative protein kinase [Oryza sativa (japonica
  misc_feature (9)..(576): Homolog of NCBI NO: 15237242 NR Description: receptor protein kinase-like protein; protein id:
  misc_feature (9)..(576): Homolog of NCBI NO: 21593619 NR Description: receptor protein kinase-like protein [Arabidopsis
  misc_feature (9)..(576): Homolog of NCBI NO: 22331326 NR Description: somatic embryogenesis receptor-like kinase, protein id: At3g25560.1, supported by cDNA: gi_19715614 thaliana] >gi|19715615|gb|AAL91629.1| AT3g25560/MWL2_18
  misc_feature (9)..(576): Homolog of NCBI NO: 9279736 NR Description: receptor-like kinase [Arabidopsis thaliana]
  misc_feature (13)..(578): Homolog of NCBI NO: 15219817 NR Description: receptor-like kinase, putative; protein id: [Arabidopsis thaliana] >gi|15810511|gb|AAL07143.1| putative kinase [Arabidopsis thaliana] >gi|23297726|gb|AAN12912.1|
  misc_feature (27)..(573): Homolog of NCBI NO: 13897310 NR Description: SERK2 protein [Zea mays]
  misc_feature (1)..(573): Homolog of NCBI NO: 30678986 NR Description: leucine-rich repeat protein kinase family thaliana] >gi|15810409|gb|AAL07092.1| unknown protein
MKIQIHLLYSFLFLCFSTLTLSSEPRNPEVEALISIRNNLHDPHGALNNWDEFSVDPCSWAMITCSPDNLVIGLGAPSQSLSGGLSESIGNLTNLRQVSLQNNNISGKIPPELGFLPKLQTLDLSNNRFSGDIPVSIDQLSSLQYLRLNNNSLSGPFPASLSQIPHLSFLDLSYNNLSGPVPKFPARTFNVAGNPLICRSNPPEICSGSINASPLSVSLSSSSGRRSNRLAIALSVSLGSVVILVLALGSFCWYRKKQRRLLILNLNDKQEEGLQGLGNLRSFTFRELHVYTDGFSSKNILGAGGFGNVYRGKLGDGTMVAVKRLKDINGTSGDSQFRMELEMISLAVHKNLLRLIGYCATSGERLLVYPYMPNGSVASKLKSKPALDWNMRKRIAIGAARGLLYLHEQCDPKIIHRDVKAANILLDECFEAVVGDFGLAKLLNHADSHVTTAVRGTVGHIAPEYLSTGQSSEKTDVFGFGILLLELITGLRALEFGKTVSQKGAMLEWVRKLHEEMKVEELLDRELGTNYDKIEVGEMLQVALLCTQYLPAHRPKMSEVVLMLEGDGLAERWAASHNHSHFYHANISFKTISSLSTTSVSRLDAHCNDPTYQMFGSSAFDDDDDHQPLDSFAMELSGPR

SEQ ID NO: 77344 - protein, 579 aa, Arabidopsis thaliana
  peptide (1)..(579): Ceres Seq. ID no. 12575784
  misc_feature (234)..(429): Pfam Name: Protein kinase domain Pfam Description: Protein kinase domain
  misc_feature (14)..(579): Homolog of NCBI NO: 15224077 NR Description: putative LRR receptor protein kinase; protein id:
  misc_feature (89)..(579): Homolog of NCBI NO: 25407653 NR Description: receptor-like kinase homolog [imported] -
  misc_feature (1)..(579): Homolog of NCBI NO: 11862956 NR Description: putative protein kinase [Oryza sativa (japonica
  misc_feature (1)..(515): Homolog of NCBI NO: 15237242 NR Description: receptor protein kinase-like protein; protein id:
  misc_feature (1)..(515): Homolog of NCBI NO: 21593619 NR Description: receptor protein kinase-like protein [Arabidopsis
  misc_feature (1)..(515): Homolog of NCBI NO: 22331326 NR Description: somatic embryogenesis receptor-like kinase, protein id: At3g25560.1, supported by cDNA: gi_19715614 thaliana] >gi|19715615|gb|AAL91629.1| AT3g25560/MWL2_18
  misc_feature (1)..(515): Homolog of NCBI NO: 9279736 NR Description: receptor-like kinase [Arabidopsis thaliana]
  misc_feature (1)..(517): Homolog of NCBI NO: 15219817 NR Description: receptor-like kinase, putative; protein id: [Arabidopsis thaliana] >gi|15810511|gb|AAL07143.1| putative kinase [Arabidopsis thaliana] >gi|23297726|gb|AAN12912.1|
  misc_feature (1)..(512): Homolog of NCBI NO: 13897310 NR Description: SERK2 protein [Zea mays]
  misc_feature (1)..(512): Homolog of NCBI NO: 30678986 NR Description: leucine-rich repeat protein kinase family thaliana] >gi|15810409|gb|AAL07092.1| unknown protein
MITCSPDNLVIGLGAPSQSLSGGLSESIGNLTNLRQVSLQNNNISGKIPPELGFLPKLQTLDLSNNRFSGDIPVSIDQLSSLQYLRLNNNSLSGPFPASLSQIPHLSFLDLSYNNLSGPVPKFPARTFNVAGNPLICRSNPPEICSGSINASPLSVSLSSSSGRRSNRLAIALSVSLGSVVILVLALGSFCWYRKKQRRLLILNLNDKQEEGLQGLGNLRSFTFRELHVYTDGFSSKNILGAGGFGNVYRGKLGDGTMVAVKRLKDINGTSGDSQFRMELEMISLAVHKNLLRLIGYCATSGERLLVYPYMPNGSVASKLKSKPALDWNMRKRIAIGAARGLLYLHEQCDPKIIHRDVKAANILLDECFEAVVGDFGLAKLLNHADSHVTTAVRGTVGHIAPEYLSTGQSSEKTDVFGFGILLLELITGLRALEFGKTVSQKGAMLEWVRKLHEEMKVEELLDRELGTNYDKIEVGEMLQVALLCTQYLPAHRPKMSEVVLMLEGDGLAERWAASHNHSHFYHANISFKTISSLSTTSVSRLDAHCNDPTYQMFGSSAFDDDDDHQPLDSFAMELSGPR

SEQ ID NO: 77345 - DNA, 1813 bp, Arabidopsis thaliana
  misc_feature (1)..(1813): Ceres Seq. ID no. 12575844
  misc_feature: MA Experiment ID: 20000173 Result: Down-regulated in Transcription
  misc_feature: MA Experiment 20000173 PARAMETER Experiment Name: At_42deg_Heat_P Parameter: Age (day) Value: 14
  misc_feature: MA Experiment 20000173 PARAMETER Experiment Name: At_42deg_Heat_P Parameter: Organism Value: A. thaliana
  misc_feature: MA Experiment 20000173 PARAMETER Experiment Name: At_42deg_Heat_P Parameter: Plant Line Value: WS
  misc_feature: MA Experiment 20000173 PARAMETER Experiment Name: At_42deg_Heat_P Parameter: Temperature (deg C) Value: 42 vs. 22
  misc_feature: MA Experiment 20000173 PARAMETER Experiment Name: At_42deg_Heat_P Parameter: Timepoint (hr) Value: 6
  misc_feature: MA Experiment 20000173 PARAMETER Experiment Name: At_42deg_Heat_P Parameter: Tissue Value: Aerial
  misc_feature: MA Experiment ID: 20000180 Result: Down-regulated in Transcription
  misc_feature: MA Experiment 20000180 PARAMETER Experiment Name: At_Germinating_Seeds_P Parameter: Age (hr) Value: 24 vs. 0
  misc_feature: MA Experiment 20000180 PARAMETER Experiment Name: At_Germinating_Seeds_P Parameter: Tissue Value: Germinating Seeds
  misc_feature: MA Experiment ID: 20000182 Result: Up-regulated in Transcription
  misc_feature: MA Experiment 20000182 PARAMETER Experiment Name: At_2mM_SA_P Parameter: Age (day) Value: 14
  misc_feature: MA Experiment 20000182 PARAMETER Experiment Name: At_2mM_SA_P Parameter: Organism Value: A. thaliana
  misc_feature: MA Experiment 20000182 PARAMETER Experiment Name: At_2mM_SA_P Parameter: Plant Line Value: WS
  misc_feature: MA Experiment 20000182 PARAMETER Experiment Name: At_2mM_SA_P Parameter: Timepoint (hr) Value: 6
  misc_feature: MA Experiment 20000182 PARAMETER Experiment Name: At_2mM_SA_P Parameter: Tissue Value: Aerial
  misc_feature: MA Experiment 20000182 PARAMETER Experiment Name: At_2mM_SA_P Parameter: Treatment Value: 2mM SA vs. No Treatment
  misc_feature: MA Experiment ID: 20000437 Result: Up-regulated in Transcription
  misc_feature: MA Experiment 20000437 PARAMETER Experiment Name: At_Drought_P Parameter: Age (day) Value: 8
  misc_feature: MA Experiment 20000437 PARAMETER Experiment Name: At_Drought_P Parameter: Organism Value: A. thaliana
  misc_feature: MA Experiment 20000437 PARAMETER Experiment Name: At_Drought_P Parameter: Plant Line Value: WS
  misc_feature: MA Experiment 20000437 PARAMETER Experiment Name: At_Drought_P Parameter: Timepoint (hr) Value: 24
  misc_feature: MA Experiment 20000437 PARAMETER Experiment Name: At_Drought_P Parameter: Tissue Value: Whole Plant
  misc_feature: MA Experiment 20000437 PARAMETER Experiment Name: At_Drought_P Parameter: Treatment Value: Drought vs. No Drought
  misc_feature: MA Experiment ID: 20001451 Result: Down-regulated in Transcription
  misc_feature: MA Experiment 20001451 PARAMETER Experiment Name: At_Far-red-induction_P Parameter: Age (day) Value: 7
  misc_feature: MA Experiment 20001451 PARAMETER Experiment Name: At_Far-red-induction_P Parameter: Light Value: Far-red vs. White
  misc_feature: MA Experiment 20001451 PARAMETER Experiment Name: At_Far-red-induction_P Parameter: Organism Value: A. thaliana
  misc_feature: MA Experiment 20001451 PARAMETER Experiment Name: At_Far-red-induction_P Parameter: Plant Line Value: Columbia
  misc_feature: MA Experiment 20001451 PARAMETER Experiment Name: At_Far-red-induction_P Parameter: Timepoint (hr) Value: 24
  misc_feature: MA Experiment 20001451 PARAMETER Experiment Name: At_Far-red-induction_P Parameter: Tissue Value: Whole Plant
  misc_feature: MA Experiment ID: 20001911 Result: Up-regulated in Transcription
  misc_feature: MA Experiment 20001911 PARAMETER Experiment Name: At_Drought_Reproduction_P Parameter: Age (day) Value: 40
  misc_feature: MA Experiment 20001911 PARAMETER Experiment Name: At_Drought_Reproduction_P Parameter: Organism Value: A. thaliana
  misc_feature: MA Experiment 20001911 PARAMETER Experiment Name: At_Drought_Reproduction_P Parameter: Plant Line Value: WS
  misc_feature: MA Experiment 20001911 PARAMETER Experiment Name: At_Drought_Reproduction_P Parameter: Timepoint (day) Value: 10
  misc_feature: MA Experiment 20001911 PARAMETER Experiment Name: At_Drought_Reproduction_P Parameter: Tissue Value: Flowers
  misc_feature: MA Experiment 20001911 PARAMETER Experiment Name: At_Drought_Reproduction_P Parameter: Treatment Value: Drought vs. No Drought
gttataccaaattttagcgtaaagacaatctcttgaaggagaaaaggaaaacaatctctctttctgtgacctttcgcaacttgtcaaagcaccacgaccttctctctacggagttgagatcaatccccccaaatctcggtgtggttcctctagggtttttgatcggaatcggaatcgataatctaaccggcatgaggccaatcctattgccggatccacccagtctatctaccggcgtccctgatattttcgaacaaggcggttcccataacgtcgtcagacgcgccgtcgtcatcggaaacggtttccctggctccgagaatcagtgtatcggtctcgttcgtgcgctcggcttatctgataatcaccttctctaccgagtgacaaggcctaaaggaggactaaatgagtggctgcactggctcccagttggttttcacaagaagttggactttatcctcaggcatatttacctctactccagattgatgcttggatccaaacaaagtaaatacatctcatctgtaccctcagagaatggtggtaatgtaggtttggcctctattctagaggctgatgtgaagggcattgtaaatttggcccgtcagacctatgaaaaggatggcccgttgatcgtgattgcatgtggaagagatactatttctattgctagctcgataagacgtttggcttctgaaaacgtcttcgttgttcagatacaacatcctagatcacatttaaataggtttgacatggtgatcacgcctcgtcacgactactatcctctaacactcgaagcgcaggagcaggtccctagatttatgcgtagttggataactccacgtgaacctcctcaggatcatgtagtcttgactactggagctctacaccagatcgattatgcctcactccgtaaagcagctagtgcctggcatgatgaatttgctgctcttccgaagcctttagttgtggttaacatcggctggcctagaagtaactgtcggtatggagcagacctcgcaaaacagctaacagactcccttcttaatgtccttgctacctgtggaagtgtcagaattactctttcctacaaaacccctgcaaaggtttcaagagtaatcttcaaagaacttggagataaccccaaagtttacatatggaatggccaagaaccaaatccttacatggggcatctagcttggggtgatgcttttgtggtgacagcagattcagtcagtctgataagcgaagcttgtagcaccgggaaaccagtgtacgttgttggagccgatcactgtaaatggaagattgcagaattccaaaagtctttgagggagcgaggagttgtccgctcatttacaggtttcgaagatatgtcggaaagttggagttatccgccattgaatgacacagcagaggcagctacgagaatacggcgtgaattggctgcacgtggatggagtttacggtcttgaattatatactcttctttgctgtaccacttatttgcggaatcacattttgtccaaagctggagaaacagaagcctaagagaatcggatgttgtgcagaaagaaagaatagttgaagatatcatttaaaaagggtcattttactctagcttgccctaaaattttgctgataatgttttaccaataggccaaatactaaaaaaaatctctgttacttaatcggagaggcctttgtgagataaaagaaagcggaaaggttttttttaatctttttaacgtttgtattgttttgtcgacgagatttgaccgtttgagtgtgtataaaaaatcaatgtttcacg

SEQ ID NO: 77346 - protein, 427 aa, Arabidopsis thaliana
  peptide (1)..(427): Ceres Seq. ID no. 12575845
  misc_feature (35)..(420): Pfam Name: Protein of unknown function (DUF1022) Pfam Description: Protein of unknown function (DUF1022)
  misc_feature (1)..(427): Homolog of NCBI NO: 18420465 NR Description: putative protein; protein id: At5g22350.1, by cDNA: gi_16649090 [Arabidopsis thaliana] Unknown protein [Arabidopsis thaliana]
  misc_feature (63)..(427): Homolog of NCBI NO: 9757815 NR Description: gene_id:MWD9.14~similar to unknown
  misc_feature (1)..(62): Homolog of NCBI NO: 9757815 NR Description: gene_id:MWD9.14~similar to unknown
  misc_feature (107)..(427): Homolog of NCBI NO: 18415120 NR Description: putative protein; protein id: At5g06180.1, by cDNA: 100144. [Arabidopsis thaliana]
  misc_feature (9)..(86): Homolog of NCBI NO: 18415120 NR Description: putative protein; protein id: At5g06180.1, by cDNA: 100144. [Arabidopsis thaliana]
  misc_feature (223)..(413): Homolog of NCBI NO: 38346329 NR Description: OJ000126_13.11 [Oryza sativa (japonica
  misc_feature (15)..(190): Homolog of NCBI NO: 38346329 NR Description: OJ000126_13.11 [Oryza sativa (japonica
  misc_feature (9)..(395): Homolog of NCBI NO: 9759316 NR Description: gene_id:MBL20.6~similar to unknown
  misc_feature (224)..(421): Homolog of NCBI NO: 22968024 NR Description: hypothetical protein [Rhodospirillum rubrum]
  misc_feature (130)..(195): Homolog of NCBI NO: 22968024 NR Description: hypothetical protein [Rhodospirillum rubrum]
MRPILLPDPPSLSTGVPDIFEQGGSHNVVRRAVVIGNGFPGSENQCIGLVRALGLSDNHLLYRVTRPKGGLNEWLHWLPVGFHKKLDFILRHIYLYSRLMLGSKQSKYISSVPSENGGNVGLASILEADVKGIVNLARQTYEKDGPLIVIACGRDTISIASSIRRLASENVFVVQIQHPRSHLNRFDMVITPRHDYYPLTLEAQEQVPRFMRSWITPREPPQDHVVLTTGALHQIDYASLRKAASAWHDEFAALPKPLVVVNIGWPRSNCRYGADLAKQLTDSLLNVLATCGSVRITLSYKTPAKVSRVIFKELGDNPKVYIWNGQEPNPYMGHLAWGDAFVVTADSVSLISEACSTGKPVYVVGADHCKWKIAEFQKSLRERGVVRSFTGFEDMSESWSYPPLNDTAEAATRIRRELAARGWSLRS

SEQ ID NO: 77347 - protein, 328 aa, Arabidopsis thaliana; identical to SEQ ID NO: 46192
  peptide (1)..(328): Ceres Seq. ID no. 12575846
  misc_feature (1)..(321): Pfam Name: Protein of unknown function (DUF1022) Pfam Description: Protein of unknown function (DUF1022)
  misc_feature (1)..(328): Homolog of NCBI NO: 18420465 NR Description: putative protein; protein id: At5g22350.1, by cDNA: gi_16649090 [Arabidopsis thaliana] Unknown protein [Arabidopsis thaliana]
  misc_feature (1)..(328): Homolog of NCBI NO: 9757815 NR Description: gene_id:MWD9.14~similar to unknown
  misc_feature (8)..(328): Homolog of NCBI NO: 18415120 NR Description: putative protein; protein id: At5g06180.1, by cDNA: 100144. [Arabidopsis thaliana]
  misc_feature (124)..(314): Homolog of NCBI NO: 38346329 NR Description: OJ000126_13.11 [Oryza sativa (japonica
  misc_feature (1)..(91): Homolog of NCBI NO: 38346329 NR Description: OJ000126_13.11 [Oryza sativa (japonica
  misc_feature (1)..(296): Homolog of NCBI NO: 9759316 NR Description: gene_id:MBL20.6~similar to unknown
  misc_feature (125)..(322): Homolog of NCBI NO: 22968024 NR Description: hypothetical protein [Rhodospirillum rubrum]
  misc_feature (31)..(96): Homolog of NCBI NO: 22968024 NR Description: hypothetical protein [Rhodospirillum rubrum]
  misc_feature (107)..(322): Homolog of NCBI NO: 16127081 NR Description: conserved hypothetical protein [Caulobacter
  misc_feature (45)..(96): Homolog of NCBI NO: 16127081 NR Description: conserved hypothetical protein [Caulobacter

SEQ ID NO: 77348 - protein, 240 aa, Arabidopsis thaliana; identical to SEQ ID NO: 46193
  peptide (1)..(240): Ceres Seq. ID no. 12575847
  misc_feature (1)..(233): Pfam Name: Protein of unknown function (DUF1022) Pfam Description: Protein of unknown function (DUF1022)
  misc_feature (1)..(240): Homolog of NCBI NO: 18420465 NR Description: putative protein; protein id: At5g22350.1, by cDNA: gi_16649090 [Arabidopsis thaliana] Unknown protein [Arabidopsis thaliana]
  misc_feature (1)..(240): Homolog of NCBI NO: 9757815 NR Description: gene_id:MWD9.14~similar to unknown
  misc_feature (1)..(240): Homolog of NCBI NO: 18415120 NR Description: putative protein; protein id: At5g06180.1, by cDNA: 100144. [Arabidopsis thaliana]
  misc_feature (36)..(226): Homolog of NCBI NO: 38346329 NR Description: OJ000126_13.11 [Oryza sativa (japonica
  misc_feature (1)..(208): Homolog of NCBI NO: 9759316 NR Description: gene_id:MBL20.6~similar to unknown
  misc_feature (37)..(234): Homolog of NCBI NO: 22968024 NR Description: hypothetical protein [Rhodospirillum rubrum]
  misc_feature (19)..(234): Homolog of NCBI NO: 16127081 NR Description: conserved hypothetical protein [Caulobacter
  misc_feature (37)..(231): Homolog of NCBI NO: 23014165 NR Description: hypothetical protein [Magnetospirillum
  misc_feature (1)..(236): Homolog of NCBI NO: 15892085 NR Description: unknown [Rickettsia conorii]
  misc_feature (21)..(231): Homolog of NCBI NO: 21233033 NR Description: conserved hypothetical protein [Xanthomonas pv. campestris str. ATCC 33913] >gi|21114881|gb|AAM42874.1| hypothetical protein [Xanthomonas campestris pv. campestris str.

SEQ ID NO: 77349 - DNA, 2390 bp, Arabidopsis thaliana
  misc_feature (1)..(2390): Ceres Seq. ID no. 12575958
  misc_feature: MA Experiment ID: 20000173 Result: Down-regulated in Transcription
  misc_feature: MA Experiment 20000173 PARAMETER Experiment Name: At_42deg_Heat_P Parameter: Age (day) Value: 14
  misc_feature: MA Experiment 20000173 PARAMETER Experiment Name: At_42deg_Heat_P Parameter: Organism Value: A. thaliana
  misc_feature: MA Experiment 20000173 PARAMETER Experiment Name: At_42deg_Heat_P Parameter: Plant Line Value: WS
  misc_feature: MA Experiment 20000173 PARAMETER Experiment Name: At_42deg_Heat_P Parameter: Temperature (deg C) Value: 42 vs. 22
  misc_feature: MA Experiment 20000173 PARAMETER Experiment Name: At_42deg_Heat_P Parameter: Timepoint (hr) Value: 6
  misc_feature: MA Experiment 20000173 PARAMETER Experiment Name: At_42deg_Heat_P Parameter: Tissue Value: Aerial
  misc_feature: MA Experiment ID: 20000184 Result: Down-regulated in Transcription
  misc_feature: MA Experiment 20000184 PARAMETER Experiment Name: At_Shoots__P Parameter: Age (day) Value: 7
  misc_feature: MA Experiment 20000184 PARAMETER Experiment Name: At_Shoots__P Parameter: Tissue Value: Shoots vs. Whole Plant
  misc_feature: MA Experiment ID: 20000185 Result: Down-regulated in Transcription
  misc_feature: MA Experiment 20000185 PARAMETER Experiment Name: At_Roots__P Parameter: Age (day) Value: 7 vs. 21
  misc_feature: MA Experiment 20000185 PARAMETER Experiment Name: At_Roots__P Parameter: Organism Value: A. thaliana
  misc_feature: MA Experiment 20000185 PARAMETER Experiment Name: At_Roots__P Parameter: Tissue Value: Roots vs. Whole Plant
  misc_feature: MA Experiment ID: 20000437 Result: Down-regulated in Transcription
  misc_feature: MA Experiment 20000437 PARAMETER Experiment Name: At_Drought_P Parameter: Age (day) Value: 8
  misc_feature: MA Experiment 20000437 PARAMETER Experiment Name: At_Drought_P Parameter: Organism Value: A. thaliana
  misc_feature: MA Experiment 20000437 PARAMETER Experiment Name: At_Drought_P Parameter: Plant Line Value: WS
  misc_feature: MA Experiment 20000437 PARAMETER Experiment Name: At_Drought_P Parameter: Timepoint (hr) Value: 24
  misc_feature: MA Experiment 20000437 PARAMETER Experiment Name: At_Drought_P Parameter: Tissue Value: Whole Plant
  misc_feature: MA Experiment 20000437 PARAMETER Experiment Name: At_Drought_P Parameter: Treatment Value: Drought vs. No Drought
  misc_feature: MA Experiment ID: 20000439 Result: Down-regulated in Transcription
  misc_feature: MA Experiment 20000439 PARAMETER Experiment Name: At_Roots__P Parameter: Age (day) Value: 14 vs. 21
  misc_feature: MA Experiment 20000439 PARAMETER Experiment Name: At_Roots__P Parameter: Organism Value: A. thaliana
  misc_feature: MA Experiment 20000439 PARAMETER Experiment Name: At_Roots__P Parameter: Tissue Value: Roots vs. Whole Plant
  misc_feature: MA Experiment ID: 20001557 Result: Down-regulated in Transcription
  misc_feature: MA Experiment 20001557 PARAMETER Experiment Name: At_Drought_Soil_Dry_P Parameter: Age (day) Value: 27
  misc_feature: MA Experiment 20001557 PARAMETER Experiment Name: At_Drought_Soil_Dry_P Parameter: Organism Value: A. thaliana
  misc_feature: MA Experiment 20001557 PARAMETER Experiment Name: At_Drought_Soil_Dry_P Parameter: Plant Line Value: WS
  misc_feature: MA Experiment 20001557 PARAMETER Experiment Name: At_Drought_Soil_Dry_P Parameter: Post Timepoint (hr) Value: 3
  misc_feature: MA Experiment 20001557 PARAMETER Experiment Name: At_Drought_Soil_Dry_P Parameter: Post-Treatment Value: Re-Water vs. No Drought
  misc_feature: MA Experiment 20001557 PARAMETER Experiment Name: At_Drought_Soil_Dry_P Parameter: Timepoint (day) Value: 13
  misc_feature: MA Experiment 20001557 PARAMETER Experiment Name: At_Drought_Soil_Dry_P Parameter: Treatment Value: Drought vs. No Drought
  misc_feature: MA Experiment ID: 20001905 Result: Down-regulated in Transcription
  misc_feature: MA Experiment 20001905 PARAMETER Experiment Name: At_Drought_Reproduction_P Parameter: Age (day) Value: 40
  misc_feature: MA Experiment 20001905 PARAMETER Experiment Name: At_Drought_Reproduction_P Parameter: Organism Value: A. thaliana
  misc_feature: MA Experiment 20001905 PARAMETER Experiment Name: At_Drought_Reproduction_P Parameter: Plant Line Value: WS
  misc_feature: MA Experiment 20001905 PARAMETER Experiment Name: At_Drought_Reproduction_P Parameter: Timepoint (day) Value: 10
  misc_feature: MA Experiment 20001905 PARAMETER Experiment Name: At_Drought_Reproduction_P Parameter: Tissue Value: Rosettes
  misc_feature: MA Experiment 20001905 PARAMETER Experiment Name: At_Drought_Reproduction_P Parameter: Treatment Value: Drought vs. No Drought
gtctactctaaaccatttctgtgacactctttgttacagacttcaatgtttaagttatggccgatcatttgattctttctcttcaagctcctccttttctcatcttcccttgttctcttcaccgttcatggagatttcccggtggaatcagatattccgttcctgagttccgattgtcctctcagctacagttggctaattccatttcaccttcaaagtcttcagcttcctcttcttctccaccggagaattctgctccagagaagttcgatctcgtgtccagcactcagcttaaagatggaagtcatgtctttcggttcggggatgcaagtgagattgagaaatatctcgaggctgaagaaaaagcgagatgtgttgaggtagaaacgcaaaatgctaagattgctgaagaagccagtgaagtttcaaggaaacaaaagaaattggtcagttctattattgaaacaagtactgagaaagaggaaacagctgctccttccgatcttagcaatgtcattaaaataaaggatcgtaaaagggttcgttctcctactaagaagaagaaagaaactgtgaatgtatcacggagcgaagataaaattgatgccaagagtgctagtgtttccaatctgagctccatagttagtgtagcagaagctattccaattagctctactgaagaagaagctgttgttgagaaggaaatcacggctaagtcatataatgtagagcctctttcttctgaagccatgaagaaagtttctgtcaataaaataggagactgtgagacaaatggttatcaagagaatcgtatggaggttcaggcaagaccgtcattgtctacacaacaggaaattacgcctgtatccaccattgaaattgatgacaatttggatgtgacggaaaagcctattgaagctgaggagaatcttgtcgcggaaccaacagctacagatgatttgtctcctgatgaactcctttcaacttcagaagcaacacatcgcagcgttgatgagattgctcaaaaacctgtaattgatacgtctgaggaaaaccttctgaacacttttgaagctgaggagaatcctgtagttgaaccaacagctacagctgctgtctcttctgatgaactcatttcaacttcagaagcaacacgtcacagcgttgatgagatcgctcaaaagcctattattgatacgtctgagaaaaaccctatggaaacttttgttgaaccagaagcagtgcatagtagcgttgacgagagcactgaaaagcttgtagttgttacgtctgatgtggaaaatgatggagaaaatgtagcttcaaccacagaagatgaaataactgtgagggacacaataactgatagtggtagcatatccaataatgatgacacaaaagtggaagatctccaacttcctgtacctgaaacggccagtcttgaacccattaaagcggcttctggcagggaagaacttgtgtccaaagcattttacttggactctggttttgcttcactccaaagcccctttaaggcattggcaggtcgggaagatgcttattttatctctcaccacaattggataggtattgctgatggagtctctcagtggtcatttgaaggaatcaataagggaatgtatgctcaagaactcatgagcaactgtgaaaagattatttccaatgaaactgctaagataagtgacccagttcaagttctccatagaagtgtcaatgagactaagtcctctggatcatcaacagccttaattgctcatcttgacaataatgaactccacatagccaatattggagattcgggattcatggtcattagggatggcacagtattgcagaattcgtctccaatgtttcatcatttttgttttcccttgcatattacgcaaggctgtgatgtcctaaaacttgcagaggtttaccatgtgaacctggaagaaggcgatgttgtcatcgcagcaactgatgggctctttgataacttatacgaaaaagaaatcgtttcaatagtttgcgggtcactgaaacagagtctggaacctcagaaaatagcagagttggtagctgcaaaagcacaagaagtaggacgatctaagacagagagaacgccatttgctgacgcagctaaagaagaaggatacaatggacacaaaggtggtaaacttgatgctgttaccgtcatcatttcattcgtgaaaattgtctctacataaatatgcatcttcctattaattgtaaataatggagagagccgcacacattcacaacaccattctagtttttccaaaaatttcattgaaacgatgtacactggagtaagtttgcattcctgagctatatatgtgagccggatcagtcctggatctgacccg

SEQ ID NO: 77350 - protein, 724 aa, Arabidopsis thaliana
  peptide (1)..(724): Ceres Seq. ID no. 12575959
  misc_feature (488)..(688): Pfam Name: Protein phosphatase 2C Pfam Description: Protein phosphatase 2C
  misc_feature (1)..(471): Homolog of NCBI NO: 7485658 NR Description: hypothetical protein F17M5.260 - Arabidopsis >gi|4490317|emb|CAB38808.1| putative protein [Arabidopsis >gi|7270298|emb|CAB80067.1| putative protein [Arabidopsis
  misc_feature (43)..(721): Homolog of NCBI NO: 7485658 NR Description: hypothetical protein F17M5.260 - Arabidopsis >gi|4490317|emb|CAB38808.1| putative protein [Arabidopsis >gi|7270298|emb|CAB80067.1| putative protein [Arabidopsis
  misc_feature (347)..(720): Homolog of NCBI NO: 37533570 NR Description: putative protein phosphatase 2C [Oryza sativa
  misc_feature (473)..(719): Homolog of NCBI NO: 25366932 NR Description: hypothetical protein dl4315c [imported] - thaliana >gi|5302796|emb|CAB46038.1| hypothetical protein thaliana] >gi|7268408|emb|CAB78700.1| hypothetical protein
  misc_feature (473)..(719): Homolog of NCBI NO: 30683717 NR Description: expressed protein [Arabidopsis thaliana] unknown protein [Arabidopsis thaliana]
  misc_feature (455)..(719): Homolog of NCBI NO: 15240071 NR Description: putative protein; protein id: At5g66720.1 thaliana] >gi|8843730|dbj|BAA97278.1| contains similarity to protein~emb|CAB46038.1~gene_id:MSN2.11 [Arabidopsis thaliana]
  misc_feature (449)..(724): Homolog of NCBI NO: 18402284 NR Description: expressed protein; protein id: At2g30170.1, by cDNA: gi_13878070, supported by cDNA: gi_17104662 [Arabidopsis >gi|13878071|gb|AAK44113.1|AF370298_1 unknown protein
  misc_feature (447)..(722): Homolog of NCBI NO: 34896100 NR Description: B1189A09.35 [Oryza sativa (japonica
  misc_feature (499)..(719): Homolog of NCBI NO: 28893291 NR Description: RIKEN cDNA 9130017A15 gene [Mus musculus]
  misc_feature (499)..(719): Homolog of NCBI NO: 34872403 NR Description: similar to T-cell activation protein phosphatase
MADHLILSLQAPPFLIFPCSLHRSWRFPGGIRYSVPEFRLSSQLQLANSISPSKSSASSSSPPENSAPEKFDLVSSTQLKDGSHVFRFGDASEIEKYLEAEEKARCVEVETQNAKIAEEASEVSRKQKKLVSSIIETSTEKEETAAPSDLSNVIKIKDRKRVRSPTKKKKETVNVSRSEDKIDAKSASVSNLSSIVSVAEAIPISSTEEEAVVEKEITAKSYNVEPLSSEAMKKVSVNKIGDCETNGYQENRMEVQARPSLSTQQEITPVSTIEIDDNLDVTEKPIEAEENLVAEPTATDDLSPDELLSTSEATHRSVDEIAQKPVIDTSEENLLNTFEAEENPVVEPTATAAVSSDELISTSEATRHSVDEIAQKPIIDTSEKNPMETFVEPEAVHSSVDESTEKLVVVTSDVENDGENVASTTEDEITVRDTITDSGSISNNDDTKVEDLQLPVPETASLEPIKAASGREELVSKAFYLDSGFASLQSPFKALAGREDAYFISHHNWIGIADGVSQWSFEGINKGMYAQELMSNCEKIISNETAKISDPVQVLHRSVNETKSSGSSTALIAHLDNNELHIANIGDSGFMVIRDGTVLQNSSPMFHHFCFPLHITQGCDVLKLAEVYHVNLEEGDVVIAATDGLFDNLYEKEIVSIVCGSLKQSLEPQKIAELVAAKAQEVGRSKTERTPFADAAKEEGYNGHKGGKLDAVTVIISFVKIVST

SEQ ID NO: 77351 - protein, 493 aa, Arabidopsis thaliana
  peptide (1)..(493): Ceres Seq. ID no. 12575960
  misc_feature (257)..(457): Pfam Name: Protein phosphatase 2C Pfam Description: Protein phosphatase 2C
  misc_feature (1)..(240): Homolog of NCBI NO: 7485658 NR Description: hypothetical protein F17M5.260 - Arabidopsis >gi|4490317|emb|CAB38808.1| putative protein [Arabidopsis >gi|7270298|emb|CAB80067.1| putative protein [Arabidopsis
  misc_feature (1)..(490): Homolog of NCBI NO: 7485658 NR Description: hypothetical protein F17M5.260 - Arabidopsis >gi|4490317|emb|CAB38808.1| putative protein [Arabidopsis >gi|7270298|emb|CAB80067.1| putative protein [Arabidopsis
  misc_feature (116)..(489): Homolog of NCBI NO: 37533570 NR Description: putative protein phosphatase 2C [Oryza sativa
  misc_feature (242)..(488): Homolog of NCBI NO: 25366932 NR Description: hypothetical protein dl4315c [imported] - thaliana >gi|5302796|emb|CAB46038.1| hypothetical protein thaliana] >gi|7268408|emb|CAB78700.1| hypothetical protein
  misc_feature (242)..(488): Homolog of NCBI NO: 30683717 NR Description: expressed protein [Arabidopsis thaliana] unknown protein [Arabidopsis thaliana]
  misc_feature (224)..(488): Homolog of NCBI NO: 15240071 NR Description: putative protein; protein id: At5g66720.1 thaliana] >gi|8843730|dbj|BAA97278.1| contains similarity to protein~emb|CAB46038.1~gene_id:MSN2.11 [Arabidopsis thaliana]
  misc_feature (218)..(493): Homolog of NCBI NO: 18402284 NR Description: expressed protein; protein id: At2g30170.1, by cDNA: gi_13878070, supported by cDNA: gi_17104662 [Arabidopsis >gi|13878071|gb|AAK44113.1|AF370298_1 unknown protein
  misc_feature (216)..(491): Homolog of NCBI NO: 34896100 NR Description: B1189A09.35 [Oryza sativa (japonica
  misc_feature (268)..(488): Homolog of NCBI NO: 28893291 NR Description: RIKEN cDNA 9130017A15 gene [Mus musculus]
  misc_feature (268)..(488): Homolog of NCBI NO: 34872403 NR Description: similar to T-cell activation protein phosphatase
MKKVSVNKIGDCETNGYQENRMEVQARPSLSTQQEITPVSTIEIDDNLDVTEKPIEAEENLVAEPTATDDLSPDELLSTSEATHRSVDEIAQKPVIDTSEENLLNTFEAEENPVVEPTATAAVSSDELISTSEATRHSVDEIAQKPIIDTSEKNPMETFVEPEAVHSSVDESTEKLVVVTSDVENDGENVASTTEDEITVRDTITDSGSISNNDDTKVEDLQLPVPETASLEPIKAASGREELVSKAFYLDSGFASLQSPFKALAGREDAYFISHHNWIGIADGVSQWSFEGINKGMYAQELMSNCEKIISNETAKISDPVQVLHRSVNETKSSGSSTALIAHLDNNELHIANIGDSGFMVIRDGTVLQNSSPMFHHFCFPLHITQGCDVLKLAEVYHVNLEEGDVVIAATDGLFDNLYEKEIVSIVCGSLKQSLEPQKIAELVAAKAQEVGRSKTERTPFADAAKEEGYNGHKGGKLDAVTVIISFVKIVST

SEQ ID NO: 77352 - protein, 472 aa, Arabidopsis thaliana
  peptide (1)..(472): Ceres Seq. ID no. 12575961
  misc_feature (236)..(436): Pfam Name: Protein phosphatase 2C Pfam Description: Protein phosphatase 2C
  misc_feature (1)..(219): Homolog of NCBI NO: 7485658 NR Description: hypothetical protein F17M5.260 - Arabidopsis >gi|4490317|emb|CAB38808.1| putative protein [Arabidopsis >gi|7270298|emb|CAB80067.1| putative protein [Arabidopsis
  misc_feature (1)..(469): Homolog of NCBI NO: 7485658 NR Description: hypothetical protein F17M5.260 - Arabidopsis >gi|4490317|emb|CAB38808.1| putative protein [Arabidopsis >gi|7270298|emb|CAB80067.1| putative protein [Arabidopsis
  misc_feature (95)..(468): Homolog of NCBI NO: 37533570 NR Description: putative protein phosphatase 2C [Oryza sativa
  misc_feature (221)..(467): Homolog of NCBI NO: 25366932 NR Description: hypothetical protein dl4315c [imported] - thaliana >gi|5302796|emb|CAB46038.1| hypothetical protein thaliana] >gi|7268408|emb|CAB78700.1| hypothetical protein
  misc_feature (221)..(467): Homolog of NCBI NO: 30683717 NR Description: expressed protein [Arabidopsis thaliana] unknown protein [Arabidopsis thaliana]
  misc_feature (203)..(467): Homolog of NCBI NO: 15240071 NR Description: putative protein; protein id: At5g66720.1 thaliana] >gi|8843730|dbj|BAA97278.1| contains similarity to protein~emb|CAB46038.1~gene_id:MSN2.11 [Arabidopsis thaliana]
  misc_feature (197)..(472): Homolog of NCBI NO: 18402284 NR Description: expressed protein; protein id: At2g30170.1, by cDNA: gi_13878070, supported by cDNA: gi_17104662 [Arabidopsis >gi|13878071|gb|AAK44113.1|AF370298_1 unknown protein
  misc_feature (195)..(470): Homolog of NCBI NO: 34896100 NR Description: B1189A09.35 [Oryza sativa (japonica
  misc_feature (247)..(467): Homolog of NCBI NO: 28893291 NR Description: RIKEN cDNA 9130017A15 gene [Mus musculus]
  misc_feature (247)..(467): Homolog of NCBI NO: 34872403 NR Description: similar to T-cell activation protein phosphatase
MEVQARPSLSTQQEITPVSTIEIDDNLDVTEKPIEAEENLVAEPTATDDLSPDELLSTSEATHRSVDEIAQKPVIDTSEENLLNTFEAEENPVVEPTATAAVSSDELISTSEATRHSVDEIAQKPIIDTSEKNPMETFVEPEAVHSSVDESTEKLVVVTSDVENDGENVASTTEDEITVRDTITDSGSISNNDDTKVEDLQLPVPETASLEPIKAASGREELVSKAFYLDSGFASLQSPFKALAGREDAYFISHHNWIGIADGVSQWSFEGINKGMYAQELMSNCEKIISNETAKISDPVQVLHRSVNETKSSGSSTALIAHLDNNELHIANIGDSGFMVIRDGTVLQNSSPMFHHFCFPLHITQGCDVLKLAEVYHVNLEEGDVVIAATDGLFDNLYEKEIVSIVCGSLKQSLEPQKIAELVAAKAQEVGRSKTERTPFADAAKEEGYNGHKGGKLDAVTVIISFVKIVST

SEQ ID NO: 77353 - DNA, 2225 bp, Arabidopsis thaliana
  misc_feature (1)..(2225): Ceres Seq. ID no. 12576005
  misc_feature: MA Experiment ID: 20000171 Result: Up-regulated in Transcription
  misc_feature: MA Experiment 20000171 PARAMETER Experiment Name: At_42deg_Heat_P Parameter: Age (day) Value: 14
  misc_feature: MA Experiment 20000171 PARAMETER Experiment Name: At_42deg_Heat_P Parameter: Organism Value: A. thaliana
  misc_feature: MA Experiment 20000171 PARAMETER Experiment Name: At_42deg_Heat_P Parameter: Plant Line Value: WS
  misc_feature: MA Experiment 20000171 PARAMETER Experiment Name: At_42deg_Heat_P Parameter: Temperature (deg C) Value: 42 vs. 22
  misc_feature: MA Experiment 20000171 PARAMETER Experiment Name: At_42deg_Heat_P Parameter: Timepoint (hr) Value: 1
  misc_feature: MA Experiment 20000171 PARAMETER Experiment Name: At_42deg_Heat_P Parameter: Tissue Value: Aerial
  misc_feature: MA Experiment ID: 20000173 Result: Up-regulated in Transcription
  misc_feature: MA Experiment 20000173 PARAMETER Experiment Name: At_42deg_Heat_P Parameter: Age (day) Value: 14
  misc_feature: MA Experiment 20000173 PARAMETER Experiment Name: At_42deg_Heat_P Parameter: Organism Value: A. thaliana
  misc_feature: MA Experiment 20000173 PARAMETER Experiment Name: At_42deg_Heat_P Parameter: Plant Line Value: WS
  misc_feature: MA Experiment 20000173 PARAMETER Experiment Name: At_42deg_Heat_P Parameter: Temperature (deg C) Value: 42 vs. 22
  misc_feature: MA Experiment 20000173 PARAMETER Experiment Name: At_42deg_Heat_P Parameter: Timepoint (hr) Value: 6
  misc_feature: MA Experiment 20000173 PARAMETER Experiment Name: At_42deg_Heat_P Parameter: Tissue Value: Aerial
  misc_feature: MA Experiment ID: 20000184 Result: Down-regulated in Transcription
  misc_feature: MA Experiment 20000184 PARAMETER Experiment Name: At_Shoots__P Parameter: Age (day) Value: 7
  misc_feature: MA Experiment 20000184 PARAMETER Experiment Name: At_Shoots__P Parameter: Tissue Value: Shoots vs. Whole Plant
  misc_feature: MA Experiment ID: 20001451 Result: Down-regulated in Transcription
  misc_feature: MA Experiment 20001451 PARAMETER Experiment Name: At_Far-red-induction_P Parameter: Age (day) Value: 7
  misc_feature: MA Experiment 20001451 PARAMETER Experiment Name: At_Far-red-induction_P Parameter: Light Value: Far-red vs. White
  misc_feature: MA Experiment 20001451 PARAMETER Experiment Name: At_Far-red-induction_P Parameter: Organism Value: A. thaliana
  misc_feature: MA Experiment 20001451 PARAMETER Experiment Name: At_Far-red-induction_P Parameter: Plant Line Value: Columbia
  misc_feature: MA Experiment 20001451 PARAMETER Experiment Name: At_Far-red-induction_P Parameter: Timepoint (hr) Value: 24
  misc_feature: MA Experiment 20001451 PARAMETER Experiment Name: At_Far-red-induction_P Parameter: Tissue Value: Whole Plant
  misc_feature: MA Experiment ID: 20001557 Result: Up-regulated in Transcription
  misc_feature: MA Experiment 20001557 PARAMETER Experiment Name: At_Drought_Soil_Dry_P Parameter: Age (day) Value: 27
  misc_feature: MA Experiment 20001557 PARAMETER Experiment Name: At_Drought_Soil_Dry_P Parameter: Organism Value: A. thaliana
  misc_feature: MA Experiment 20001557 PARAMETER Experiment Name: At_Drought_Soil_Dry_P Parameter: Plant Line Value: WS
  misc_feature: MA Experiment 20001557 PARAMETER Experiment Name: At_Drought_Soil_Dry_P Parameter: Post Timepoint (hr) Value: 3
  misc_feature: MA Experiment 20001557 PARAMETER Experiment Name: At_Drought_Soil_Dry_P Parameter: Post-Treatment Value: Re-Water vs. No Drought
  misc_feature: MA Experiment 20001557 PARAMETER Experiment Name: At_Drought_Soil_Dry_P Parameter: Timepoint (day) Value: 13
  misc_feature: MA Experiment 20001557 PARAMETER Experiment Name: At_Drought_Soil_Dry_P Parameter: Treatment Value: Drought vs. No Drought
agaaccttctttttccggcgagggaagagcttcctcagccctaatcgctaaatcgatgaaattatgctcccaacgtttaacggtttaaagatcattccaaaaactcaaccttttgcgtgtctcctctcgccatgaccctaatctcaagatttttgatctctagagtgattagtagaactctgttttcgaatcagaataatagaacagctattaatgtttctgtaaagttgccacaattcagaattcagagtaatggatatcacacattgggtcttcttcataatgttaaaggaaggtttttaggtagtaatcatcatcagcttgcgcgtaggagctattcgattgcagttgcgagtaatgtagttaagcaacatgctcaagtctcttggggaaggcttgtacagagagtaactctgagtcgtagttggaacttacctcggataagtcagattgctcaagcgtgtagcttgtctttagcccgttcgcacttcttgttacctggtttattggctcttacctatagacaagtggcgtatgcgcaaagggtggttccaaatcctgtggtctattctccttcacacatttctccttataggagttcgataaacttccctatcgttctctcgtctttagtgttttctgcggtcaagggtgttgttctgatcgggagagctctttatttagcaattttgttttctccaaatgttattatggcgttgttgggatttgcttgcgggcctcgttacagacagctgcagtatgaggtcctccatcgaactctggagaaagcaggtcctgcttttatcaaatttggtcaatggattgctacgcgacctgatcggtttaataaggatttgtgtttgcagctttcaaagcttcacagtaatgctcctgagcacagttttgcgttcaccaaaaagagcattgaaaatgcatttggtcgtaaactctctgagatatttgaggaatttgatgaggcgccagtggcatctgggagtatagctcaagtacaccgagcttccttgaagtttcagtatgcaggacaaaaggtgaagtcctcggaagttgctgtgaaagttagacatccttgtgttgaggaaacgatgaagcgagattttgtgataattaatttcgtggcgaggctaaccacttttattccggggttaaattggcttagattggacgagtgtgtgcaacagtttagtgtctacatgttgtcccaagttgatctctcaagggaagcttctcatttgagtcggtttatatataacttccgtggatggaaagatgtctcttttcctaagcccatctatcctctaatacatcccgctgttttagtcgagacgtatgagcacggagagagtgtggctcgttatgttgatggctccgaaggacaagaaaaacttaaggctaaagtagctcatatcggaactaatgctctcttgaaaatgctcctggtcgacaacttcattcatgctgatatgcatcctgggaatattcttgtccggccaaacaatactagaagaggtctattcagatcgaggaagccacacatcgttttcctagatgtgggcatgactgcagaactttcaaaaactgaccgagataacctactcggatttttcaaggccgttgcacgtagagacggccggactgctgctgaacgaacacttaaattatctaaacaacagaattgtcctgatccacaggcctttatcaaggaagtagaagaagcatttacattctggggaacagaggaaggggatctagtccatccagcggattgtatgcacgaactattcgagaaaatgaggagtcatagagttaatatcgacggcaatgtgtccaccgtcatgtttacaacattagttctcgagggttggcaacggaaactggatccaggatacgatgtgatgcgtacgctacaaacaatgctgctgaaaacggattggatgaaatcactttcttacacgatcgatggacttatggctccgtagattgaaaaggttcaatctttgattcttttacccatttaacacttgagagccacatttttgttttgttgccttaggatgtgaagaagaaccaaaacatatattttagagaaaaacaaaggaaaagtcctttactgttttgtcttcttcttatcttttgcttattctttgattattctttttgctagaaattggaattcttcatcattctaaaacagagaatttgtattt

SEQ ID NO: 77354 - protein, 621 aa, Arabidopsis thaliana
  peptide (1)..(621): Ceres Seq. ID no. 12576006
  misc_feature (267)..(393): Pfam Name: ABC1 family Pfam Description: ABC1 family
  misc_feature (194)..(621): Homolog of NCBI NO: 25404331 NR Description: hypothetical protein T25B24.1 [imported] - thaliana >gi|4585871|gb|AAD25544.1|AC005850_1 Unknown protein
  misc_feature (194)..(621): Homolog of NCBI NO: 30682208 NR Description: hypethetical 62.8 KD protein in SSE1-CAR1
  misc_feature (54)..(621): Homolog of NCBI NO: 19387282 NR Description: putative 62.8 kDa protein [Oryza sativa (japonica
  misc_feature (54)..(621): Homolog of NCBI NO: 32488318 NR Description: OSJNBa0015K02.12 [Oryza sativa (japonica
  misc_feature (67)..(606): Homolog of NCBI NO: 34394005 NR Description: putative ubiquinone biosynthesis protein AarF
  misc_feature (288)..(480): Homolog of NCBI NO: 32261307 NR Description: putative ubiquinone biosynthesis protein AarF sapiens] >gi|31872130|gb|AAP60021.1| putative ubiquinone
  misc_feature (475)..(603): Homolog of NCBI NO: 32261307 NR Description: putative ubiquinone biosynthesis protein AarF sapiens] >gi|31872130|gb|AAP60021.1| putative ubiquinone
  misc_feature (180)..(296): Homolog of NCBI NO: 32261307 NR Description: putative ubiquinone biosynthesis protein AarF sapiens] >gi|31872130|gb|AAP60021.1| putative ubiquinone
  misc_feature (282)..(459): Homolog of NCBI NO: 32409949 NR Description: hypothetical protein [Neurospora crassa]
  misc_feature (472)..(595): Homolog of NCBI NO: 32409949 NR Description: hypothetical protein [Neurospora crassa]
MTLISRFLISRVISRTLFSNQNNRTAINVSVKLPQFRIQSNGYHTLGLLHNVKGRFLGSNHHQLARRSYSIAVASNVVKQHAQVSWGRLVQRVTLSRSWNLPRISQIAQACSLSLARSHFLLPGLLALTYRQVAYAQRVVPNPVVYSPSHISPYRSSINFPIVLSSLVFSAVKGVVLIGRALYLAILFSPNVIMALLGFACGPRYRQLQYEVLHRTLEKAGPAFIKFGQWIATRPDRFNKDLCLQLSKLHSNAPEHSFAFTKKSIENAFGRKLSEIFEEFDEAPVASGSIAQVHRASLKFQYAGQKVKSSEVAVKVRHPCVEETMKRDFVIINFVARLTTFIPGLNWLRLDECVQQFSVYMLSQVDLSREASHLSRFIYNFRGWKDVSFPKPIYPLIHPAVLVETYEHGESVARYVDGSEGQEKLKAKVAHIGTNALLKMLLVDNFIHADMHPGNILVRPNNTRRGLFRSRKPHIVFLDVGMTAELSKTDRDNLLGFFKAVARRDGRTAAERTLKLSKQQNCPDPQAFIKEVEEAFTFWGTEEGDLVHPADCMHELFEKMRSHRVNIDGNVSTVMFTTLVLEGWQRKLDPGYDVMRTLQTMLLKTDWMKSLSYTIDGLMAP

SEQ ID NO: 77355 - protein, 428 aa, Arabidopsis thaliana; identical to SEQ ID NO: 46436
  peptide (1)..(428): Ceres Seq. ID no. 12576007
  misc_feature (74)..(200): Pfam Name: ABC1 family Pfam Description: ABC1 family
  misc_feature (1)..(428): Homolog of NCBI NO: 25404331 NR Description: hypothetical protein T25B24.1 [imported] - thaliana >gi|4585871|gb|AAD25544.1|AC005850_1 Unknown protein
  misc_feature (1)..(428): Homolog of NCBI NO: 30682208 NR Description: hypethetical 62.8 KD protein in SSE1-CAR1
  misc_feature (1)..(428): Homolog of NCBI NO: 19387282 NR Description: putative 62.8 kDa protein [Oryza sativa (japonica
  misc_feature (1)..(428): Homolog of NCBI NO: 32488318 NR Description: OSJNBa0015K02.12 [Oryza sativa (japonica
  misc_feature (1)..(413): Homolog of NCBI NO: 34394005 NR Description: putative ubiquinone biosynthesis protein AarF
  misc_feature (95)..(287): Homolog of NCBI NO: 32261307 NR Description: putative ubiquinone biosynthesis protein AarF sapiens] >gi|31872130|gb|AAP60021.1| putative ubiquinone
  misc_feature (282)..(410): Homolog of NCBI NO: 32261307 NR Description: putative ubiquinone biosynthesis protein AarF sapiens] >gi|31872130|gb|AAP60021.1| putative ubiquinone
  misc_feature (1)..(103): Homolog of NCBI NO: 32261307 NR Description: putative ubiquinone biosynthesis protein AarF sapiens] >gi|31872130|gb|AAP60021.1| putative ubiquinone
  misc_feature (89)..(266): Homolog of NCBI NO: 32409949 NR Description: hypothetical protein [Neurospora crassa]
  misc_feature (279)..(402): Homolog of NCBI NO: 32409949 NR Description: hypothetical protein [Neurospora crassa]

SEQ ID NO: 77356 - DNA, 1821 bp, Arabidopsis thaliana
  misc_feature (1)..(1821): Ceres Seq. ID no. 12576075
  misc_feature: MA Experiment ID: 108573 Result: Up-regulated in Transcription
  misc_feature: MA Experiment 108573 PARAMETER Experiment Name: At_Drought_cDNA_P Parameter: Timepoint (hr) Value: 6
  misc_feature: MA Experiment 108573 PARAMETER Experiment Name: At_Drought_cDNA_P Parameter: Tissue Value: Aerial
  misc_feature: MA Experiment 108573 PARAMETER Experiment Name: At_Drought_cDNA_P Parameter: Treatment Value: Drought vs. No Drought
  misc_feature: MA Experiment ID: 108585 Result: Up-regulated in Transcription
  misc_feature: MA Experiment 108585 PARAMETER Experiment Name: At_5mM_NaNP_cDNA_P Parameter: Timepoint (hr) Value: 6
  misc_feature: MA Experiment 108585 PARAMETER Experiment Name: At_5mM_NaNP_cDNA_P Parameter: Tissue Value: Aerial
  misc_feature: MA Experiment 108585 PARAMETER Experiment Name: At_5mM_NaNP_cDNA_P Parameter: Treatment Value: null
  misc_feature: MA Experiment ID: 20000179 Result: Down-regulated in Transcription
  misc_feature: MA Experiment 20000179 PARAMETER Experiment Name: At_Germinating_Seeds_P Parameter: Age (hr) Value: 6 vs. 0
  misc_feature: MA Experiment 20000179 PARAMETER Experiment Name: At_Germinating_Seeds_P Parameter: Tissue Value: Germinating Seeds
  misc_feature: MA Experiment ID: 20000180 Result: Down-regulated in Transcription
  misc_feature: MA Experiment 20000180 PARAMETER Experiment Name: At_Germinating_Seeds_P Parameter: Age (hr) Value: 24 vs. 0
  misc_feature: MA Experiment 20000180 PARAMETER Experiment Name: At_Germinating_Seeds_P Parameter: Tissue Value: Germinating Seeds
  misc_feature: MA Experiment ID: 20001247 Result: Up-regulated in Transcription
  misc_feature: MA Experiment 20001247 PARAMETER Experiment Name: At_Far-red-induction_P Parameter: Age (day) Value: 7
  misc_feature: MA Experiment 20001247 PARAMETER Experiment Name: At_Far-red-induction_P Parameter: Light Value: Far-red vs. White
  misc_feature: MA Experiment 20001247 PARAMETER Experiment Name: At_Far-red-induction_P Parameter: Organism Value: A. thaliana
  misc_feature: MA Experiment 20001247 PARAMETER Experiment Name: At_Far-red-induction_P Parameter: Plant Line Value: Columbia
  misc_feature: MA Experiment 20001247 PARAMETER Experiment Name: At_Far-red-induction_P Parameter: Timepoint (hr) Value: 1
  misc_feature: MA Experiment 20001247 PARAMETER Experiment Name: At_Far-red-induction_P Parameter: Tissue Value: Whole Plant
tctgcgtcgcccggcggcggaaatgtgcgcttggggcgatgcgtttaattctcaccgtcatgtgctcattcattccttacctttattcatcttctcctcaccgtccttgctcttccccaatctctcgtcctcctcctcgaatccgtccttgtcgtctcagtcgtttcgccaccgcattagtcgctacctccgctcttcttctcgcttccgtcgcttggctttctctcgtcttctcaccaaccacttcccgttgttggcatcttcttaaagattgggaagacaatcatctctggaacaaacggtaccatcatccaattgtaactcctcctccgccgccgccgtcgccgccgtctcttccagctcttccgttattcgatcatgaatttagaaatcgtagtctctcagagattgataaacttgatctgtctatgaatcacttgatgtttggtattgctggatcttcacagctttgggaacgtcgtaaggaacttgtgagattatggtggaaaccttctcagatgcgtggacatgtctggcttgaagagcaagtttctcctgaggaaggtgatgattctcttcctcctataattgtctctgaagacagctctcgttttcgttacactaatcctactggtcatccttctggacttcgaatctctcgtattgctatggagtcttttcgtctctctctccctaatgttcggtggtttgttcttggtgatgatgatactatcttcaatgttcataatcttcttgctgtgttaagcaagtatgatccttcggagatggtttatattggaaacccctcggagagccactctgctaactcttactttagtcataacatggcttttggaggcggtggcattgccattagctaccctttagcggaagctctctcccggattcacgacgattgtctcgatagatacccgaagctatacggtagtgatgatcgtctccacgcctgcatcactgaactcggagttcctttgtccagagagcctggctttcaccagtgggatattaagggaaatgctcatggtctcttgtcctctcatcctattgcaccatttgtctcaattcatcacgttgaagctgttaatcctctctatccgggattatctacattagatagtttgaaactcttgacaagagctatgagtttggatcctaggagtgttttgcagcgatcgatctgctatgatcatactcacaaactgacatttgcgatatctcttggttatgttgtacaagttttcccaagtattctcctaccacgggatcttgagcgagctgaactttctttctctgcttggaacgggataagtcaacccagtgagtttgatcttgacataaagcttccaatttcgtctctctgtaagaagcctatcctcttcttcttgaaagaggttggccaagaaggtaatgctacacttggaacgtactcaagatccttggtaaaggatgatttgaagacgaagcttctatgttttccacgctctctacctctgcacaaagtggataaaatccaggtctcagggtttcctctgagtaaaaattggcacttggcgccgagacggttgtgttgcagagcaaccccaactactactaacgagcctctcagattaacagttgggcagtgtggtaagataattttgggttccacgattagttctcaatgaacacttatggtgaatactggatctctctaagcatgttgtttcagctctatcctgtacttgtacataggtaagatccagaaccttgactgttgtctgacctagaatgctaatatgcccaaaattgaatttgtcactc

SEQ ID NO: 77357 - protein, 560 aa, Arabidopsis thaliana
  peptide (1)..(560): Ceres Seq. ID no. 12576076
  misc_feature (274)..(531): Pfam Name: Protein of unknown function, DUF604 Pfam Description: Protein of unknown function, DUF604
  misc_feature (13)..(560): Homolog of NCBI NO: 15217473 NR Description: unknown protein; protein id: At1g33250.1
  misc_feature (141)..(523): Homolog of NCBI NO: 37536074 NR Description: hypothetical protein [Oryza sativa (japonica group)] >gi|13786455|gb|AAK39580.1| hypothetical protein [Oryza >gi|31433066|gb|AAP54626.1| hypothetical protein [Oryza sativa
  misc_feature (136)..(548): Homolog of NCBI NO: 18416156 NR Description: Expressed protein; protein id: At4g23490.1, by cDNA: gi_15529152 [Arabidopsis thaliana]
  misc_feature (136)..(548): Homolog of NCBI NO: 15529153 NR Description: AT4g23490/F16G20_190 [Arabidopsis thaliana]
  misc_feature (56)..(552): Homolog of NCBI NO: 15238082 NR Description: putative protein; protein id: At5g41460.1 thaliana] >gi|9758054|dbj|BAB08517.1|
  misc_feature (110)..(548): Homolog of NCBI NO: 37536418 NR Description: hypothetical protein [Oryza sativa (japonica group)] >gi|22002140|gb|AAM88624.1| hypothetical protein [Oryza
  misc_feature (196)..(528): Homolog of NCBI NO: 15223021 NR Description: hypothetical protein; protein id: At1g07850.1
  misc_feature (142)..(206): Homolog of NCBI NO: 15223021 NR Description: hypothetical protein; protein id: At1g07850.1
  misc_feature (258)..(483): Homolog of NCBI NO: 7485555 NR Description: hypothetical protein F16G20.190 - Arabidopsis >gi|3451074|emb|CAA20470.1| putative protein [Arabidopsis >gi|7269197|emb|CAB79304.1| putative protein [Arabidopsis
  misc_feature (136)..(250): Homolog of NCBI NO: 7485555 NR Description: hypothetical protein F16G20.190 - Arabidopsis >gi|3451074|emb|CAA20470.1| putative protein [Arabidopsis >gi|7269197|emb|CAB79304.1| putative protein [Arabidopsis
CVARRRKCALGAMRLILTVMCSFIPYLYSSSPHRPCSSPISRPPPRIRPCRLSRFATALVATSALLLASVAWLSLVFSPTTSRCWHLLKDWEDNHLWNKRYHHPIVTPPPPPPSPPSLPALPLFDHEFRNRSLSEIDKLDLSMNHLMFGIAGSSQLWERRKELVRLWWKPSQMRGHVWLEEQVSPEEGDDSLPPIIVSEDSSRFRYTNPTGHPSGLRISRIAMESFRLSLPNVRWFVLGDDDTIFNVHNLLAVLSKYDPSEMVYIGNPSESHSANSYFSHNMAFGGGGIAISYPLAEALSRIHDDCLDRYPKLYGSDDRLHACITELGVPLSREPGFHQWDIKGNAHGLLSSHPIAPFVSIHHVEAVNPLYPGLSTLDSLKLLTRAMSLDPRSVLQRSICYDHTHKLTFAISLGYVVQVFPSILLPRDLERAELSFSAWNGISQPSEFDLDIKLPISSLCKKPILFFLKEVGQEGNATLGTYSRSLVKDDLKTKLLCFPRSLPLHKVDKIQVSGFPLSKNWHLAPRRLCCRATPTTTNEPLRLTVGQCGKIILGSTISSQ

SEQ ID NO: 77358 - protein, 548 aa, Arabidopsis thaliana
  peptide (1)..(548): Ceres Seq. ID no. 12576077
  misc_feature (262)..(519): Pfam Name: Protein of unknown function, DUF604 Pfam Description: Protein of unknown function, DUF604
  misc_feature (1)..(548): Homolog of NCBI NO: 15217473 NR Description: unknown protein; protein id: At1g33250.1
  misc_feature (129)..(511): Homolog of NCBI NO: 37536074 NR Description: hypothetical protein [Oryza sativa (japonica group)] >gi|13786455|gb|AAK39580.1| hypothetical protein [Oryza >gi|31433066|gb|AAP54626.1| hypothetical protein [Oryza sativa
  misc_feature (124)..(536): Homolog of NCBI NO: 18416156 NR Description: Expressed protein; protein id: At4g23490.1, by cDNA: gi_15529152 [Arabidopsis thaliana]
  misc_feature (124)..(536): Homolog of NCBI NO: 15529153 NR Description: AT4g23490/F16G20_190 [Arabidopsis thaliana]
  misc_feature (44)..(540): Homolog of NCBI NO: 15238082 NR Description: putative protein; protein id: At5g41460.1 thaliana] >gi|9758054|dbj|BAB08517.1|
  misc_feature (98)..(536): Homolog of NCBI NO: 37536418 NR Description: hypothetical protein [Oryza sativa (japonica group)] >gi|22002140|gb|AAM88624.1| hypothetical protein [Oryza
  misc_feature (184)..(516): Homolog of NCBI NO: 15223021 NR Description: hypothetical protein; protein id: At1g07850.1
  misc_feature (130)..(194): Homolog of NCBI NO: 15223021 NR Description: hypothetical protein; protein id: At1g07850.1
  misc_feature (246)..(471): Homolog of NCBI NO: 7485555 NR Description: hypothetical protein F16G20.190 - Arabidopsis >gi|3451074|emb|CAA20470.1| putative protein [Arabidopsis >gi|7269197|emb|CAB79304.1| putative protein [Arabidopsis
  misc_feature (124)..(238): Homolog of NCBI NO: 7485555 NR Description: hypothetical protein F16G20.190 - Arabidopsis >gi|3451074|emb|CAA20470.1| putative protein [Arabidopsis >gi|7269197|emb|CAB79304.1| putative protein [Arabidopsis
MRLILTVMCSFIPYLYSSSPHRPCSSPISRPPPRIRPCRLSRFATALVATSALLLASVAWLSLVFSPTTSRCWHLLKDWEDNHLWNKRYHHPIVTPPPPPPSPPSLPALPLFDHEFRNRSLSEIDKLDLSMNHLMFGIAGSSQLWERRKELVRLWWKPSQMRGHVWLEEQVSPEEGDDSLPPIIVSEDSSRFRYTNPTGHPSGLRISRIAMESFRLSLPNVRWFVLGDDDTIFNVHNLLAVLSKYDPSEMVYIGNPSESHSANSYFSHNMAFGGGGIAISYPLAEALSRIHDDCLDRYPKLYGSDDRLHACITELGVPLSREPGFHQWDIKGNAHGLLSSHPIAPFVSIHHVEAVNPLYPGLSTLDSLKLLTRAMSLDPRSVLQRSICYDHTHKLTFAISLGYVVQVFPSILLPRDLERAELSFSAWNGISQPSEFDLDIKLPISSLCKKPILFFLKEVGQEGNATLGTYSRSLVKDDLKTKLLCFPRSLPLHKVDKIQVSGFPLSKNWHLAPRRLCCRATPTTTNEPLRLTVGQCGKIILGSTISSQ

SEQ ID NO: 77359 - protein, 541 aa, Arabidopsis thaliana
  peptide (1)..(541): Ceres Seq. ID no. 12576078
  misc_feature (255)..(512): Pfam Name: Protein of unknown function, DUF604 Pfam Description: Protein of unknown function, DUF604
  misc_feature (1)..(541): Homolog of NCBI NO: 15217473 NR Description: unknown protein; protein id: At1g33250.1
  misc_feature (122)..(504): Homolog of NCBI NO: 37536074 NR Description: hypothetical protein [Oryza sativa (japonica group)] >gi|13786455|gb|AAK39580.1| hypothetical protein [Oryza >gi|31433066|gb|AAP54626.1| hypothetical protein [Oryza sativa
  misc_feature (117)..(529): Homolog of NCBI NO: 18416156 NR Description: Expressed protein; protein id: At4g23490.1, by cDNA: gi_15529152 [Arabidopsis thaliana]
  misc_feature (117)..(529): Homolog of NCBI NO: 15529153 NR Description: AT4g23490/F16G20_190 [Arabidopsis thaliana]
  misc_feature (37)..(533): Homolog of NCBI NO: 15238082 NR Description: putative protein; protein id: At5g41460.1 thaliana] >gi|9758054|dbj|BAB08517.1|
  misc_feature (91)..(529): Homolog of NCBI NO: 37536418 NR Description: hypothetical protein [Oryza sativa (japonica group)] >gi|22002140|gb|AAM88624.1| hypothetical protein [Oryza
  misc_feature (177)..(509): Homolog of NCBI NO: 15223021 NR Description: hypothetical protein; protein id: At1g07850.1
  misc_feature (123)..(187): Homolog of NCBI NO: 15223021 NR Description: hypothetical protein; protein id: At1g07850.1
  misc_feature (239)..(464): Homolog of NCBI NO: 7485555 NR Description: hypothetical protein F16G20.190 - Arabidopsis >gi|3451074|emb|CAA20470.1| putative protein [Arabidopsis >gi|7269197|emb|CAB79304.1| putative protein [Arabidopsis
  misc_feature (117)..(231): Homolog of NCBI NO: 7485555 NR Description: hypothetical protein F16G20.190 - Arabidopsis >gi|3451074|emb|CAA20470.1| putative protein [Arabidopsis >gi|7269197|emb|CAB79304.1| putative protein [Arabidopsis
MCSFIPYLYSSSPHRPCSSPISRPPPRIRPCRLSRFATALVATSALLLASVAWLSLVFSPTTSRCWHLLKDWEDNHLWNKRYHHPIVTPPPPPPSPPSLPALPLFDHEFRNRSLSEIDKLDLSMNHLMFGIAGSSQLWERRKELVRLWWKPSQMRGHVWLEEQVSPEEGDDSLPPIIVSEDSSRFRYTNPTGHPSGLRISRIAMESFRLSLPNVRWFVLGDDDTIFNVHNLLAVLSKYDPSEMVYIGNPSESHSANSYFSHNMAFGGGGIAISYPLAEALSRIHDDCLDRYPKLYGSDDRLHACITELGVPLSREPGFHQWDIKGNAHGLLSSHPIAPFVSIHHVEAVNPLYPGLSTLDSLKLLTRAMSLDPRSVLQRSICYDHTHKLTFAISLGYVVQVFPSILLPRDLERAELSFSAWNGISQPSEFDLDIKLPISSLCKKPILFFLKEVGQEGNATLGTYSRSLVKDDLKTKLLCFPRSLPLHKVDKIQVSGFPLSKNWHLAPRRLCCRATPTTTNEPLRLTVGQCGKIILGSTISSQ

SEQ ID NO: 77360 - DNA, 1550 bp, Arabidopsis thaliana
  misc_feature (1)..(1550): Ceres Seq. ID no. 12576131
  misc_feature: MA Experiment ID: 20000185 Result: Up-regulated in Transcription
  misc_feature: MA Experiment 20000185 PARAMETER Experiment Name: At_Roots__P Parameter: Age (day) Value: 7 vs. 21
  misc_feature: MA Experiment 20000185 PARAMETER Experiment Name: At_Roots__P Parameter: Organism Value: A. thaliana
  misc_feature: MA Experiment 20000185 PARAMETER Experiment Name: At_Roots__P Parameter: Tissue Value: Roots vs. Whole Plant
  misc_feature: MA Experiment ID: 20000437 Result: Up-regulated in Transcription
  misc_feature: MA Experiment 20000437 PARAMETER Experiment Name: At_Drought_P Parameter: Age (day) Value: 8
  misc_feature: MA Experiment 20000437 PARAMETER Experiment Name: At_Drought_P Parameter: Organism Value: A. thaliana
  misc_feature: MA Experiment 20000437 PARAMETER Experiment Name: At_Drought_P Parameter: Plant Line Value: WS
  misc_feature: MA Experiment 20000437 PARAMETER Experiment Name: At_Drought_P Parameter: Timepoint (hr) Value: 24
  misc_feature: MA Experiment 20000437 PARAMETER Experiment Name: At_Drought_P Parameter: Tissue Value: Whole Plant
  misc_feature: MA Experiment 20000437 PARAMETER Experiment Name: At_Drought_P Parameter: Treatment Value: Drought vs. No Drought
  misc_feature: MA Experiment ID: 20000439 Result: Up-regulated in Transcription
  misc_feature: MA Experiment 20000439 PARAMETER Experiment Name: At_Roots__P Parameter: Age (day) Value: 14 vs. 21
  misc_feature: MA Experiment 20000439 PARAMETER Experiment Name: At_Roots__P Parameter: Organism Value: A. thaliana
  misc_feature: MA Experiment 20000439 PARAMETER Experiment Name: At_Roots__P Parameter: Tissue Value: Roots vs. Whole Plant
  misc_feature: MA Experiment ID: 20000495 Result: Up-regulated in Transcription
  misc_feature: MA Experiment 20000495 PARAMETER Experiment Name: At_Guard_Cells_P Parameter: Harvest Date Value: 8/2/2002
  misc_feature: MA Experiment 20000495 PARAMETER Experiment Name: At_Guard_Cells_P Parameter: Organism Value: A. thaliana
  misc_feature: MA Experiment 20000495 PARAMETER Experiment Name: At_Guard_Cells_P Parameter: Tissue Value: Guard Cells vs. Leaves
  misc_feature: MA Experiment ID: 20000794 Result: Up-regulated in Transcription
  misc_feature: MA Experiment 20000794 PARAMETER Experiment Name: At_Petals_P Parameter: Age (day) Value: 23-25 days
  misc_feature: MA Experiment 20000794 PARAMETER Experiment Name: At_Petals_P Parameter: Plant Line Value: WS
  misc_feature: MA Experiment 20000794 PARAMETER Experiment Name: At_Petals_P Parameter: Tissue Value: Petals vs. Whole plant
  misc_feature: MA Experiment ID: 20001451 Result: Up-regulated in Transcription
  misc_feature: MA Experiment 20001451 PARAMETER Experiment Name: At_Far-red-induction_P Parameter: Age (day) Value: 7
  misc_feature: MA Experiment 20001451 PARAMETER Experiment Name: At_Far-red-induction_P Parameter: Light Value: Far-red vs. White
  misc_feature: MA Experiment 20001451 PARAMETER Experiment Name: At_Far-red-induction_P Parameter: Organism Value: A. thaliana
  misc_feature: MA Experiment 20001451 PARAMETER Experiment Name: At_Far-red-induction_P Parameter: Plant Line Value: Columbia
  misc_feature: MA Experiment 20001451 PARAMETER Experiment Name: At_Far-red-induction_P Parameter: Timepoint (hr) Value: 24
  misc_feature: MA Experiment 20001451 PARAMETER Experiment Name: At_Far-red-induction_P Parameter: Tissue Value: Whole Plant
  misc_feature: MA Experiment ID: 20001558 Result: Up-regulated in Transcription
  misc_feature: MA Experiment 20001558 PARAMETER Experiment Name: At_Drought_Soil_Dry_P Parameter: Age (day) Value: 27
  misc_feature: MA Experiment 20001558 PARAMETER Experiment Name: At_Drought_Soil_Dry_P Parameter: Organism Value: A. thaliana
  misc_feature: MA Experiment 20001558 PARAMETER Experiment Name: At_Drought_Soil_Dry_P Parameter: Plant Line Value: WS
  misc_feature: MA Experiment 20001558 PARAMETER Experiment Name: At_Drought_Soil_Dry_P Parameter: Post Timepoint (hr) Value: 6
  misc_feature: MA Experiment 20001558 PARAMETER Experiment Name: At_Drought_Soil_Dry_P Parameter: Post-Treatment Value: Re-Water vs. No Drought
  misc_feature: MA Experiment 20001558 PARAMETER Experiment Name: At_Drought_Soil_Dry_P Parameter: Timepoint (day) Value: 13
  misc_feature: MA Experiment 20001558 PARAMETER Experiment Name: At_Drought_Soil_Dry_P Parameter: Treatment Value: Drought vs. No Drought
  misc_feature: MA Experiment ID: 20001560 Result: Up-regulated in Transcription
  misc_feature: MA Experiment 20001560 PARAMETER Experiment Name: At_Drought_Soil_Dry_P Parameter: Age (day) Value: 28
  misc_feature: MA Experiment 20001560 PARAMETER Experiment Name: At_Drought_Soil_Dry_P Parameter: Organism Value: A. thaliana
  misc_feature: MA Experiment 20001560 PARAMETER Experiment Name: At_Drought_Soil_Dry_P Parameter: Plant Line Value: WS
  misc_feature: MA Experiment 20001560 PARAMETER Experiment Name: At_Drought_Soil_Dry_P Parameter: Post Timepoint (hr) Value: None
  misc_feature: MA Experiment 20001560 PARAMETER Experiment Name: At_Drought_Soil_Dry_P Parameter: Post-Treatment Value: None
  misc_feature: MA Experiment 20001560 PARAMETER Experiment Name: At_Drought_Soil_Dry_P Parameter: Timepoint (day) Value: 14
  misc_feature: MA Experiment 20001560 PARAMETER Experiment Name: At_Drought_Soil_Dry_P Parameter: Treatment Value: Drought vs. No Drought
  misc_feature: MA Experiment ID: 20001757 Result: Down-regulated in Transcription
  misc_feature: MA Experiment 20001757 PARAMETER Experiment Name: At_50mM_NH4NO3_L-to-H_P Parameter: Timepoint (hr) Value: 6
  misc_feature: MA Experiment 20001757 PARAMETER Experiment Name: At_50mM_NH4NO3_L-to-H_P Parameter: Tissue Value: Leaf
  misc_feature: MA Experiment 20001757 PARAMETER Experiment Name: At_50mM_NH4NO3_L-to-H_P Parameter: Treatment Value: 50mM NH4NO3 vs 100mM Mannitol
  misc_feature: MA Experiment ID: 20001905 Result: Up-regulated in Transcription
  misc_feature: MA Experiment 20001905 PARAMETER Experiment Name: At_Drought_Reproduction_P Parameter: Age (day) Value: 40
  misc_feature: MA Experiment 20001905 PARAMETER Experiment Name: At_Drought_Reproduction_P Parameter: Organism Value: A. thaliana
  misc_feature: MA Experiment 20001905 PARAMETER Experiment Name: At_Drought_Reproduction_P Parameter: Plant Line Value: WS
  misc_feature: MA Experiment 20001905 PARAMETER Experiment Name: At_Drought_Reproduction_P Parameter: Timepoint (day) Value: 10
  misc_feature: MA Experiment 20001905 PARAMETER Experiment Name: At_Drought_Reproduction_P Parameter: Tissue Value: Rosettes
  misc_feature: MA Experiment 20001905 PARAMETER Experiment Name: At_Drought_Reproduction_P Parameter: Treatment Value: Drought vs. No Drought
  misc_feature: MA Experiment ID: 20001906 Result: Up-regulated in Transcription
  misc_feature: MA Experiment 20001906 PARAMETER Experiment Name: At_Drought_Reproduction_P Parameter: Age (day) Value: 35
  misc_feature: MA Experiment 20001906 PARAMETER Experiment Name: At_Drought_Reproduction_P Parameter: Organism Value: A. thaliana
  misc_feature: MA Experiment 20001906 PARAMETER Experiment Name: At_Drought_Reproduction_P Parameter: Plant Line Value: WS
  misc_feature: MA Experiment 20001906 PARAMETER Experiment Name: At_Drought_Reproduction_P Parameter: Timepoint (day) Value: 5
  misc_feature: MA Experiment 20001906 PARAMETER Experiment Name: At_Drought_Reproduction_P Parameter: Tissue Value: Siliques
  misc_feature: MA Experiment 20001906 PARAMETER Experiment Name: At_Drought_Reproduction_P Parameter: Treatment Value: Drought vs. No Drought
  misc_feature: MA Experiment ID: 20001911 Result: Up-regulated in Transcription
  misc_feature: MA Experiment 20001911 PARAMETER Experiment Name: At_Drought_Reproduction_P Parameter: Age (day) Value: 40
  misc_feature: MA Experiment 20001911 PARAMETER Experiment Name: At_Drought_Reproduction_P Parameter: Organism Value: A. thaliana
  misc_feature: MA Experiment 20001911 PARAMETER Experiment Name: At_Drought_Reproduction_P Parameter: Plant Line Value: WS
  misc_feature: MA Experiment 20001911 PARAMETER Experiment Name: At_Drought_Reproduction_P Parameter: Timepoint (day) Value: 10
  misc_feature: MA Experiment 20001911 PARAMETER Experiment Name: At_Drought_Reproduction_P Parameter: Tissue Value: Flowers
  misc_feature: MA Experiment 20001911 PARAMETER Experiment Name: At_Drought_Reproduction_P Parameter: Treatment Value: Drought vs. No Drought
acttggattcctacttcttcttcttcttcctctgattctctcccattccaatcaatctctagggttcttcttcagcaatacttcagaagctggttttggccatggaacccaatgggtacaggaaagaaagaagaaaggaacaacatttggggagaatgaatggtggtggtggtgatgttgagactgatcttgatccatggactgcatgggcttacaagcctcgcactatctctcttctccttattggcgcttgttttctcatttgggctagtggagctcttgatcctgacagcactacatctgatgatcttgtcacttctgtcaaaaggggagtgtgggctatgatcgctgtctttcttgcttactctttgctccaggccccttcaacggttctaatcaggccccatcctgcaatctggcgcttagttcatggaatggccgtcatttacttagttgcacttacttttttgctctttcagagacgtgatgatgcacggcagttcatgaagtttctccaccctgaccttggaatagaacttcctgagaaatcatacggtgctgattgccgtatatatgtgcctgatcacccaacaaacaggacacagtatttgatgagtttttcttggctcacatctttggttggtgggggaaagcaattctgatccggaaccagccgcttctttgggtgctttcaattggttttgagttattggaggttacttttcggcatatgttaccaaatttcaacgagtgctggtgggacagtattgttcttgatatcttgatatgcaactggtttggtatctgggcaggaatgtatacagttcgatattttgatggaaaaacatatgagtgggttggcattagccgccagcctaacattattggcaaagtgaaaaggacactggggcagttcacaccagctcactgggacaaagacgagtggcatccgctgcagggaccttggcgttttattcaagtactcactctttgcatcatattcttgacagtggagctgaacacattctttctcaagtttagcctgtggatcccccctcgaaacccagtgattctctataggctgatcttgtggtggctcatagcgataccaacaacacgggagtacaattcatatcttcaagacagaaaacctgtgaaaaaggtgggagcattctgttggctgtcactggggatatgcatagtagaacttctcatctgcatcaagtttggaagtggattgtacccaacagaaatgccattgtgggtagtgacactatggggaagtgtgggacttggacttgtggccttcttgctgtcttggacatggaagatccagaagatcctcgcgcaaaagagacgttaagcgcatcattattgttgcagcagagacgagagagaaatagaggtgagacagtgaaatgccattgtggtttttttttgtaaatagggagaagaaggaacgatgtaaatgcaattttctttagggatagtgtgtgatattcaacatttacgaagattccatcaattctttcatgcatcaaaagttcttt

SEQ ID NO: 77361 - protein, 210 aa, Arabidopsis thaliana; identical to SEQ ID NO: 42223
  peptide (1)..(210): Ceres Seq. ID no. 12576132
  misc_feature (1)..(169): Pfam Name: Phosphatidyl serine synthase Pfam Description: Phosphatidyl serine synthase
  misc_feature (1)..(169): Homolog of NCBI NO: 25518032 NR Description: F9L1.4 protein - Arabidopsis thaliana
  misc_feature (1)..(210): Homolog of NCBI NO: 22329573 NR Description: putative phosphatidylserine synthase; protein id:
  misc_feature (1)..(113): Homolog of NCBI NO: 34911216 NR Description: putative phosphatidylserine synthase [Oryza
  misc_feature (1)..(200): Homolog of NCBI NO: 13540555 NR Description: phosphatidylserine synthase 2 [Homo sapiens] Similar to phosphatidylserine synthase 2 [Homo sapiens]
  misc_feature (1)..(200): Homolog of NCBI NO: 2190007 NR Description: phosphatidylserine synthase II [Cricetulus
  misc_feature (1)..(200): Homolog of NCBI NO: 14290490 NR Description: Similar to phosphatidylserine synthase 2 [Mus
  misc_feature (1)..(194): Homolog of NCBI NO: 27881972 NR Description: Unknown (protein for MGC:55906) [Danio rerio]
  misc_feature (1)..(83): Homolog of NCBI NO: 34895332 NR Description: P0494A10.20 [Oryza sativa (japonica
  misc_feature (100)..(138): Homolog of NCBI NO: 34895332 NR Description: P0494A10.20 [Oryza sativa (japonica
  misc_feature (1)..(204): Homolog of NCBI NO: 21355883 NR Description: CG4825-PA [Drosophila melanogaster]

SEQ ID NO: 77362 - protein, 186 aa, Arabidopsis thaliana
  peptide (1)..(186): Ceres Seq. ID no. 12576133
  misc_feature (101)..(170): Pfam Name: Phosphatidyl serine synthase Pfam Description: Phosphatidyl serine synthase
  misc_feature (1)..(170): Homolog of NCBI NO: 25518032 NR Description: F9L1.4 protein - Arabidopsis thaliana
  misc_feature (77)..(185): Homolog of NCBI NO: 34911216 NR Description: putative phosphatidylserine synthase [Oryza
  misc_feature (1)..(56): Homolog of NCBI NO: 34911216 NR Description: putative phosphatidylserine synthase [Oryza
  misc_feature (31)..(165): Homolog of NCBI NO: 13540555 NR Description: phosphatidylserine synthase 2 [Homo sapiens] Similar to phosphatidylserine synthase 2 [Homo sapiens]
  misc_feature (10)..(165): Homolog of NCBI NO: 2190007 NR Description: phosphatidylserine synthase II [Cricetulus
  misc_feature (77)..(165): Homolog of NCBI NO: 14290490 NR Description: Similar to phosphatidylserine synthase 2 [Mus
  misc_feature (38)..(157): Homolog of NCBI NO: 27881972 NR Description: Unknown (protein for MGC:55906) [Danio rerio]
  misc_feature (1)..(54): Homolog of NCBI NO: 34895332 NR Description: P0494A10.20 [Oryza sativa (japonica
  misc_feature (38)..(175): Homolog of NCBI NO: 21355883 NR Description: CG4825-PA [Drosophila melanogaster]
  misc_feature (38)..(157): Homolog of NCBI NO: 26352974 NR Description: unnamed protein product [Mus musculus]
MEPNGYRKERRKEQHLGRMNGGGGDVETDLDPWTAWAYKPRTISLLLIGACFLIWASGALDPDSTTSDDLVTSVKRGVWAMIAVFLAYSLLQAPSTVLIRPHPAIWRLVHGMAVIYLVALTFLLFQRRDDARQFMKFLHPDLGIELPEKSYGADCRIYVPDHPTNRTQYLMSFSWLTSLVGGGKQF

SEQ ID NO: 77363 - protein, 182 aa, Arabidopsis thaliana; identical to SEQ ID NO: 42225
  peptide (1)..(182): Ceres Seq. ID no. 12576134
  misc_feature (1)..(141): Pfam Name: Phosphatidyl serine synthase Pfam Description: Phosphatidyl serine synthase
  misc_feature (1)..(141): Homolog of NCBI NO: 25518032 NR Description: F9L1.4 protein - Arabidopsis thaliana
  misc_feature (1)..(182): Homolog of NCBI NO: 22329573 NR Description: putative phosphatidylserine synthase; protein id:
  misc_feature (1)..(85): Homolog of NCBI NO: 34911216 NR Description: putative phosphatidylserine synthase [Oryza
  misc_feature (1)..(172): Homolog of NCBI NO: 13540555 NR Description: phosphatidylserine synthase 2 [Homo sapiens] Similar to phosphatidylserine synthase 2 [Homo sapiens]
  misc_feature (1)..(172): Homolog of NCBI NO: 2190007 NR Description: phosphatidylserine synthase II [Cricetulus
  misc_feature (1)..(172): Homolog of NCBI NO: 14290490 NR Description: Similar to phosphatidylserine synthase 2 [Mus
  misc_feature (1)..(166): Homolog of NCBI NO: 27881972 NR Description: Unknown (protein for MGC:55906) [Danio rerio]
  misc_feature (1)..(55): Homolog of NCBI NO: 34895332 NR Description: P0494A10.20 [Oryza sativa (japonica
  misc_feature (72)..(110): Homolog of NCBI NO: 34895332 NR Description: P0494A10.20 [Oryza sativa (japonica
  misc_feature (1)..(176): Homolog of NCBI NO: 21355883 NR Description: CG4825-PA [Drosophila melanogaster]

SEQ ID NO: 77364 - DNA, 1229 bp, Arabidopsis thaliana
  misc_feature (1)..(1229): Ceres Seq. ID no. 12576135
  misc_feature: MA Experiment ID: 108434 Result: Down-regulated in Transcription
  misc_feature: MA Experiment 108434 PARAMETER Experiment Name: At_Root_Tips_cDNA_P Parameter: Tissue Value: Root Tips
  misc_feature: MA Experiment ID: 108461 Result: Down-regulated in Transcription
  misc_feature: MA Experiment 108461 PARAMETER Experiment Name: At_Germinating_Seeds_cDNA_P Parameter: Age (day) Value: 1 vs. 0
  misc_feature: MA Experiment 108461 PARAMETER Experiment Name: At_Germinating_Seeds_cDNA_P Parameter: Tissue Value: Germinating Seeds
  misc_feature: MA Experiment ID: 108462 Result: Down-regulated in Transcription
  misc_feature: MA Experiment 108462 PARAMETER Experiment Name: At_Germinating_Seeds_cDNA_P Parameter: Age (day) Value: 2 vs. 0
  misc_feature: MA Experiment 108462 PARAMETER Experiment Name: At_Germinating_Seeds_cDNA_P Parameter: Tissue Value: Germinating Seeds
  misc_feature: MA Experiment ID: 108463 Result: Down-regulated in Transcription
  misc_feature: MA Experiment 108463 PARAMETER Experiment Name: At_Germinating_Seeds_cDNA_P Parameter: Age (day) Value: 3 vs. 0
  misc_feature: MA Experiment 108463 PARAMETER Experiment Name: At_Germinating_Seeds_cDNA_P Parameter: Tissue Value: Germinating Seeds
  misc_feature: MA Experiment ID: 108464 Result: Down-regulated in Transcription
  misc_feature: MA Experiment 108464 PARAMETER Experiment Name: At_Germinating_Seeds_cDNA_P Parameter: Age (day) Value: 4 vs. 0
  misc_feature: MA Experiment 108464 PARAMETER Experiment Name: At_Germinating_Seeds_cDNA_P Parameter: Tissue Value: Germinating Seeds
  misc_feature: MA Experiment ID: 108579 Result: Up-regulated in Transcription
  misc_feature: MA Experiment 108579 PARAMETER Experiment Name: At_4deg_Cold_cDNA_P Parameter: Temperature (deg C) Value: 4 vs. 22
  misc_feature: MA Experiment 108579 PARAMETER Experiment Name: At_4deg_Cold_cDNA_P Parameter: Timepoint (hr) Value: 6
  misc_feature: MA Experiment 108579 PARAMETER Experiment Name: At_4deg_Cold_cDNA_P Parameter: Tissue Value: Aerial
  misc_feature: MA Experiment ID: 108585 Result: Up-regulated in Transcription
  misc_feature: MA Experiment 108585 PARAMETER Experiment Name: At_5mM_NaNP_cDNA_P Parameter: Timepoint (hr) Value: 6
  misc_feature: MA Experiment 108585 PARAMETER Experiment Name: At_5mM_NaNP_cDNA_P Parameter: Tissue Value: Aerial
  misc_feature: MA Experiment 108585 PARAMETER Experiment Name: At_5mM_NaNP_cDNA_P Parameter: Treatment Value: null
  misc_feature: MA Experiment ID: 20000111 Result: Up-regulated in Transcription
  misc_feature: MA Experiment 20000111 PARAMETER Experiment Name: At_42deg_Heat_cDNA_P Parameter: Temperature (deg C) Value: 42 vs. 22
  misc_feature: MA Experiment 20000111 PARAMETER Experiment Name: At_42deg_Heat_cDNA_P Parameter: Timepoint (hr) Value: 6
  misc_feature: MA Experiment 20000111 PARAMETER Experiment Name: At_42deg_Heat_cDNA_P Parameter: Tissue Value: Aerial
  misc_feature: MA Experiment ID: 20000112 Result: Up-regulated in Transcription
  misc_feature: MA Experiment 20000112 PARAMETER Experiment Name: At_42deg_Heat_cDNA_P Parameter: Temperature (deg C) Value: 42 vs. 22
  misc_feature: MA Experiment 20000112 PARAMETER Experiment Name: At_42deg_Heat_cDNA_P Parameter: Timepoint (hr) Value: 2
  misc_feature: MA Experiment 20000112 PARAMETER Experiment Name: At_42deg_Heat_cDNA_P Parameter: Tissue Value: Aerial
  misc_feature: MA Experiment ID: 20000113 Result: Up-regulated in Transcription
  misc_feature: MA Experiment 20000113 PARAMETER Experiment Name: At_42deg_Heat_cDNA_P Parameter: Temperature (deg C) Value: 42 vs. 22
  misc_feature: MA Experiment 20000113 PARAMETER Experiment Name: At_42deg_Heat_cDNA_P Parameter: Timepoint (hr) Value: 8
  misc_feature: MA Experiment 20000113 PARAMETER Experiment Name: At_42deg_Heat_cDNA_P Parameter: Tissue Value: Aerial
  misc_feature: MA Experiment ID: 20000173 Result: Up-regulated in Transcription
  misc_feature: MA Experiment 20000173 PARAMETER Experiment Name: At_42deg_Heat_P Parameter: Age (day) Value: 14
  misc_feature: MA Experiment 20000173 PARAMETER Experiment Name: At_42deg_Heat_P Parameter: Organism Value: A. thaliana
  misc_feature: MA Experiment 20000173 PARAMETER Experiment Name: At_42deg_Heat_P Parameter: Plant Line Value: WS
  misc_feature: MA Experiment 20000173 PARAMETER Experiment Name: At_42deg_Heat_P Parameter: Temperature (deg C) Value: 42 vs. 22
  misc_feature: MA Experiment 20000173 PARAMETER Experiment Name: At_42deg_Heat_P Parameter: Timepoint (hr) Value: 6
  misc_feature: MA Experiment 20000173 PARAMETER Experiment Name: At_42deg_Heat_P Parameter: Tissue Value: Aerial
  misc_feature: MA Experiment ID: 20000179 Result: Down-regulated in Transcription
  misc_feature: MA Experiment 20000179 PARAMETER Experiment Name: At_Germinating_Seeds_P Parameter: Age (hr) Value: 6 vs. 0
  misc_feature: MA Experiment 20000179 PARAMETER Experiment Name: At_Germinating_Seeds_P Parameter: Tissue Value: Germinating Seeds
  misc_feature: MA Experiment ID: 20000182 Result: Up-regulated in Transcription
  misc_feature: MA Experiment 20000182 PARAMETER Experiment Name: At_2mM_SA_P Parameter: Age (day) Value: 14
  misc_feature: MA Experiment 20000182 PARAMETER Experiment Name: At_2mM_SA_P Parameter: Organism Value: A. thaliana
  misc_feature: MA Experiment 20000182 PARAMETER Experiment Name: At_2mM_SA_P Parameter: Plant Line Value: WS
  misc_feature: MA Experiment 20000182 PARAMETER Experiment Name: At_2mM_SA_P Parameter: Timepoint (hr) Value: 6
  misc_feature: MA Experiment 20000182 PARAMETER Experiment Name: At_2mM_SA_P Parameter: Tissue Value: Aerial
  misc_feature: MA Experiment 20000182 PARAMETER Experiment Name: At_2mM_SA_P Parameter: Treatment Value: 2mM SA vs. No Treatment
  misc_feature: MA Experiment ID: 20000213 Result: Up-regulated in Transcription
  misc_feature: MA Experiment 20000213 PARAMETER Experiment Name: At_4deg_Cold_P Parameter: Timepoint (hr) Value: 2
  misc_feature: MA Experiment ID: 20000224 Result: Down-regulated in Transcription
  misc_feature: MA Experiment ID: 20000437 Result: Up-regulated in Transcription
  misc_feature: MA Experiment 20000437 PARAMETER Experiment Name: At_Drought_P Parameter: Age (day) Value: 8
  misc_feature: MA Experiment 20000437 PARAMETER Experiment Name: At_Drought_P Parameter: Organism Value: A. thaliana
  misc_feature: MA Experiment 20000437 PARAMETER Experiment Name: At_Drought_P Parameter: Plant Line Value: WS
  misc_feature: MA Experiment 20000437 PARAMETER Experiment Name: At_Drought_P Parameter: Timepoint (hr) Value: 24
  misc_feature: MA Experiment 20000437 PARAMETER Experiment Name: At_Drought_P Parameter: Tissue Value: Whole Plant
  misc_feature: MA Experiment 20000437 PARAMETER Experiment Name: At_Drought_P Parameter: Treatment Value: Drought vs. No Drought
  misc_feature: MA Experiment ID: 20000438 Result: Down-regulated in Transcription
  misc_feature: MA Experiment 20000438 PARAMETER Experiment Name: At_Shoots__P Parameter: Age (day) Value: 14
  misc_feature: MA Experiment 20000438 PARAMETER Experiment Name: At_Shoots__P Parameter: Tissue Value: Shoots vs. Whole Plant
  misc_feature: MA Experiment ID: 20000439 Result: Down-regulated in Transcription
  misc_feature: MA Experiment 20000439 PARAMETER Experiment Name: At_Roots__P Parameter: Age (day) Value: 14 vs. 21
  misc_feature: MA Experiment 20000439 PARAMETER Experiment Name: At_Roots__P Parameter: Organism Value: A. thaliana
  misc_feature: MA Experiment 20000439 PARAMETER Experiment Name: At_Roots__P Parameter: Tissue Value: Roots vs. Whole Plant
  misc_feature: MA Experiment ID: 20001557 Result: Up-regulated in Transcription
  misc_feature: MA Experiment 20001557 PARAMETER Experiment Name: At_Drought_Soil_Dry_P Parameter: Age (day) Value: 27
  misc_feature: MA Experiment 20001557 PARAMETER Experiment Name: At_Drought_Soil_Dry_P Parameter: Organism Value: A. thaliana
  misc_feature: MA Experiment 20001557 PARAMETER Experiment Name: At_Drought_Soil_Dry_P Parameter: Plant Line Value: WS
  misc_feature: MA Experiment 20001557 PARAMETER Experiment Name: At_Drought_Soil_Dry_P Parameter: Post Timepoint (hr) Value: 3
  misc_feature: MA Experiment 20001557 PARAMETER Experiment Name: At_Drought_Soil_Dry_P Parameter: Post-Treatment Value: Re-Water vs. No Drought
  misc_feature: MA Experiment 20001557 PARAMETER Experiment Name: At_Drought_Soil_Dry_P Parameter: Timepoint (day) Value: 13
  misc_feature: MA Experiment 20001557 PARAMETER Experiment Name: At_Drought_Soil_Dry_P Parameter: Treatment Value: Drought vs. No Drought
  misc_feature: MA Experiment ID: 20001905 Result: Up-regulated in Transcription
  misc_feature: MA Experiment 20001905 PARAMETER Experiment Name: At_Drought_Reproduction_P Parameter: Age (day) Value: 40
  misc_feature: MA Experiment 20001905 PARAMETER Experiment Name: At_Drought_Reproduction_P Parameter: Organism Value: A. thaliana
  misc_feature: MA Experiment 20001905 PARAMETER Experiment Name: At_Drought_Reproduction_P Parameter: Plant Line Value: WS
  misc_feature: MA Experiment 20001905 PARAMETER Experiment Name: At_Drought_Reproduction_P Parameter: Timepoint (day) Value: 10
  misc_feature: MA Experiment 20001905 PARAMETER Experiment Name: At_Drought_Reproduction_P Parameter: Tissue Value: Rosettes
  misc_feature: MA Experiment 20001905 PARAMETER Experiment Name: At_Drought_Reproduction_P Parameter: Treatment Value: Drought vs. No Drought
agaagatttgatttttcttattcctcttcaaaggcaaacaatttacacagctatatatatatttttagggtttttgagtatctcgcgaggttttacatagatttctccattatgccttgtgttgggttgcgcgaatcgattatttgtttctcttgattcatttgcatgtcataagagcttcgggagaaaaaaattgcttctttaggattcgatgatgaatcagaagactgttttggctgtgacggatgatgtggtgttacctgttagctctgttttagctataatgaaagagcttggaaaggaagtgattgagagttttgatcctctgattattactcaagcatccacaataaatcagtttcctttggatgcttcctctgtggaggcggtattagccatttccaaaacatctgatttcccaagtgataaaatatgtggtgagttctcaagaatcttgaagcctggcggcacggtttctgtgtgcaaagttttggagggtgaaacgggagaaattcaacagaccattcaaaggagagtgacattggctggttttcttgagccacagtgtcttgatttgaaatcaattaaattgtctacgttcagtttatcctttgggattaaggcaaagaaaccttcttggaagattggttcatcatttgctctcaaaaagcctgtaacaaatctctttaagattgatctagatgacgacgtggatcttattgatgaagattctcttttaacagaggaggacttgatgaagccacagcttcctgttgccagcggttgtgagaccactaaaaaagcttgcaagaactgcgtctgtggtagagctgaaattgaggagaaagctgtgaagctgggcctcacagaggatcaaatcgagaatccacaatcatcatgcggcagctgtgggctcggtgatgccttccgctgcggtacatgcccttacaagggtctgccacccttcaaattaggcgagaaggtaaccctatctcaaaacttccttgaagctgacatataagcatgtgaaaggcatcttcatacatgggtgtttctcgccgaggccaaaaccttttgctaatcgcagagtagtttcatcatttactttgtgccctttcgtataatttgtttgttggtacttcttttattttgtggctctaaaagcttgtagaatattgtttgggttgcccacaaagcacacaccttagtatcaatgaagaacggttttg

SEQ ID NO: 77365 - protein, 269 aa, Arabidopsis thaliana; identical to SEQ ID NO: 27278
  peptide (1)..(269): Ceres Seq. ID no. 12576136
  misc_feature (111)..(262): Pfam Name: Protein of unknown function (DUF689) Pfam Description: Protein of unknown function (DUF689)
  misc_feature (1)..(269): Homolog of NCBI NO: 18418605 NR Description: putative protein; protein id: At5g18400.1, by cDNA: 6084. [Arabidopsis thaliana] >gi|21703114|gb|AAM74499.1| [Arabidopsis thaliana] >gi|24030358|gb|AAN41343.1| unknown
  misc_feature (1)..(269): Homolog of NCBI NO: 30686798 NR Description: expressed protein [Arabidopsis thaliana]
  misc_feature (1)..(269): Homolog of NCBI NO: 19424097 NR Description: unknown protein [Arabidopsis thaliana]
  misc_feature (8)..(269): Homolog of NCBI NO: 38344920 NR Description: OSJNBa0018M05.11 [Oryza sativa (japonica
  misc_feature (2)..(269): Homolog of NCBI NO: 2293332 NR Description: unknown [Dictyostelium discoideum]
  misc_feature (108)..(269): Homolog of NCBI NO: 17933742 NR Description: lethal (2) 35Bg CG4180-PA
  misc_feature (10)..(269): Homolog of NCBI NO: 29841358 NR Description: hypothetical protein in Schizosaccharomyces similar to NC_003423 conserved hypothetical protein in
  misc_feature (128)..(265): Homolog of NCBI NO: 3252825 NR Description: Unknown gene product [Homo sapiens] CUA001 [Homo sapiens] >gi|12803485|gb|AAH02568.1|AAH02568 protein [Homo sapiens] >gi|18848226|gb|AAH24196.1| hypothetical
  misc_feature (166)..(261): Homolog of NCBI NO: 17555168 NR Description: Lethal 35Bg like (25.6 kD) [Caenorhabditis >gi|1176624|sp|P41847|YO97_CAEEL HYPOTHETICAL 25.6 KD PROTEIN IN CHROMOSOME III >gi|7508020|pir||T16907 hypothetical
  misc_feature (164)..(265): Homolog of NCBI NO: 7959722 NR Description: PRO0915 [Homo sapiens]

SEQ ID NO: 77366 - protein, 268 aa, Arabidopsis thaliana; identical to SEQ ID NO: 36494
  peptide (1)..(268): Ceres Seq. ID no. 12576137
  misc_feature (110)..(261): Pfam Name: Protein of unknown function (DUF689) Pfam Description: Protein of unknown function (DUF689)
  misc_feature (1)..(268): Homolog of NCBI NO: 18418605 NR Description: putative protein; protein id: At5g18400.1, by cDNA: 6084. [Arabidopsis thaliana] >gi|21703114|gb|AAM74499.1| [Arabidopsis thaliana] >gi|24030358|gb|AAN41343.1| unknown
  misc_feature (1)..(268): Homolog of NCBI NO: 30686798 NR Description: expressed protein [Arabidopsis thaliana]
  misc_feature (1)..(268): Homolog of NCBI NO: 19424097 NR Description: unknown protein [Arabidopsis thaliana]
  misc_feature (7)..(268): Homolog of NCBI NO: 38344920 NR Description: OSJNBa0018M05.11 [Oryza sativa (japonica
  misc_feature (1)..(268): Homolog of NCBI NO: 2293332 NR Description: unknown [Dictyostelium discoideum]
  misc_feature (107)..(268): Homolog of NCBI NO: 17933742 NR Description: lethal (2) 35Bg CG4180-PA
  misc_feature (9)..(268): Homolog of NCBI NO: 29841358 NR Description: hypothetical protein in Schizosaccharomyces similar to NC_003423 conserved hypothetical protein in
  misc_feature (127)..(264): Homolog of NCBI NO: 3252825 NR Description: Unknown gene product [Homo sapiens] CUA001 [Homo sapiens] >gi|12803485|gb|AAH02568.1|AAH02568 protein [Homo sapiens] >gi|18848226|gb|AAH24196.1| hypothetical
  misc_feature (165)..(260): Homolog of NCBI NO: 17555168 NR Description: Lethal 35Bg like (25.6 kD) [Caenorhabditis >gi|1176624|sp|P41847|YO97_CAEEL HYPOTHETICAL 25.6 KD PROTEIN IN CHROMOSOME III >gi|7508020|pir||T16907 hypothetical
  misc_feature (163)..(264): Homolog of NCBI NO: 7959722 NR Description: PRO0915 [Homo sapiens]

SEQ ID NO: 77367 - protein, 245 aa, Arabidopsis thaliana
  peptide (1)..(245): Ceres Seq. ID no. 12576138
  misc_feature (87)..(238): Pfam Name: Protein of unknown function (DUF689) Pfam Description: Protein of unknown function (DUF689)
  misc_feature (1)..(245): Homolog of NCBI NO: 18418605 NR Description: putative protein; protein id: At5g18400.1, by cDNA: 6084. [Arabidopsis thaliana] >gi|21703114|gb|AAM74499.1| [Arabidopsis thaliana] >gi|24030358|gb|AAN41343.1| unknown
  misc_feature (1)..(245): Homolog of NCBI NO: 30686798 NR Description: expressed protein [Arabidopsis thaliana]
  misc_feature (1)..(245): Homolog of NCBI NO: 19424097 NR Description: unknown protein [Arabidopsis thaliana]
  misc_feature (1)..(245): Homolog of NCBI NO: 38344920 NR Description: OSJNBa0018M05.11 [Oryza sativa (japonica
  misc_feature (1)..(245): Homolog of NCBI NO: 2293332 NR Description: unknown [Dictyostelium discoideum]
  misc_feature (84)..(245): Homolog of NCBI NO: 17933742 NR Description: lethal (2) 35Bg CG4180-PA
  misc_feature (1)..(245): Homolog of NCBI NO: 29841358 NR Description: hypothetical protein in Schizosaccharomyces similar to NC_003423 conserved hypothetical protein in
  misc_feature (104)..(241): Homolog of NCBI NO: 3252825 NR Description: Unknown gene product [Homo sapiens] CUA001 [Homo sapiens] >gi|12803485|gb|AAH02568.1|AAH02568 protein [Homo sapiens] >gi|18848226|gb|AAH24196.1| hypothetical
  misc_feature (142)..(237): Homolog of NCBI NO: 17555168 NR Description: Lethal 35Bg like (25.6 kD) [Caenorhabditis >gi|1176624|sp|P41847|YO97_CAEEL HYPOTHETICAL 25.6 KD PROTEIN IN CHROMOSOME III >gi|7508020|pir||T16907 hypothetical
  misc_feature (140)..(241): Homolog of NCBI NO: 7959722 NR Description: PRO0915 [Homo sapiens]
MKELGKEVIESFDPLIITQASTINQFPLDASSVEAVLAISKTSDFPSDKICGEFSRILKPGGTVSVCKVLEGETGEIQQTIQRRVTLAGFLEPQCLDLKSIKLSTFSLSFGIKAKKPSWKIGSSFALKKPVTNLFKIDLDDDVDLIDEDSLLTEEDLMKPQLPVASGCETTKKACKNCVCGRAEIEEKAVKLGLTEDQIENPQSSCGSCGLGDAFRCGTCPYKGLPPFKLGEKVTLSQNFLEADI

SEQ ID NO: 77368 - DNA, 1532 bp, Arabidopsis thaliana
  misc_feature (1)..(1532): Ceres Seq. ID no. 12576189
  misc_feature: MA Experiment ID: 20000173 Result: Down-regulated in Transcription
  misc_feature: MA Experiment 20000173 PARAMETER Experiment Name: At_42deg_Heat_P Parameter: Age (day) Value: 14
  misc_feature: MA Experiment 20000173 PARAMETER Experiment Name: At_42deg_Heat_P Parameter: Organism Value: A. thaliana
  misc_feature: MA Experiment 20000173 PARAMETER Experiment Name: At_42deg_Heat_P Parameter: Plant Line Value: WS
  misc_feature: MA Experiment 20000173 PARAMETER Experiment Name: At_42deg_Heat_P Parameter: Temperature (deg C) Value: 42 vs. 22
  misc_feature: MA Experiment 20000173 PARAMETER Experiment Name: At_42deg_Heat_P Parameter: Timepoint (hr) Value: 6
  misc_feature: MA Experiment 20000173 PARAMETER Experiment Name: At_42deg_Heat_P Parameter: Tissue Value: Aerial
  misc_feature: MA Experiment ID: 20000180 Result: Down-regulated in Transcription
  misc_feature: MA Experiment 20000180 PARAMETER Experiment Name: At_Germinating_Seeds_P Parameter: Age (hr) Value: 24 vs. 0
  misc_feature: MA Experiment 20000180 PARAMETER Experiment Name: At_Germinating_Seeds_P Parameter: Tissue Value: Germinating Seeds
  misc_feature: MA Experiment ID: 20000184 Result: Down-regulated in Transcription
  misc_feature: MA Experiment 20000184 PARAMETER Experiment Name: At_Shoots__P Parameter: Age (day) Value: 7
  misc_feature: MA Experiment 20000184 PARAMETER Experiment Name: At_Shoots__P Parameter: Tissue Value: Shoots vs. Whole Plant
ataatatatgggtttttctttccttcttcatttatgaaacgcaaaaaacattattcccctctgtggtctctctctcacgagcatcgtttcttcatcgatctcatagttaccggcgttgttttgaggccactaccgtcgtctctctccgtaatcgtctccaacatcatcatcttctcaatttcgaagcattttattctctaataggatttggtcccttaaaagatggtttcttgtttgaaacctcaactggtttatcaagaatgtgagtttcagtcttgttcctttctttgtcaaataaagtgaggagaggagagtcaagaaatcgacttcaatctctttgtcaattgctcagtgctctctctatatctgggttcgtgttcgtctggaagagacctggaaaaacaattcaggaagacgattagttgtgttcgtgttcgtccctaatccctaaaggactcaggaatgaatctttctccgttcaagagagatatcgatgagctgatagacgagtttgtggaggatgatttgacaacctttgctgatatgaagagtgtctggctatctagaaagttttctcatatatatgaagctagtcctaacagcaacctagcctttttcatgcagtcactatatgttcataccattggtcacatggttagtattgattctttttcacggagacttggaggtctttactgtctctattgccttcatgagatccaaccctttaaacccaagttcagaatctatatctcacttcaagagcttgggaaatttagggatcttgtagttgaggcaaaagataaaggtgtagagatagctgctgctgtggcaaaaaaaatgcttgatgagaacatgttaatatttggagctgtggatgagacatctgcaaccaagacaattcatcaattaaccgagctacagaacgcacgtgtgcggtttgcctatgagaagttaatctgtgacactagtattaaccaatttattcatttggatatgggtaaggaagttgatctgaattccctagataaaatgtctatagaatatgcagaggccaagaagcgtgcagtcgaaggtgcaggagaaataatggagattgatgacataaagcatatatcagaagagaaagagttgatgggagagagaatggagaaattgaaagaggaatgggattcacaaagactttacttttatgaacaaaccaagcttgatggttttactacgacaccaaaacagttgacaaatgtggaacatgatgaagatgatgggtttgatgagcttgatcgcttactttctcaaagctagtgttgccattgcaatcactgatcgatatcagagtcaggtttgtaggagagagctacacacacactctcacaaaatcaagagagcatgtttgattaggagaatatattggttagtaaattctgtatctaacaaggagattaagaaaattttaattacggtttttcttacgattggaaattatgtagtttgtcatattctcagagtatatgtgatttgataatcttaag

SEQ ID NO: 77369 - protein, 280 aa, Arabidopsis thaliana; identical to SEQ ID NO: 43560
  peptide (1)..(280): Ceres Seq. ID no. 12576190
  misc_feature (1)..(280): Homolog of NCBI NO: 18409805 NR Description: putative protein; protein id: At3g53270.1, by cDNA: 206542., supported by cDNA: gi_19424075, supported by gi_21280870 [Arabidopsis thaliana] >gi|19424076|gb|AAL87317.1|
  misc_feature (100)..(270): Homolog of NCBI NO: 11285706 NR Description: hypothetical protein T4D2_190.1 - Arabidopsis >gi|6630747|emb|CAB64230.1| putative protein [Arabidopsis
  misc_feature (1)..(67): Homolog of NCBI NO: 11285706 NR Description: hypothetical protein T4D2_190.1 - Arabidopsis >gi|6630747|emb|CAB64230.1| putative protein [Arabidopsis
  misc_feature (1)..(277): Homolog of NCBI NO: 37535650 NR Description: unknown protein [Oryza sativa (japonica

SEQ ID NO: 77370 - protein, 253 aa, Arabidopsis thaliana; identical to SEQ ID NO: 43561
  peptide (1)..(253): Ceres Seq. ID no. 12576191
  misc_feature (1)..(253): Homolog of NCBI NO: 18409805 NR Description: putative protein; protein id: At3g53270.1, by cDNA: 206542., supported by cDNA: gi_19424075, supported by gi_21280870 [Arabidopsis thaliana] >gi|19424076|gb|AAL87317.1|
  misc_feature (73)..(243): Homolog of NCBI NO: 11285706 NR Description: hypothetical protein T4D2_190.1 - Arabidopsis >gi|6630747|emb|CAB64230.1| putative protein [Arabidopsis
  misc_feature (1)..(40): Homolog of NCBI NO: 11285706 NR Description: hypothetical protein T4D2_190.1 - Arabidopsis >gi|6630747|emb|CAB64230.1| putative protein [Arabidopsis
  misc_feature (1)..(250): Homolog of NCBI NO: 37535650 NR Description: unknown protein [Oryza sativa (japonica

SEQ ID NO: 77371 - protein, 228 aa, Arabidopsis thaliana; identical to SEQ ID NO: 43562
  peptide (1)..(228): Ceres Seq. ID no. 12576192
  misc_feature (1)..(228): Homolog of NCBI NO: 18409805 NR Description: putative protein; protein id: At3g53270.1, by cDNA: 206542., supported by cDNA: gi_19424075, supported by gi_21280870 [Arabidopsis thaliana] >gi|19424076|gb|AAL87317.1|
  misc_feature (48)..(218): Homolog of NCBI NO: 11285706 NR Description: hypothetical protein T4D2_190.1 - Arabidopsis >gi|6630747|emb|CAB64230.1| putative protein [Arabidopsis
  misc_feature (1)..(15): Homolog of NCBI NO: 11285706 NR Description: hypothetical protein T4D2_190.1 - Arabidopsis >gi|6630747|emb|CAB64230.1| putative protein [Arabidopsis
  misc_feature (1)..(225): Homolog of NCBI NO: 37535650 NR Description: unknown protein [Oryza sativa (japonica

SEQ ID NO: 77372 - DNA, 1337 bp, Arabidopsis thaliana
  misc_feature (1)..(1337): Ceres Seq. ID no. 12576197
  misc_feature: MA Experiment ID: 20000180 Result: Down-regulated in Transcription
  misc_feature: MA Experiment 20000180 PARAMETER Experiment Name: At_Germinating_Seeds_P Parameter: Age (hr) Value: 24 vs. 0
  misc_feature: MA Experiment 20000180 PARAMETER Experiment Name: At_Germinating_Seeds_P Parameter: Tissue Value: Germinating Seeds
  misc_feature: MA Experiment ID: 20000184 Result: Down-regulated in Transcription
  misc_feature: MA Experiment 20000184 PARAMETER Experiment Name: At_Shoots__P Parameter: Age (day) Value: 7
  misc_feature: MA Experiment 20000184 PARAMETER Experiment Name: At_Shoots__P Parameter: Tissue Value: Shoots vs. Whole Plant
  misc_feature: MA Experiment ID: 20001557 Result: Up-regulated in Transcription
  misc_feature: MA Experiment 20001557 PARAMETER Experiment Name: At_Drought_Soil_Dry_P Parameter: Age (day) Value: 27
  misc_feature: MA Experiment 20001557 PARAMETER Experiment Name: At_Drought_Soil_Dry_P Parameter: Organism Value: A. thaliana
  misc_feature: MA Experiment 20001557 PARAMETER Experiment Name: At_Drought_Soil_Dry_P Parameter: Plant Line Value: WS
  misc_feature: MA Experiment 20001557 PARAMETER Experiment Name: At_Drought_Soil_Dry_P Parameter: Post Timepoint (hr) Value: 3
  misc_feature: MA Experiment 20001557 PARAMETER Experiment Name: At_Drought_Soil_Dry_P Parameter: Post-Treatment Value: Re-Water vs. No Drought
  misc_feature: MA Experiment 20001557 PARAMETER Experiment Name: At_Drought_Soil_Dry_P Parameter: Timepoint (day) Value: 13
  misc_feature: MA Experiment 20001557 PARAMETER Experiment Name: At_Drought_Soil_Dry_P Parameter: Treatment Value: Drought vs. No Drought
  misc_feature: MA Experiment ID: 20001558 Result: Up-regulated in Transcription
  misc_feature: MA Experiment 20001558 PARAMETER Experiment Name: At_Drought_Soil_Dry_P Parameter: Age (day) Value: 27
  misc_feature: MA Experiment 20001558 PARAMETER Experiment Name: At_Drought_Soil_Dry_P Parameter: Organism Value: A. thaliana
  misc_feature: MA Experiment 20001558 PARAMETER Experiment Name: At_Drought_Soil_Dry_P Parameter: Plant Line Value: WS
  misc_feature: MA Experiment 20001558 PARAMETER Experiment Name: At_Drought_Soil_Dry_P Parameter: Post Timepoint (hr) Value: 6
  misc_feature: MA Experiment 20001558 PARAMETER Experiment Name: At_Drought_Soil_Dry_P Parameter: Post-Treatment Value: Re-Water vs. No Drought
  misc_feature: MA Experiment 20001558 PARAMETER Experiment Name: At_Drought_Soil_Dry_P Parameter: Timepoint (day) Value: 13
  misc_feature: MA Experiment 20001558 PARAMETER Experiment Name: At_Drought_Soil_Dry_P Parameter: Treatment Value: Drought vs. No Drought
aaaaaaatatcgcttctctcgagaggggaaggaaagttcatttctttttgtccaattctttcaacttctcgttccaatcccctcaattctccgtttcaccgaacgcacttcgaacccttaattgctttttgcgggtcaagtttcgattcgagcgttttagggtttcgtatctgaatcggtcgacaagataaacccttttgtgggggtttcctctagatttcgaaaacagagggatagctttcgtttggatggaaattctctgaaactaaactacatagtgatatggagacacaaattcatcaacttgagcaggaagcatataccgctgttttaagggcttttaaagcgcagtctgatgcgatttcttgggaaaaagaaagcttgataaccgaattgcgtaaagaattgagagtatctgatgatgaacatcgagagcttctcagtagggtcaataaggatgatactatccagaggataagagattggagacagggaggcgcaagccaaattactagacatgcaactattcagccttttgatgttcttcctagtcccactttctcagctgcccgaaagaaacagaaaacatttccatcttataatccatcaattggtgcgactggaaataggtcattcaataatcgtctggtatccagtggcatatcaggaaatgaatctgctgaagctctgatcggaagaaaagtgtggacaaaatggcctgaagataaccacttctatgaagcaattataacccagtacaatgcagatgagggtcggcatgctttggtgtatgatatacacgcagctaatgaaacgtgggaatgggttgatctcaaggagataccaccggaagacataagatgggatggggaggagagtggggtagctttaaacattggacatggaagtgcatccttccgtggcaacagaagaggccaaatccatggtggtagagggagaggaccaagaattcatcaaccaagaagggaacttgtaccgccaccaacacaacagaatggtagtggtgggcggagaacttcctctgatgatattgagttgttcaacacagactcgcttgtgaaggaggtggagagagttttcgattctacgcatcctgatccactcgagctcgacaaggccaagaaaatgctcaaggaacatgaacaggcactcattgctgccattgcaaggcttgctgatacttcggatggcgaaatgggtaataataacaaaagcacgctacgtttagtttgcaacctcagaataatatattatttaccattgaatttttgtgttatgatgataatatcaagcataattacaaacttaatcctagg

SEQ ID NO: 77373 - protein, 351 aa, Arabidopsis thaliana
  peptide (1)..(351): Ceres Seq. ID no. 12576198
  misc_feature (1)..(74): Pfam Name: ENT domain Pfam Description: ENT domain
  misc_feature (1)..(350): Homolog of NCBI NO: 9294111 NR Description: emb|CAB88266.1~gene_id:T23B7.8~similar to unknown
  misc_feature (1)..(312): Homolog of NCBI NO: 15229958 NR Description: unknown protein; protein id: At3g12140.1
  misc_feature (1)..(311): Homolog of NCBI NO: 15240146 NR Description: putative protein; protein id: At5g06780.1, by cDNA: 157058., supported by cDNA: gi_16226578 [Arabidopsis >gi|9759306|dbj|BAB09812.1|
  misc_feature (1)..(311): Homolog of NCBI NO: 21553685 NR Description: unknown [Arabidopsis thaliana]
  misc_feature (109)..(311): Homolog of NCBI NO: 38637206 NR Description: unknown protein [Oryza sativa (japonica
  misc_feature (1)..(109): Homolog of NCBI NO: 38637206 NR Description: unknown protein [Oryza sativa (japonica
  misc_feature (29)..(314): Homolog of NCBI NO: 30684221 NR Description: expressed protein [Arabidopsis thaliana]
  misc_feature (29)..(311): Homolog of NCBI NO: 11358228 NR Description: hypothetical protein T24H18.190 - Arabidopsis >gi|7630058|emb|CAB88266.1| putative protein [Arabidopsis
  misc_feature (91)..(215): Homolog of NCBI NO: 15224878 NR Description: hypothetical protein; protein id: At2g44440.1
  misc_feature (1)..(66): Homolog of NCBI NO: 15224878 NR Description: hypothetical protein; protein id: At2g44440.1
METQIHQLEQEAYTAVLRAFKAQSDAISWEKESLITELRKELRVSDDEHRELLSRVNKDDTIQRIRDWRQGGASQITRHATIQPFDVLPSPTFSAARKKQKTFPSYNPSIGATGNRSFNNRLVSSGISGNESAEALIGRKVWTKWPEDNHFYEAIITQYNADEGRHALVYDIHAANETWEWVDLKEIPPEDIRWDGEESGVALNIGHGSASFRGNRRGQIHGGRGRGPRIHQPRRELVPPPTQQNGSGGRRTSSDDIELFNTDSLVKEVERVFDSTHPDPLELDKAKKMLKEHEQALIAAIARLADTSDGEMGNNNKSTLRLVCNLRIIYYLPLNFCVMMIISSIITNLIL

SEQ ID NO: 77374 - DNA, 1302 bp, Arabidopsis thaliana
  misc_feature (1)..(1302): Ceres Seq. ID no. 12576205
  misc_feature: MA Experiment ID: 20000314 Result: Down-regulated in Transcription
  misc_feature: MA Experiment 20000314 PARAMETER Experiment Name: At_14day_Shoots-Roots_Sub_P Parameter: Age (day) Value: 14
  misc_feature: MA Experiment 20000314 PARAMETER Experiment Name: At_14day_Shoots-Roots_Sub_P Parameter: Organism Value: A. thaliana
  misc_feature: MA Experiment 20000314 PARAMETER Experiment Name: At_14day_Shoots-Roots_Sub_P Parameter: Plant Line Value: WS
  misc_feature: MA Experiment 20000314 PARAMETER Experiment Name: At_14day_Shoots-Roots_Sub_P Parameter: Tissue Value: Roots vs. Whole Plant
  misc_feature: MA Experiment ID: 20000315 Result: Down-regulated in Transcription
  misc_feature: MA Experiment 20000315 PARAMETER Experiment Name: At_14day_Shoots-Roots_Sub_P Parameter: Age (day) Value: 14
  misc_feature: MA Experiment 20000315 PARAMETER Experiment Name: At_14day_Shoots-Roots_Sub_P Parameter: Organism Value: A. thaliana
  misc_feature: MA Experiment 20000315 PARAMETER Experiment Name: At_14day_Shoots-Roots_Sub_P Parameter: Plant Line Value: WS
  misc_feature: MA Experiment 20000315 PARAMETER Experiment Name: At_14day_Shoots-Roots_Sub_P Parameter: Tissue Value: Shoots vs. Whole Plant
atctttcttcacactttctttcactttcccgggaaaacagccgagaaaataaaagaaacgaagaaaagtttgttcctttgtggggatcaaagaagaatgtactcggcgattcggtcttcgcttcctctagatggcagcttgggagactactctgacggaaccaatcttcccatcgacgcttgtctggtcctaaccactgaccccaagcctcgccttcgttggacctctgagctccatgaaagattcgttgacgccgtcactcagctcggcggacccgacaaagcaacgcctaaaactataatgagaacaatgggagtgaagggtctcactctttaccatctcaaatctcatcttcaggttttgatgctactaccttcaatatcaaattatgcttctttggctacttataacaaacaaagttcattgctttttgactgtgttgttctctggttttttgctcggtagaaattccgcttggggaggcaatcttgtaaagaatcaattgacaactctaaggatgtttcttgtgttgcggagagtcaggacactggttcatcttcaacatcatccttaagattggctgctcaagaacagaacgagagttaccaggtcactgaagctttgcgtgcccagatggaagtccaaagaagactacacgagcaactagaggtgcaaaggcgactccagttaaggatcgaggcacaagggaagtacctgcaatcaattctagagaaagcttgcaaggctatagaggagcaagctgttgcatttgctgggttagaggcagctagagaagagctttcagagctagccataaaggcctccatcaccaatgggtgccaaggaacaacaagcaccttcgacacaaccaaaatgatgattccatccttatccgagcttgcagtagcaatagagcacaagaacaactgttcagcagagagctctctgacttccagcactgtaggaagtccggtatcagctgcgttgatgaagaagagacaacgaggagtgtttggaaatggagatagtgtggttgttggtcatgatgctggatgggttatgcctagtagtagcattggatgaagttagcaagagagagagagagagcgagaccagattttagcttatttaattttgctatgttgtatttaactctaaactctgtcatcaaacttgtcttagcgtctatgtatatatttgttgaatctgtagcctctcttttagtttgtgtatttgcttcaactttttctaagcttgccttcttttttcttttttggacaaacctaaatatagaatttatgt

SEQ ID NO: 77375 - protein, 154 aa, Arabidopsis thaliana
  peptide (1)..(154): Ceres Seq. ID no. 12576206
  misc_feature (71)..(119): Pfam Name: Myb-like DNA-binding domain Pfam Description: Myb-like DNA-binding domain
  misc_feature (33)..(123): Homolog of NCBI NO: 18404044 NR Description: transfactor, putative; protein id: At3g24120.1, by cDNA: 6626., supported by cDNA: gi_15215653, supported by gi_20334891 [Arabidopsis thaliana] >gi|15215654|gb|AAK91372.1|
  misc_feature (33)..(123): Homolog of NCBI NO: 11994231 NR Description: contains similarity to transfactor~gene_id:MUJ8.2
  misc_feature (33)..(154): Homolog of NCBI NO: 7485694 NR Description: hypothetical protein F18A5.30 - Arabidopsis >gi|4455293|emb|CAB36828.1| putative protein [Arabidopsis >gi|7268068|emb|CAB78406.1| putative protein [Arabidopsis
  misc_feature (59)..(123): Homolog of NCBI NO: 25406584 NR Description: hypothetical protein T8K14.15 [imported] - thaliana >gi|4835766|gb|AAD30233.1|AC007202_15 Contains
  misc_feature (43)..(119): Homolog of NCBI NO: 29647444 NR Description: P0410E11.32 [Oryza sativa (japonica
  misc_feature (59)..(123): Homolog of NCBI NO: 30699418 NR Description: transfactor -related [Arabidopsis thaliana]
  misc_feature (55)..(138): Homolog of NCBI NO: 6223653 NR Description: transfactor-like [Arabidopsis thaliana]
  misc_feature (47)..(119): Homolog of NCBI NO: 15222366 NR Description: transfactor, putative; protein id: At1g69580.1
  misc_feature (29)..(140): Homolog of NCBI NO: 14596181 NR Description: transfactor-like protein [Arabidopsis thaliana]
  misc_feature (29)..(140): Homolog of NCBI NO: 28059694 NR Description: transfactor-like protein [Arabidopsis thaliana]
IFLHTFFHFPGKTAEKIKETKKSLFLCGDQRRMYSAIRSSLPLDGSLGDYSDGTNLPIDACLVLTTDPKPRLRWTSELHERFVDAVTQLGGPDKATPKTIMRTMGVKGLTLYHLKSHLQVLMLLPSISNYASLATYNKQSSLLFDCVVLWFFAR

SEQ ID NO: 77376 - protein, 149 aa, Arabidopsis thaliana
  peptide (1)..(149): Ceres Seq. ID no. 12576207
  misc_feature (1)..(149): Homolog of NCBI NO: 18404044 NR Description: transfactor, putative; protein id: At3g24120.1, by cDNA: 6626., supported by cDNA: gi_15215653, supported by gi_20334891 [Arabidopsis thaliana] >gi|15215654|gb|AAK91372.1|
  misc_feature (1)..(149): Homolog of NCBI NO: 11994231 NR Description: contains similarity to transfactor~gene_id:MUJ8.2
  misc_feature (1)..(149): Homolog of NCBI NO: 18414049 NR Description: putative protein; protein id: At4g13640.1, by cDNA: 38327. [Arabidopsis thaliana]
  misc_feature (1)..(149): Homolog of NCBI NO: 7485694 NR Description: hypothetical protein F18A5.30 - Arabidopsis >gi|4455293|emb|CAB36828.1| putative protein [Arabidopsis >gi|7268068|emb|CAB78406.1| putative protein [Arabidopsis
  misc_feature (1)..(149): Homolog of NCBI NO: 19698927 NR Description: putative protein [Arabidopsis thaliana]
  misc_feature (1)..(79): Homolog of NCBI NO: 7485694 NR Description: hypothetical protein F18A5.30 - Arabidopsis >gi|4455293|emb|CAB36828.1| putative protein [Arabidopsis >gi|7268068|emb|CAB78406.1| putative protein [Arabidopsis
  misc_feature (1)..(52): Homolog of NCBI NO: 25406584 NR Description: hypothetical protein T8K14.15 [imported] - thaliana >gi|4835766|gb|AAD30233.1|AC007202_15 Contains
  misc_feature (1)..(47): Homolog of NCBI NO: 29647444 NR Description: P0410E11.32 [Oryza sativa (japonica
  misc_feature (1)..(52): Homolog of NCBI NO: 30699418 NR Description: transfactor -related [Arabidopsis thaliana]
  misc_feature (1)..(126): Homolog of NCBI NO: 6223653 NR Description: transfactor-like [Arabidopsis thaliana]
MEVQRRLHEQLEVQRRLQLRIEAQGKYLQSILEKACKAIEEQAVAFAGLEAAREELSELAIKASITNGCQGTTSTFDTTKMMIPSLSELAVAIEHKNNCSAESSLTSSTVGSPVSAALMKKRQRGVFGNGDSVVVGHDAGWVMPSSSIG

SEQ ID NO: 77377 - protein, 122 aa, Arabidopsis thaliana
  peptide (1)..(122): Ceres Seq. ID no. 12576208
  misc_feature (39)..(87): Pfam Name: Myb-like DNA-binding domain Pfam Description: Myb-like DNA-binding domain
  misc_feature (1)..(91): Homolog of NCBI NO: 18404044 NR Description: transfactor, putative; protein id: At3g24120.1, by cDNA: 6626., supported by cDNA: gi_15215653, supported by gi_20334891 [Arabidopsis thaliana] >gi|15215654|gb|AAK91372.1|
  misc_feature (1)..(91): Homolog of NCBI NO: 11994231 NR Description: contains similarity to transfactor~gene_id:MUJ8.2
  misc_feature (1)..(122): Homolog of NCBI NO: 7485694 NR Description: hypothetical protein F18A5.30 - Arabidopsis >gi|4455293|emb|CAB36828.1| putative protein [Arabidopsis >gi|7268068|emb|CAB78406.1| putative protein [Arabidopsis
  misc_feature (27)..(91): Homolog of NCBI NO: 25406584 NR Description: hypothetical protein T8K14.15 [imported] - thaliana >gi|4835766|gb|AAD30233.1|AC007202_15 Contains
  misc_feature (11)..(87): Homolog of NCBI NO: 29647444 NR Description: P0410E11.32 [Oryza sativa (japonica
  misc_feature (27)..(91): Homolog of NCBI NO: 30699418 NR Description: transfactor -related [Arabidopsis thaliana]
  misc_feature (23)..(106): Homolog of NCBI NO: 6223653 NR Description: transfactor-like [Arabidopsis thaliana]
  misc_feature (15)..(87): Homolog of NCBI NO: 15222366 NR Description: transfactor, putative; protein id: At1g69580.1
  misc_feature (1)..(108): Homolog of NCBI NO: 14596181 NR Description: transfactor-like protein [Arabidopsis thaliana]
  misc_feature (1)..(108): Homolog of NCBI NO: 28059694 NR Description: transfactor-like protein [Arabidopsis thaliana]
MYSAIRSSLPLDGSLGDYSDGTNLPIDACLVLTTDPKPRLRWTSELHERFVDAVTQLGGPDKATPKTIMRTMGVKGLTLYHLKSHLQVLMLLPSISNYASLATYNKQSSLLFDCVVLWFFAR

SEQ ID NO: 77378 - DNA, 2039 bp, Arabidopsis thaliana
  misc_feature (1)..(2039): Ceres Seq. ID no. 12576217
  misc_feature: MA Experiment ID: 20001557 Result: Down-regulated in Transcription
  misc_feature: MA Experiment 20001557 PARAMETER Experiment Name: At_Drought_Soil_Dry_P Parameter: Age (day) Value: 27
  misc_feature: MA Experiment 20001557 PARAMETER Experiment Name: At_Drought_Soil_Dry_P Parameter: Organism Value: A. thaliana
  misc_feature: MA Experiment 20001557 PARAMETER Experiment Name: At_Drought_Soil_Dry_P Parameter: Plant Line Value: WS
  misc_feature: MA Experiment 20001557 PARAMETER Experiment Name: At_Drought_Soil_Dry_P Parameter: Post Timepoint (hr) Value: 3
  misc_feature: MA Experiment 20001557 PARAMETER Experiment Name: At_Drought_Soil_Dry_P Parameter: Post-Treatment Value: Re-Water vs. No Drought
  misc_feature: MA Experiment 20001557 PARAMETER Experiment Name: At_Drought_Soil_Dry_P Parameter: Timepoint (day) Value: 13
  misc_feature: MA Experiment 20001557 PARAMETER Experiment Name: At_Drought_Soil_Dry_P Parameter: Treatment Value: Drought vs. No Drought
aaactccaacagcatcatcatcatcatcatccttcaaattatttttcctattttgaaaaatttatttgaaatctcataatttacgttaatggagattgctccatctacaagtagattcaagctctacgatcaattcgagcttctggagtttcctgacaagtacgtcgtcaaacccatcgaatcgcctgaggaaggcttctccgtcaatcggcgcgatggcaatatcaaacctcttgatgaaaacgcatcttctgggagtcctactagagtctctactatctatggcgtaggaggaactattaggctcttagcaggaacatacttgctagttataacgtctcgggaggaagttggaaattttctcggtttaccgatttttagagttacggctatgaaattcttaccttgcaatgaggctttgaggtttgctactgctcaagaaaaaaaggacgaaacatattttaggactctgttacaagcacttgagacaacccctggattgtatttttcgtatgaaacagatctaacattgaatcttcaaagaaggtgcaagctagctgaaggttggaatcgtaagcctatgtggaagcaggctgaccctcgatatgtttggaactggcatcttttggaggacttaattgaatgcaaactggatggttttattattcctatacttcaaggaaattaccaagttgctgagctaaagctcaagaattctcctgctgtggtatcgataatgtccaggcgctgtacacgacgtctaggtacacgtatgtggagaagaggagccaatcttgaaggggacgctgctaattttgtcgaatctgaacaaatagtggagattaatggtttcaagttctcattattgcaggttcgaggttcaatcccacttctttgggagcagatcgttgatttgagttataagccacggcttaagataaataagcatgaagagacgccaaaagttgtacagcgccatttccatgatctttgccaaagatatggagaaattatggcagttgacctaacagatcagcatggagatgaaggtgcattaagcaaagcatatgccaccgagatggagaagcttcctgatgtgagatatgtctcctttgacttccatcaagtctgtggaactacaaacttcgacaacctgggggtactgtatgagcagattggggatgaatttgaaaagcaaggatatttccttgtagacgcagacgagaacatcctagaagagcagaaaggagttatcagatctaactgcatcgactgtcttgaccgcacaaatgttacccagagtttcatgggccaaaaaagtctgaatctacaacttcaaaggatcggagtgtgcgattccacagagtgtatatccacgttcgaagatgattacacaaagttcagaacaatttgggctgagcaaggggacgaggttagtttgcaatatgccgggacatatgctcttaagggcgacctcgtaaggtacgggaaacagactatgactggagctatcaaagatggcctcagtgcaatgtcgagatattatctgaataatttccaagatggtgtaaggcaggatgctttggacctcataagtggtcgctacacagtgggcacacacagcccttcacaactccagcccattggatcacaaccgtcttttctgccggtagcatcagcattgttgataggtggtgtaacagtgacatctttcacaattcatcaagcgggaagaaacacgcagcagtatctggcgtcggctttgtgggctggagtgactgcaggagttgtggcgatgatcaaagccaatggaaggcacttgacttcaaggcctcgtctttgccatctaatttgattccatttgaattgagattatttgcgtctcacattcttcccaaaacccacacccactgtccctctttgctttctcgttcaacgtccgcacaaaccaaaaatcgaactaaaagtctatattactgaacttctttattcaatgcaatcagttttataacccaaaataatataagaagatttcttcc

SEQ ID NO: 77379 - protein, 588 aa, Arabidopsis thaliana
  peptide (1)..(588): Ceres Seq. ID no. 12576218
  misc_feature (64)..(356): Pfam Name: SacI homology domain Pfam Description: SacI homology domain
  misc_feature (8)..(584): Homolog of NCBI NO: 30693470 NR Description: expressed protein [Arabidopsis thaliana] unknown protein [Arabidopsis thaliana]
  misc_feature (8)..(584): Homolog of NCBI NO: 30840665 NR Description: SAC1-like protein AtSAC1b [Arabidopsis thaliana]
  misc_feature (226)..(584): Homolog of NCBI NO: 10177117 NR Description: emb|CAB63010.1~gene_id:K2A18.9~strong similarity
  misc_feature (8)..(226): Homolog of NCBI NO: 10177117 NR Description: emb|CAB63010.1~gene_id:K2A18.9~strong similarity
  misc_feature (8)..(542): Homolog of NCBI NO: 15239234 NR Description: putative protein; protein id: At5g66020.1
  misc_feature (226)..(542): Homolog of NCBI NO: 11281506 NR Description: hypothetical protein F26O13.100 - Arabidopsis >gi|6572067|emb|CAB63010.1| putative protein [Arabidopsis
  misc_feature (8)..(239): Homolog of NCBI NO: 11281506 NR Description: hypothetical protein F26O13.100 - Arabidopsis >gi|6572067|emb|CAB63010.1| putative protein [Arabidopsis
  misc_feature (13)..(584): Homolog of NCBI NO: 11281507 NR Description: hypothetical protein DKFZp434O1328.1 - human
  misc_feature (13)..(584): Homolog of NCBI NO: 16741488 NR Description: suppressor of actin 1 [Homo sapiens]
  misc_feature (13)..(584): Homolog of NCBI NO: 7662338 NR Description: suppressor of actin 1 [Homo sapiens]
MEIAPSTSRFKLYDQFELLEFPDKYVVKPIESPEEGFSVNRRDGNIKPLDENASSGSPTRVSTIYGVGGTIRLLAGTYLLVITSREEVGNFLGLPIFRVTAMKFLPCNEALRFATAQEKKDETYFRTLLQALETTPGLYFSYETDLTLNLQRRCKLAEGWNRKPMWKQADPRYVWNWHLLEDLIECKLDGFIIPILQGNYQVAELKLKNSPAVVSIMSRRCTRRLGTRMWRRGANLEGDAANFVESEQIVEINGFKFSLLQVRGSIPLLWEQIVDLSYKPRLKINKHEETPKVVQRHFHDLCQRYGEIMAVDLTDQHGDEGALSKAYATEMEKLPDVRYVSFDFHQVCGTTNFDNLGVLYEQIGDEFEKQGYFLVDADENILEEQKGVIRSNCIDCLDRTNVTQSFMGQKSLNLQLQRIGVCDSTECISTFEDDYTKFRTIWAEQGDEVSLQYAGTYALKGDLVRYGKQTMTGAIKDGLSAMSRYYLNNFQDGVRQDALDLISGRYTVGTHSPSQLQPIGSQPSFLPVASALLIGGVTVTSFTIHQAGRNTQQYLASALWAGVTAGVVAMIKANGRHLTSRPRLCHLI

SEQ ID NO: 77380 - protein, 487 aa, Arabidopsis thaliana
  peptide (1)..(487): Ceres Seq. ID no. 12576219
  misc_feature (1)..(255): Pfam Name: SacI homology domain Pfam Description: SacI homology domain
  misc_feature (1)..(483): Homolog of NCBI NO: 30693470 NR Description: expressed protein [Arabidopsis thaliana] unknown protein [Arabidopsis thaliana]
  misc_feature (1)..(483): Homolog of NCBI NO: 30840665 NR Description: SAC1-like protein AtSAC1b [Arabidopsis thaliana]
  misc_feature (125)..(483): Homolog of NCBI NO: 10177117 NR Description: emb|CAB63010.1~gene_id:K2A18.9~strong similarity
  misc_feature (1)..(125): Homolog of NCBI NO: 10177117 NR Description: emb|CAB63010.1~gene_id:K2A18.9~strong similarity
  misc_feature (1)..(441): Homolog of NCBI NO: 15239234 NR Description: putative protein; protein id: At5g66020.1
  misc_feature (125)..(441): Homolog of NCBI NO: 11281506 NR Description: hypothetical protein F26O13.100 - Arabidopsis >gi|6572067|emb|CAB63010.1| putative protein [Arabidopsis
  misc_feature (1)..(138): Homolog of NCBI NO: 11281506 NR Description: hypothetical protein F26O13.100 - Arabidopsis >gi|6572067|emb|CAB63010.1| putative protein [Arabidopsis
  misc_feature (1)..(483): Homolog of NCBI NO: 11281507 NR Description: hypothetical protein DKFZp434O1328.1 - human
  misc_feature (1)..(483): Homolog of NCBI NO: 16741488 NR Description: suppressor of actin 1 [Homo sapiens]
  misc_feature (1)..(483): Homolog of NCBI NO: 7662338 NR Description: suppressor of actin 1 [Homo sapiens]
MKFLPCNEALRFATAQEKKDETYFRTLLQALETTPGLYFSYETDLTLNLQRRCKLAEGWNRKPMWKQADPRYVWNWHLLEDLIECKLDGFIIPILQGNYQVAELKLKNSPAVVSIMSRRCTRRLGTRMWRRGANLEGDAANFVESEQIVEINGFKFSLLQVRGSIPLLWEQIVDLSYKPRLKINKHEETPKVVQRHFHDLCQRYGEIMAVDLTDQHGDEGALSKAYATEMEKLPDVRYVSFDFHQVCGTTNFDNLGVLYEQIGDEFEKQGYFLVDADENILEEQKGVIRSNCIDCLDRTNVTQSFMGQKSLNLQLQRIGVCDSTECISTFEDDYTKFRTIWAEQGDEVSLQYAGTYALKGDLVRYGKQTMTGAIKDGLSAMSRYYLNNFQDGVRQDALDLISGRYTVGTHSPSQLQPIGSQPSFLPVASALLIGGVTVTSFTIHQAGRNTQQYLASALWAGVTAGVVAMIKANGRHLTSRPRLCHLI

SEQ ID NO: 77381 - protein, 424 aa, Arabidopsis thaliana
  peptide (1)..(424): Ceres Seq. ID no. 12576220
  misc_feature (1)..(192): Pfam Name: SacI homology domain Pfam Description: SacI homology domain
  misc_feature (1)..(420): Homolog of NCBI NO: 30693470 NR Description: expressed protein [Arabidopsis thaliana] unknown protein [Arabidopsis thaliana]
  misc_feature (1)..(420): Homolog of NCBI NO: 30840665 NR Description: SAC1-like protein AtSAC1b [Arabidopsis thaliana]
  misc_feature (62)..(420): Homolog of NCBI NO: 10177117 NR Description: emb|CAB63010.1~gene_id:K2A18.9~strong similarity
  misc_feature (1)..(62): Homolog of NCBI NO: 10177117 NR Description: emb|CAB63010.1~gene_id:K2A18.9~strong similarity
  misc_feature (1)..(378): Homolog of NCBI NO: 15239234 NR Description: putative protein; protein id: At5g66020.1
  misc_feature (62)..(378): Homolog of NCBI NO: 11281506 NR Description: hypothetical protein F26O13.100 - Arabidopsis >gi|6572067|emb|CAB63010.1| putative protein [Arabidopsis
  misc_feature (1)..(75): Homolog of NCBI NO: 11281506 NR Description: hypothetical protein F26O13.100 - Arabidopsis >gi|6572067|emb|CAB63010.1| putative protein [Arabidopsis
  misc_feature (1)..(420): Homolog of NCBI NO: 11281507 NR Description: hypothetical protein DKFZp434O1328.1 - human
  misc_feature (1)..(420): Homolog of NCBI NO: 16741488 NR Description: suppressor of actin 1 [Homo sapiens]
  misc_feature (1)..(420): Homolog of NCBI NO: 7662338 NR Description: suppressor of actin 1 [Homo sapiens]
MWKQADPRYVWNWHLLEDLIECKLDGFIIPILQGNYQVAELKLKNSPAVVSIMSRRCTRRLGTRMWRRGANLEGDAANFVESEQIVEINGFKFSLLQVRGSIPLLWEQIVDLSYKPRLKINKHEETPKVVQRHFHDLCQRYGEIMAVDLTDQHGDEGALSKAYATEMEKLPDVRYVSFDFHQVCGTTNFDNLGVLYEQIGDEFEKQGYFLVDADENILEEQKGVIRSNCIDCLDRTNVTQSFMGQKSLNLQLQRIGVCDSTECISTFEDDYTKFRTIWAEQGDEVSLQYAGTYALKGDLVRYGKQTMTGAIKDGLSAMSRYYLNNFQDGVRQDALDLISGRYTVGTHSPSQLQPIGSQPSFLPVASALLIGGVTVTSFTIHQAGRNTQQYLASALWAGVTAGVVAMIKANGRHLTSRPRLCHLI

SEQ ID NO: 77382 - DNA, 1596 bp, Arabidopsis thaliana
  misc_feature (1)..(1596): Ceres Seq. ID no. 12576227
  misc_feature: MA Experiment ID: 108461 Result: Up-regulated in Transcription
  misc_feature: MA Experiment 108461 PARAMETER Experiment Name: At_Germinating_Seeds_cDNA_P Parameter: Age (day) Value: 1 vs. 0
  misc_feature: MA Experiment 108461 PARAMETER Experiment Name: At_Germinating_Seeds_cDNA_P Parameter: Tissue Value: Germinating Seeds
  misc_feature: MA Experiment ID: 108462 Result: Up-regulated in Transcription
  misc_feature: MA Experiment 108462 PARAMETER Experiment Name: At_Germinating_Seeds_cDNA_P Parameter: Age (day) Value: 2 vs. 0
  misc_feature: MA Experiment 108462 PARAMETER Experiment Name: At_Germinating_Seeds_cDNA_P Parameter: Tissue Value: Germinating Seeds
  misc_feature: MA Experiment ID: 108463 Result: Up-regulated in Transcription
  misc_feature: MA Experiment 108463 PARAMETER Experiment Name: At_Germinating_Seeds_cDNA_P Parameter: Age (day) Value: 3 vs. 0
  misc_feature: MA Experiment 108463 PARAMETER Experiment Name: At_Germinating_Seeds_cDNA_P Parameter: Tissue Value: Germinating Seeds
  misc_feature: MA Experiment ID: 108464 Result: Up-regulated in Transcription
  misc_feature: MA Experiment 108464 PARAMETER Experiment Name: At_Germinating_Seeds_cDNA_P Parameter: Age (day) Value: 4 vs. 0
  misc_feature: MA Experiment 108464 PARAMETER Experiment Name: At_Germinating_Seeds_cDNA_P Parameter: Tissue Value: Germinating Seeds
  misc_feature: MA Experiment ID: 108488 Result: Down-regulated in Transcription
  misc_feature: MA Experiment ID: 108573 Result: Up-regulated in Transcription
  misc_feature: MA Experiment 108573 PARAMETER Experiment Name: At_Drought_cDNA_P Parameter: Timepoint (hr) Value: 6
  misc_feature: MA Experiment 108573 PARAMETER Experiment Name: At_Drought_cDNA_P Parameter: Tissue Value: Aerial
  misc_feature: MA Experiment 108573 PARAMETER Experiment Name: At_Drought_cDNA_P Parameter: Treatment Value: Drought vs. No Drought
  misc_feature: MA Experiment ID: 108595 Result: Down-regulated in Transcription
  misc_feature: MA Experiment 108595 PARAMETER Experiment Name: At_Ler-pi_Ovule_cDNA_P Parameter: Plant Line Value: null
  misc_feature: MA Experiment ID: 20000113 Result: Down-regulated in Transcription
  misc_feature: MA Experiment 20000113 PARAMETER Experiment Name: At_42deg_Heat_cDNA_P Parameter: Temperature (deg C) Value: 42 vs. 22
  misc_feature: MA Experiment 20000113 PARAMETER Experiment Name: At_42deg_Heat_cDNA_P Parameter: Timepoint (hr) Value: 8
  misc_feature: MA Experiment 20000113 PARAMETER Experiment Name: At_42deg_Heat_cDNA_P Parameter: Tissue Value: Aerial
  misc_feature: MA Experiment ID: 20000179 Result: Up-regulated in Transcription
  misc_feature: MA Experiment 20000179 PARAMETER Experiment Name: At_Germinating_Seeds_P Parameter: Age (hr) Value: 6 vs. 0
  misc_feature: MA Experiment 20000179 PARAMETER Experiment Name: At_Germinating_Seeds_P Parameter: Tissue Value: Germinating Seeds
  misc_feature: MA Experiment ID: 20000180 Result: Up-regulated in Transcription
  misc_feature: MA Experiment 20000180 PARAMETER Experiment Name: At_Germinating_Seeds_P Parameter: Age (hr) Value: 24 vs. 0
  misc_feature: MA Experiment 20000180 PARAMETER Experiment Name: At_Germinating_Seeds_P Parameter: Tissue Value: Germinating Seeds
  misc_feature: MA Experiment ID: 20000265 Result: Down-regulated in Transcription
  misc_feature: MA Experiment 20000265 PARAMETER Experiment Name: At_Open_Flower_P Parameter: Age (day) Value: 21
  misc_feature: MA Experiment 20000265 PARAMETER Experiment Name: At_Open_Flower_P Parameter: Plant Line Value: WS
  misc_feature: MA Experiment 20000265 PARAMETER Experiment Name: At_Open_Flower_P Parameter: Tissue Value: Closed Flower vs. Whole Plant
  misc_feature: MA Experiment ID: 20000495 Result: Down-regulated in Transcription
  misc_feature: MA Experiment 20000495 PARAMETER Experiment Name: At_Guard_Cells_P Parameter: Harvest Date Value: 8/2/2002
  misc_feature: MA Experiment 20000495 PARAMETER Experiment Name: At_Guard_Cells_P Parameter: Organism Value: A. thaliana
  misc_feature: MA Experiment 20000495 PARAMETER Experiment Name: At_Guard_Cells_P Parameter: Tissue Value: Guard Cells vs. Leaves
aagaagctattggatcgctgacagataatccgatcagattcagagagttttatcgatcagatcattttttctcaatgacgaaaaaggcggtgcttattgggatcaattacccaggaaccaaggcggagttacggggatgcgtcaacgatgttcgtcgtatgtacaaatgtctcgttgaacggtacggcttctccgaggagaacatcaccgttctcatcgacaccgatgaatcctctactcagcctactggcaagaacatccgccgcgcgcttgctgatctcgtcgaatctgccgattccggcgacgttcttgtcgttcattacagtggacacggtacgaggttgccggctgagactggtgaagacgatgacactggtttcgacgagtgtattgttccttgcgacatgaatctgattactgatgatgattttagagatcttgtggacaaggttcctccaggttgcagaatgacaatcatttcagactcttgtcacagtggtggcctaatcgacgaagccaaggagcagattggagagagcactaagaaagaagccgaggacgaagatgaatctgaagaatcttcttcaagattcgggtttaggaagttcttgcgcagcaaagtggaaggcgccatcgagtctcgagggtttcacattggagggaacaagaaggatgaagatgaggcggaagaaatcgagactaaggagattgagcttgaagacggagaaacgatccatgccaaagacaaatctcttcctctgcagaccttgattgatattctcaagcagcaaacagggaatgataatatcgaagttgggaaaatcaggccaagcctttttgatgcgtttggtgatgattcgagcccgaaagtgaagaagtttatgaaagtgatcttaggtaagcttcaggctggaaatggagaagaaggtggattaatgggaatgcttggcaaattggcttcagggtttcttgagggtaaactaaacgatgaagactatgtgaaacccgctatgcagacacacgttgggagtaaagaagaggtttatgctggtggatcaagaggttcggttccgcttccagacagcgggatactgatcagcggttgccaaaccgatcagacctctgctgatgcgactccagcggggaaaccaactgaggcttatggagcgatgagcaattcgatacagacgatattggaggagacagacggtgagatatcaaacagagaaatggttacaagggctaggaaggcattgaagaagcaagggtttactcagcagccaggtttgtattgccatgatggttatgccaacgctcctttcatctgttgaaaacagaggttttattgaatgttttttactacgtacgacacgttgattgaagtttctggtcggaaaaataagcctgttttttttttttgctgtttgatggcatttatgtaatttacaagttatgtgtgttgtgttctgtgaaacactaaaattcttcttgttttattgagatctattatgttggttgtgaaattattttttgtttttcttttcttgttaactctctgtattctgcacatcaataagaaaaagttttttttaacgg

SEQ ID NO: 77383 - protein, 442 aa, Arabidopsis thaliana
  peptide (1)..(442): Ceres Seq. ID no. 12576228
  misc_feature (27)..(442): Pfam Name: Caspase domain Pfam Description: Caspase domain
  misc_feature (25)..(442): Homolog of NCBI NO: 15219345 NR Description: hypothetical protein common family; protein id: supported by cDNA: gi_19347868 [Arabidopsis thaliana]
  misc_feature (25)..(442): Homolog of NCBI NO: 33304380 NR Description: metacaspase 7 [Arabidopsis thaliana]
  misc_feature (25)..(442): Homolog of NCBI NO: 15219342 NR Description: hypothetical protein common family; protein id:
  misc_feature (32)..(442): Homolog of NCBI NO: 23343885 NR Description: metacaspase 1 [Lycopersicon esculentum]
  misc_feature (25)..(442): Homolog of NCBI NO: 4235430 NR Description: latex-abundant protein [Hevea brasiliensis]
  misc_feature (25)..(442): Homolog of NCBI NO: 40644374 NR Description: metacaspase type II [Picea abies]
  misc_feature (209)..(442): Homolog of NCBI NO: 15219340 NR Description: hypothetical protein common family; protein id:
  misc_feature (25)..(190): Homolog of NCBI NO: 15219340 NR Description: hypothetical protein common family; protein id:
  misc_feature (27)..(442): Homolog of NCBI NO: 34908928 NR Description: putative latex-abundant protein [Oryza sativa
  misc_feature (25)..(442): Homolog of NCBI NO: 32482818 NR Description: metacaspase 4 [Arabidopsis thaliana]
EAIGSLTDNPIRFREFYRSDHFFSMTKKAVLIGINYPGTKAELRGCVNDVRRMYKCLVERYGFSEENITVLIDTDESSTQPTGKNIRRALADLVESADSGDVLVVHYSGHGTRLPAETGEDDDTGFDECIVPCDMNLITDDDFRDLVDKVPPGCRMTIISDSCHSGGLIDEAKEQIGESTKKEAEDEDESEESSSRFGFRKFLRSKVEGAIESRGFHIGGNKKDEDEAEEIETKEIELEDGETIHAKDKSLPLQTLIDILKQQTGNDNIEVGKIRPSLFDAFGDDSSPKVKKFMKVILGKLQAGNGEEGGLMGMLGKLASGFLEGKLNDEDYVKPAMQTHVGSKEEVYAGGSRGSVPLPDSGILISGCQTDQTSADATPAGKPTEAYGAMSNSIQTILEETDGEISNREMVTRARKALKKQGFTQQPGLYCHDGYANAPFIC

SEQ ID NO: 77384 - protein, 418 aa, Arabidopsis thaliana; identical to SEQ ID NO: 41313
  peptide (1)..(418): Ceres Seq. ID no. 12576229
  misc_feature (3)..(418): Pfam Name: Caspase domain Pfam Description: Caspase domain
  misc_feature (1)..(418): Homolog of NCBI NO: 15219345 NR Description: hypothetical protein common family; protein id: supported by cDNA: gi_19347868 [Arabidopsis thaliana]
  misc_feature (1)..(418): Homolog of NCBI NO: 33304380 NR Description: metacaspase 7 [Arabidopsis thaliana]
  misc_feature (1)..(418): Homolog of NCBI NO: 15219342 NR Description: hypothetical protein common family; protein id:
  misc_feature (8)..(418): Homolog of NCBI NO: 23343885 NR Description: metacaspase 1 [Lycopersicon esculentum]
  misc_feature (1)..(418): Homolog of NCBI NO: 4235430 NR Description: latex-abundant protein [Hevea brasiliensis]
  misc_feature (1)..(418): Homolog of NCBI NO: 40644374 NR Description: metacaspase type II [Picea abies]
  misc_feature (185)..(418): Homolog of NCBI NO: 15219340 NR Description: hypothetical protein common family; protein id:
  misc_feature (1)..(166): Homolog of NCBI NO: 15219340 NR Description: hypothetical protein common family; protein id:
  misc_feature (3)..(418): Homolog of NCBI NO: 34908928 NR Description: putative latex-abundant protein [Oryza sativa
  misc_feature (1)..(418): Homolog of NCBI NO: 32482818 NR Description: metacaspase 4 [Arabidopsis thaliana]

SEQ ID NO: 77385 - protein, 390 aa, Arabidopsis thaliana; identical to SEQ ID NO: 41314
  peptide (1)..(390): Ceres Seq. ID no. 12576230
  misc_feature (1)..(390): Pfam Name: Caspase domain Pfam Description: Caspase domain
  misc_feature (1)..(390): Homolog of NCBI NO: 15219345 NR Description: hypothetical protein common family; protein id: supported by cDNA: gi_19347868 [Arabidopsis thaliana]
  misc_feature (1)..(390): Homolog of NCBI NO: 33304380 NR Description: metacaspase 7 [Arabidopsis thaliana]
  misc_feature (1)..(390): Homolog of NCBI NO: 15219342 NR Description: hypothetical protein common family; protein id:
  misc_feature (1)..(390): Homolog of NCBI NO: 23343885 NR Description: metacaspase 1 [Lycopersicon esculentum]
  misc_feature (1)..(390): Homolog of NCBI NO: 4235430 NR Description: latex-abundant protein [Hevea brasiliensis]
  misc_feature (1)..(390): Homolog of NCBI NO: 40644374 NR Description: metacaspase type II [Picea abies]
  misc_feature (157)..(390): Homolog of NCBI NO: 15219340 NR Description: hypothetical protein common family; protein id:
  misc_feature (1)..(138): Homolog of NCBI NO: 15219340 NR Description: hypothetical protein common family; protein id:
  misc_feature (1)..(390): Homolog of NCBI NO: 34908928 NR Description: putative latex-abundant protein [Oryza sativa
  misc_feature (1)..(390): Homolog of NCBI NO: 32482818 NR Description: metacaspase 4 [Arabidopsis thaliana]

SEQ ID NO: 77386 - DNA, 1690 bp, Arabidopsis thaliana
  misc_feature (1)..(1690): Ceres Seq. ID no. 12576262
  misc_feature: MA Experiment ID: 108434 Result: Up-regulated in Transcription
  misc_feature: MA Experiment 108434 PARAMETER Experiment Name: At_Root_Tips_cDNA_P Parameter: Tissue Value: Root Tips
  misc_feature: MA Experiment ID: 108462 Result: Down-regulated in Transcription
  misc_feature: MA Experiment 108462 PARAMETER Experiment Name: At_Germinating_Seeds_cDNA_P Parameter: Age (day) Value: 2 vs. 0
  misc_feature: MA Experiment 108462 PARAMETER Experiment Name: At_Germinating_Seeds_cDNA_P Parameter: Tissue Value: Germinating Seeds
  misc_feature: MA Experiment ID: 108463 Result: Down-regulated in Transcription
  misc_feature: MA Experiment 108463 PARAMETER Experiment Name: At_Germinating_Seeds_cDNA_P Parameter: Age (day) Value: 3 vs. 0
  misc_feature: MA Experiment 108463 PARAMETER Experiment Name: At_Germinating_Seeds_cDNA_P Parameter: Tissue Value: Germinating Seeds
  misc_feature: MA Experiment ID: 108464 Result: Down-regulated in Transcription
  misc_feature: MA Experiment 108464 PARAMETER Experiment Name: At_Germinating_Seeds_cDNA_P Parameter: Age (day) Value: 4 vs. 0
  misc_feature: MA Experiment 108464 PARAMETER Experiment Name: At_Germinating_Seeds_cDNA_P Parameter: Tissue Value: Germinating Seeds
  misc_feature: MA Experiment ID: 20000069 Result: Down-regulated in Transcription
  misc_feature: MA Experiment 20000069 PARAMETER Experiment Name: At_100uM_ABA_Mutants_cDNA_P Parameter: Plant Line Value: CS23
  misc_feature: MA Experiment 20000069 PARAMETER Experiment Name: At_100uM_ABA_Mutants_cDNA_P Parameter: Timepoint (hr) Value: 6
  misc_feature: MA Experiment 20000069 PARAMETER Experiment Name: At_100uM_ABA_Mutants_cDNA_P Parameter: Tissue Value: Aerial
  misc_feature: MA Experiment 20000069 PARAMETER Experiment Name: At_100uM_ABA_Mutants_cDNA_P Parameter: Treatment Value: 100uM ABA vs. No Treatment
  misc_feature: MA Experiment ID: 20000070 Result: Down-regulated in Transcription
  misc_feature: MA Experiment 20000070 PARAMETER Experiment Name: At_100uM_ABA_Mutants_cDNA_P Parameter: Plant Line Value: CS24
  misc_feature: MA Experiment 20000070 PARAMETER Experiment Name: At_100uM_ABA_Mutants_cDNA_P Parameter: Timepoint (hr) Value: 6
  misc_feature: MA Experiment 20000070 PARAMETER Experiment Name: At_100uM_ABA_Mutants_cDNA_P Parameter: Tissue Value: Aerial
  misc_feature: MA Experiment 20000070 PARAMETER Experiment Name: At_100uM_ABA_Mutants_cDNA_P Parameter: Treatment Value: 100uM ABA vs. No Treatment
  misc_feature: MA Experiment ID: 20000113 Result: Down-regulated in Transcription
  misc_feature: MA Experiment 20000113 PARAMETER Experiment Name: At_42deg_Heat_cDNA_P Parameter: Temperature (deg C) Value: 42 vs. 22
  misc_feature: MA Experiment 20000113 PARAMETER Experiment Name: At_42deg_Heat_cDNA_P Parameter: Timepoint (hr) Value: 8
  misc_feature: MA Experiment 20000113 PARAMETER Experiment Name: At_42deg_Heat_cDNA_P Parameter: Tissue Value: Aerial
  misc_feature: MA Experiment ID: 20000117 Result: Down-regulated in Transcription
  misc_feature: MA Experiment 20000117 PARAMETER Experiment Name: At_100uM_ABA_Mutants_cDNA_P Parameter: Plant Line Value: Columbia
  misc_feature: MA Experiment 20000117 PARAMETER Experiment Name: At_100uM_ABA_Mutants_cDNA_P Parameter: Timepoint (hr) Value: 6
  misc_feature: MA Experiment 20000117 PARAMETER Experiment Name: At_100uM_ABA_Mutants_cDNA_P Parameter: Tissue Value: Aerial
  misc_feature: MA Experiment 20000117 PARAMETER Experiment Name: At_100uM_ABA_Mutants_cDNA_P Parameter: Treatment Value: 100uM ABA vs. No Treatment
  misc_feature: MA Experiment ID: 20000173 Result: Down-regulated in Transcription
  misc_feature: MA Experiment 20000173 PARAMETER Experiment Name: At_42deg_Heat_P Parameter: Age (day) Value: 14
  misc_feature: MA Experiment 20000173 PARAMETER Experiment Name: At_42deg_Heat_P Parameter: Organism Value: A. thaliana
  misc_feature: MA Experiment 20000173 PARAMETER Experiment Name: At_42deg_Heat_P Parameter: Plant Line Value: WS
  misc_feature: MA Experiment 20000173 PARAMETER Experiment Name: At_42deg_Heat_P Parameter: Temperature (deg C) Value: 42 vs. 22
  misc_feature: MA Experiment 20000173 PARAMETER Experiment Name: At_42deg_Heat_P Parameter: Timepoint (hr) Value: 6
  misc_feature: MA Experiment 20000173 PARAMETER Experiment Name: At_42deg_Heat_P Parameter: Tissue Value: Aerial
  misc_feature: MA Experiment ID: 20000182 Result: Down-regulated in Transcription
  misc_feature: MA Experiment 20000182 PARAMETER Experiment Name: At_2mM_SA_P Parameter: Age (day) Value: 14
  misc_feature: MA Experiment 20000182 PARAMETER Experiment Name: At_2mM_SA_P Parameter: Organism Value: A. thaliana
  misc_feature: MA Experiment 20000182 PARAMETER Experiment Name: At_2mM_SA_P Parameter: Plant Line Value: WS
  misc_feature: MA Experiment 20000182 PARAMETER Experiment Name: At_2mM_SA_P Parameter: Timepoint (hr) Value: 6
  misc_feature: MA Experiment 20000182 PARAMETER Experiment Name: At_2mM_SA_P Parameter: Tissue Value: Aerial
  misc_feature: MA Experiment 20000182 PARAMETER Experiment Name: At_2mM_SA_P Parameter: Treatment Value: 2mM SA vs. No Treatment
  misc_feature: MA Experiment ID: 20000437 Result: Down-regulated in Transcription
  misc_feature: MA Experiment 20000437 PARAMETER Experiment Name: At_Drought_P Parameter: Age (day) Value: 8
  misc_feature: MA Experiment 20000437 PARAMETER Experiment Name: At_Drought_P Parameter: Organism Value: A. thaliana
  misc_feature: MA Experiment 20000437 PARAMETER Experiment Name: At_Drought_P Parameter: Plant Line Value: WS
  misc_feature: MA Experiment 20000437 PARAMETER Experiment Name: At_Drought_P Parameter: Timepoint (hr) Value: 24
  misc_feature: MA Experiment 20000437 PARAMETER Experiment Name: At_Drought_P Parameter: Tissue Value: Whole Plant
  misc_feature: MA Experiment 20000437 PARAMETER Experiment Name: At_Drought_P Parameter: Treatment Value: Drought vs. No Drought
  misc_feature: MA Experiment ID: 20000438 Result: Up-regulated in Transcription
  misc_feature: MA Experiment 20000438 PARAMETER Experiment Name: At_Shoots__P Parameter: Age (day) Value: 14
  misc_feature: MA Experiment 20000438 PARAMETER Experiment Name: At_Shoots__P Parameter: Tissue Value: Shoots vs. Whole Plant
  misc_feature: MA Experiment ID: 20000439 Result: Down-regulated in Transcription
  misc_feature: MA Experiment 20000439 PARAMETER Experiment Name: At_Roots__P Parameter: Age (day) Value: 14 vs. 21
  misc_feature: MA Experiment 20000439 PARAMETER Experiment Name: At_Roots__P Parameter: Organism Value: A. thaliana
  misc_feature: MA Experiment 20000439 PARAMETER Experiment Name: At_Roots__P Parameter: Tissue Value: Roots vs. Whole Plant
  misc_feature: MA Experiment ID: 20000794 Result: Down-regulated in Transcription
  misc_feature: MA Experiment 20000794 PARAMETER Experiment Name: At_Petals_P Parameter: Age (day) Value: 23-25 days
  misc_feature: MA Experiment 20000794 PARAMETER Experiment Name: At_Petals_P Parameter: Plant Line Value: WS
  misc_feature: MA Experiment 20000794 PARAMETER Experiment Name: At_Petals_P Parameter: Tissue Value: Petals vs. Whole plant
  misc_feature: MA Experiment ID: 20001558 Result: Up-regulated in Transcription
  misc_feature: MA Experiment 20001558 PARAMETER Experiment Name: At_Drought_Soil_Dry_P Parameter: Age (day) Value: 27
  misc_feature: MA Experiment 20001558 PARAMETER Experiment Name: At_Drought_Soil_Dry_P Parameter: Organism Value: A. thaliana
  misc_feature: MA Experiment 20001558 PARAMETER Experiment Name: At_Drought_Soil_Dry_P Parameter: Plant Line Value: WS
  misc_feature: MA Experiment 20001558 PARAMETER Experiment Name: At_Drought_Soil_Dry_P Parameter: Post Timepoint (hr) Value: 6
  misc_feature: MA Experiment 20001558 PARAMETER Experiment Name: At_Drought_Soil_Dry_P Parameter: Post-Treatment Value: Re-Water vs. No Drought
  misc_feature: MA Experiment 20001558 PARAMETER Experiment Name: At_Drought_Soil_Dry_P Parameter: Timepoint (day) Value: 13
  misc_feature: MA Experiment 20001558 PARAMETER Experiment Name: At_Drought_Soil_Dry_P Parameter: Treatment Value: Drought vs. No Drought
  misc_feature: MA Experiment ID: 20001757 Result: Up-regulated in Transcription
  misc_feature: MA Experiment 20001757 PARAMETER Experiment Name: At_50mM_NH4NO3_L-to-H_P Parameter: Timepoint (hr) Value: 6
  misc_feature: MA Experiment 20001757 PARAMETER Experiment Name: At_50mM_NH4NO3_L-to-H_P Parameter: Tissue Value: Leaf
  misc_feature: MA Experiment 20001757 PARAMETER Experiment Name: At_50mM_NH4NO3_L-to-H_P Parameter: Treatment Value: 50mM NH4NO3 vs 100mM Mannitol
  misc_feature: MA Experiment ID: 20001905 Result: Down-regulated in Transcription
  misc_feature: MA Experiment 20001905 PARAMETER Experiment Name: At_Drought_Reproduction_P Parameter: Age (day) Value: 40
  misc_feature: MA Experiment 20001905 PARAMETER Experiment Name: At_Drought_Reproduction_P Parameter: Organism Value: A. thaliana
  misc_feature: MA Experiment 20001905 PARAMETER Experiment Name: At_Drought_Reproduction_P Parameter: Plant Line Value: WS
  misc_feature: MA Experiment 20001905 PARAMETER Experiment Name: At_Drought_Reproduction_P Parameter: Timepoint (day) Value: 10
  misc_feature: MA Experiment 20001905 PARAMETER Experiment Name: At_Drought_Reproduction_P Parameter: Tissue Value: Rosettes
  misc_feature: MA Experiment 20001905 PARAMETER Experiment Name: At_Drought_Reproduction_P Parameter: Treatment Value: Drought vs. No Drought
  misc_feature: MA Experiment ID: 20001911 Result: Down-regulated in Transcription
  misc_feature: MA Experiment 20001911 PARAMETER Experiment Name: At_Drought_Reproduction_P Parameter: Age (day) Value: 40
  misc_feature: MA Experiment 20001911 PARAMETER Experiment Name: At_Drought_Reproduction_P Parameter: Organism Value: A. thaliana
  misc_feature: MA Experiment 20001911 PARAMETER Experiment Name: At_Drought_Reproduction_P Parameter: Plant Line Value: WS
  misc_feature: MA Experiment 20001911 PARAMETER Experiment Name: At_Drought_Reproduction_P Parameter: Timepoint (day) Value: 10
  misc_feature: MA Experiment 20001911 PARAMETER Experiment Name: At_Drought_Reproduction_P Parameter: Tissue Value: Flowers
  misc_feature: MA Experiment 20001911 PARAMETER Experiment Name: At_Drought_Reproduction_P Parameter: Treatment Value: Drought vs. No Drought
aagagtagactagagtcttcttggttgtgatattcttttccaatttcgtaattttagaaaagctgtagaagatggcgagtgtgtcgtggcgggctgtggctgtagctatggtggtggtgttgctgtcattgcagtggtttgcaaaagggtacccggaagaagatttggtggtgaggctgccaggtcaaccaactgttgggttcaaacaatacgcaggttatgtcgatgtcgatgtgaaagctggtcggagtctgttctattactatgtggaggctgtgaaacaacctgactcaaagccattgaccctttggctcaatggaggtccaggttgttcttcaattggtggaggagctttcactgagttgggtccattttaccccactggcgatggccgtggccttcgtgttaactccatgtcttggaacaaagcgtcgcacctgctttttgtggagtcacctgctggagtaggatggtcttactctaataaaagctctgattacaacaccggggataagtctactgcaaacgatatgcttgtgttcttgttgagatggtttgagaagttcccaaagttgaagtctcgggatctctttcttactggcgaaagctatgcaggacattacatacctcaactggctgatgcgattctcagctacaattcacactcaagtggattcaaattcaacatcaaaggcgttgctattgggaatccacttctgaagcttgacagagacagtccagctacctacgagttcttctggtcgcatggcatgatctctgatgaactaaaactcacaatcacgagtcaatgtgactttgatgattacacatttgctagcccccataacgtaagcacggcctgcaatgaagctattagtgaaactgaaaacattatcactgagtatgtcaacaactatgatgttctcctcgatgtatgttatccgtctatcgtccagcaagagctgaggctcaagaaaatggctactaaaatgagcatgggagtggatgtgtgtatgacctatgaaagacggttctactttaatcttccagaggtacaaaaggcgcttcatgcgaaccgtactcatctgccttattcatggtcaatgtgcagcggcgtgttaaactactctgatatcgatgggaacatcgacatgcttccgattctgaagagaattatactgaacaaaactcctatttggatcttcagtggagatcaagattctgtagttccattcgggggttcaagaactctcgtaagagaacttgctcaagatctcaacttcaagacaacagttccctatggagcctggttccacaaaagccaggttggaggctgggccatagagtatggaaaactactgacgtttgcaacggtgagaggagcggctcatatggtaccgtatgcacagccctcacgagctctacatttgttcagtagctttgtaagtggccggagattacccaacaacacacattcttctactgatgaatgaaagagcagaggtatatcttttgtaagaaaaatgtagtttttgtatttaattgatctgtctcaggccttagattagtagagatagaaacatgtaaaagtttgtgttgtggtttggttggatcttcaagtgtagtttgttttagttatctcaaacgttgacaacaattctctttagttaattaatcttagttattgaat

SEQ ID NO: 77387 - protein, 473 aa, Arabidopsis thaliana
  peptide (1)..(473): Ceres Seq. ID no. 12576263
  misc_feature (1)..(473): Homolog of NCBI NO: 15238328 NR Description: serine carboxypeptidase II-like; protein id:
  misc_feature (4)..(473): Homolog of NCBI NO: 15224454 NR Description: putative serine carboxypeptidase II; protein id: [Arabidopsis thaliana] >gi|25289797|pir||D84503 probable serine
  misc_feature (1)..(467): Homolog of NCBI NO: 15238327 NR Description: serine carboxypeptidase-II like; protein id:
  misc_feature (4)..(303): Homolog of NCBI NO: 28393789 NR Description: putative serine carboxypeptidase II [Arabidopsis
  misc_feature (287)..(473): Homolog of NCBI NO: 28393789 NR Description: putative serine carboxypeptidase II [Arabidopsis
  misc_feature (1)..(467): Homolog of NCBI NO: 15218514 NR Description: serine carboxypeptidase II, putative; protein id:
  misc_feature (9)..(464): Homolog of NCBI NO: 30685740 NR Description: serine carboxypeptidase -related [Arabidopsis >gi|18377727|gb|AAL67013.1| putative serine carboxypeptidase II
  misc_feature (1)..(464): Homolog of NCBI NO: 18396647 NR Description: serine carboxypeptidase II, putative; protein id: supported by cDNA: gi_16648968 [Arabidopsis thaliana]
  misc_feature (9)..(464): Homolog of NCBI NO: 25289793 NR Description: probable serine carboxypeptidase II [imported] - thaliana >gi|2459435|gb|AAB80670.1| putative serine
  misc_feature (1)..(464): Homolog of NCBI NO: 25289785 NR Description: probable serine carboxypeptidase II [imported] - thaliana >gi|12322985|gb|AAG51475.1|AC069471_6 serine
MASVSWRAVAVAMVVVLLSLQWFAKGYPEEDLVVRLPGQPTVGFKQYAGYVDVDVKAGRSLFYYYVEAVKQPDSKPLTLWLNGGPGCSSIGGGAFTELGPFYPTGDGRGLRVNSMSWNKASHLLFVESPAGVGWSYSNKSSDYNTGDKSTANDMLVFLLRWFEKFPKLKSRDLFLTGESYAGHYIPQLADAILSYNSHSSGFKFNIKGVAIGNPLLKLDRDSPATYEFFWSHGMISDELKLTITSQCDFDDYTFASPHNVSTACNEAISETENIITEYVNNYDVLLDVCYPSIVQQELRLKKMATKMSMGVDVCMTYERRFYFNLPEVQKALHANRTHLPYSWSMCSGVLNYSDIDGNIDMLPILKRIILNKTPIWIFSGDQDSVVPFGGSRTLVRELAQDLNFKTTVPYGAWFHKSQVGGWAIEYGKLLTFATVRGAAHMVPYAQPSRALHLFSSFVSGRRLPNNTHSSTDE

SEQ ID NO: 77388 - protein, 461 aa, Arabidopsis thaliana
  peptide (1)..(461): Ceres Seq. ID no. 12576264
  misc_feature (1)..(461): Homolog of NCBI NO: 15238328 NR Description: serine carboxypeptidase II-like; protein id:
  misc_feature (1)..(461): Homolog of NCBI NO: 15224454 NR Description: putative serine carboxypeptidase II; protein id: [Arabidopsis thaliana] >gi|25289797|pir||D84503 probable serine
  misc_feature (1)..(455): Homolog of NCBI NO: 15238327 NR Description: serine carboxypeptidase-II like; protein id:
  misc_feature (1)..(291): Homolog of NCBI NO: 28393789 NR Description: putative serine carboxypeptidase II [Arabidopsis
  misc_feature (275)..(461): Homolog of NCBI NO: 28393789 NR Description: putative serine carboxypeptidase II [Arabidopsis
  misc_feature (1)..(455): Homolog of NCBI NO: 15218514 NR Description: serine carboxypeptidase II, putative; protein id:
  misc_feature (1)..(452): Homolog of NCBI NO: 30685740 NR Description: serine carboxypeptidase -related [Arabidopsis >gi|18377727|gb|AAL67013.1| putative serine carboxypeptidase II
  misc_feature (1)..(452): Homolog of NCBI NO: 18396647 NR Description: serine carboxypeptidase II, putative; protein id: supported by cDNA: gi_16648968 [Arabidopsis thaliana]
  misc_feature (1)..(452): Homolog of NCBI NO: 25289793 NR Description: probable serine carboxypeptidase II [imported] - thaliana >gi|2459435|gb|AAB80670.1| putative serine
  misc_feature (1)..(452): Homolog of NCBI NO: 25289785 NR Description: probable serine carboxypeptidase II [imported] - thaliana >gi|12322985|gb|AAG51475.1|AC069471_6 serine
MVVVLLSLQWFAKGYPEEDLVVRLPGQPTVGFKQYAGYVDVDVKAGRSLFYYYVEAVKQPDSKPLTLWLNGGPGCSSIGGGAFTELGPFYPTGDGRGLRVNSMSWNKASHLLFVESPAGVGWSYSNKSSDYNTGDKSTANDMLVFLLRWFEKFPKLKSRDLFLTGESYAGHYIPQLADAILSYNSHSSGFKFNIKGVAIGNPLLKLDRDSPATYEFFWSHGMISDELKLTITSQCDFDDYTFASPHNVSTACNEAISETENIITEYVNNYDVLLDVCYPSIVQQELRLKKMATKMSMGVDVCMTYERRFYFNLPEVQKALHANRTHLPYSWSMCSGVLNYSDIDGNIDMLPILKRIILNKTPIWIFSGDQDSVVPFGGSRTLVRELAQDLNFKTTVPYGAWFHKSQVGGWAIEYGKLLTFATVRGAAHMVPYAQPSRALHLFSSFVSGRRLPNNTHSSTDE

SEQ ID NO: 77389 - protein, 359 aa, Arabidopsis thaliana
  peptide (1)..(359): Ceres Seq. ID no. 12576265
  misc_feature (1)..(359): Homolog of NCBI NO: 15238328 NR Description: serine carboxypeptidase II-like; protein id:
  misc_feature (1)..(359): Homolog of NCBI NO: 15224454 NR Description: putative serine carboxypeptidase II; protein id: [Arabidopsis thaliana] >gi|25289797|pir||D84503 probable serine
  misc_feature (1)..(353): Homolog of NCBI NO: 15238327 NR Description: serine carboxypeptidase-II like; protein id:
  misc_feature (1)..(189): Homolog of NCBI NO: 28393789 NR Description: putative serine carboxypeptidase II [Arabidopsis
  misc_feature (173)..(359): Homolog of NCBI NO: 28393789 NR Description: putative serine carboxypeptidase II [Arabidopsis
  misc_feature (1)..(353): Homolog of NCBI NO: 15218514 NR Description: serine carboxypeptidase II, putative; protein id:
  misc_feature (1)..(350): Homolog of NCBI NO: 30685740 NR Description: serine carboxypeptidase -related [Arabidopsis >gi|18377727|gb|AAL67013.1| putative serine carboxypeptidase II
  misc_feature (1)..(350): Homolog of NCBI NO: 18396647 NR Description: serine carboxypeptidase II, putative; protein id: supported by cDNA: gi_16648968 [Arabidopsis thaliana]
  misc_feature (1)..(350): Homolog of NCBI NO: 25289793 NR Description: probable serine carboxypeptidase II [imported] - thaliana >gi|2459435|gb|AAB80670.1| putative serine
  misc_feature (1)..(350): Homolog of NCBI NO: 25289785 NR Description: probable serine carboxypeptidase II [imported] - thaliana >gi|12322985|gb|AAG51475.1|AC069471_6 serine
MSWNKASHLLFVESPAGVGWSYSNKSSDYNTGDKSTANDMLVFLLRWFEKFPKLKSRDLFLTGESYAGHYIPQLADAILSYNSHSSGFKFNIKGVAIGNPLLKLDRDSPATYEFFWSHGMISDELKLTITSQCDFDDYTFASPHNVSTACNEAISETENIITEYVNNYDVLLDVCYPSIVQQELRLKKMATKMSMGVDVCMTYERRFYFNLPEVQKALHANRTHLPYSWSMCSGVLNYSDIDGNIDMLPILKRIILNKTPIWIFSGDQDSVVPFGGSRTLVRELAQDLNFKTTVPYGAWFHKSQVGGWAIEYGKLLTFATVRGAAHMVPYAQPSRALHLFSSFVSGRRLPNNTHSSTDE

SEQ ID NO: 77390 - DNA, 1508 bp, Arabidopsis thaliana
  misc_feature (1)..(1508): Ceres Seq. ID no. 12576266
  misc_feature: MA Experiment ID: 108434 Result: Up-regulated in Transcription
  misc_feature: MA Experiment 108434 PARAMETER Experiment Name: At_Root_Tips_cDNA_P Parameter: Tissue Value: Root Tips
  misc_feature: MA Experiment ID: 108595 Result: Down-regulated in Transcription
  misc_feature: MA Experiment 108595 PARAMETER Experiment Name: At_Ler-pi_Ovule_cDNA_P Parameter: Plant Line Value: null
  misc_feature: MA Experiment ID: 20001911 Result: Down-regulated in Transcription
  misc_feature: MA Experiment 20001911 PARAMETER Experiment Name: At_Drought_Reproduction_P Parameter: Age (day) Value: 40
  misc_feature: MA Experiment 20001911 PARAMETER Experiment Name: At_Drought_Reproduction_P Parameter: Organism Value: A. thaliana
  misc_feature: MA Experiment 20001911 PARAMETER Experiment Name: At_Drought_Reproduction_P Parameter: Plant Line Value: WS
  misc_feature: MA Experiment 20001911 PARAMETER Experiment Name: At_Drought_Reproduction_P Parameter: Timepoint (day) Value: 10
  misc_feature: MA Experiment 20001911 PARAMETER Experiment Name: At_Drought_Reproduction_P Parameter: Tissue Value: Flowers
  misc_feature: MA Experiment 20001911 PARAMETER Experiment Name: At_Drought_Reproduction_P Parameter: Treatment Value: Drought vs. No Drought
agatgcagtcttcttcatcaatggaggtttttgattcgccccaagctctcgcgattcctgatgttcttcagtaatttcttgcaatccttataaacaaagagcgtggagaatcgtttcagaggaaagaaaactaaaaatggcgactcttttcaacaaatttcagcaggctgttggagttcttgccaagagtaccacatttgctaagaacccaaggcaactgcagtttgaagcagacgttaacaaactctttatgtatacaagctataaccggttgggacgagaagctgaggagactgatgcagaggagatcattgagatggctggtaaagccactttatctgagcagcagaagcaagttcaagagaacattcactaccaagttgaaaaattctgctctttgatggatggaatccttcttcctgatgttaggaggaacgagtcggggtcacaatcaacaagccctcgtcctcctcgtagaagtggtcttactttcgccattggtagtaataatgcttttccacatgcagatcagccccttgttcccgagacaaagcctttgaaactcaatgacgtctcacagagattaatggatcaaatgggttacaccctcgagaccaaaccgtctgtaatacctcacaaagacgctggtcaaggttgttttatcaaaggcgaggcagatgttggaaccgtcttagccttttaccctggagttatttactctcctgctttctacaagtacatacccgggtacccgaaggttgattcacagaactcatatctcatcaccaggtatgatgggactgtaataaatgctcaaccttggggtcttgggggagaatcaagggaagcatggaacgggtcctacacacctgcggtcaaagcaaacaccaaaaccgcagaaaacgggtcagacaggttatggaaagcgttgagcaagcctctcgaaggttcgggtaaaggaaaagaggttcttgagaggagaaatccgttggcttttggtcacttagctaaccacccagcgaaagagatgactccaaacgttatgatatgtccttatgacttccctttgatggcgaaagatctgcggccttacattccgaatatatcttttggggattctggagaaataaagatgaaaagatttggaagtttctggtttaagacagggagtaaaaacgggttagaagctccggttctgaagacactggtcttggtggcaacgaggtcgttgtgtaatgaggaacttttgctgaattacaggctgagcaactctaagagacgaccagattggtatactccggttaacgaggaggaagataggagaagatggagctaaatttctcttttatgttttaatgaaacttgaaaggctctgtttcaaaacatgctcctcggttttctttagactattagcgggacgtcgtttcgctgattgtgtcactatttttgtttttcgattatttttggaagacattttattctaatattttatgttgttctgttgttac

SEQ ID NO: 77391 - protein, 399 aa, Arabidopsis thaliana; identical to SEQ ID NO: 42747
  peptide (1)..(399): Ceres Seq. ID no. 12576267
  misc_feature (1)..(399): Homolog of NCBI NO: 10177809 NR Description: gene_id:MKD15.6~unknown protein [Arabidopsis
  misc_feature (1)..(399): Homolog of NCBI NO: 22327005 NR Description: unknown protein; protein id: At5g23200.1, by cDNA: gi_18491156, supported by cDNA: gi_20258932 [Arabidopsis >gi|18491157|gb|AAL69481.1| unknown protein [Arabidopsis
  misc_feature (1)..(391): Homolog of NCBI NO: 15241572 NR Description: hypothetical protein (fragment at BAC end);
  misc_feature (1)..(391): Homolog of NCBI NO: 26453064 NR Description: unknown protein [Arabidopsis thaliana]
  misc_feature (1)..(330): Homolog of NCBI NO: 11358190 NR Description: hypothetical protein T22D6.210 - Arabidopsis (fragment) >gi|8346564|emb|CAB93728.1| hypothetical protein

SEQ ID NO: 77392 - protein, 361 aa, Arabidopsis thaliana; identical to SEQ ID NO: 42748
  peptide (1)..(361): Ceres Seq. ID no. 12576268
  misc_feature (1)..(361): Homolog of NCBI NO: 10177809 NR Description: gene_id:MKD15.6~unknown protein [Arabidopsis
  misc_feature (1)..(361): Homolog of NCBI NO: 22327005 NR Description: unknown protein; protein id: At5g23200.1, by cDNA: gi_18491156, supported by cDNA: gi_20258932 [Arabidopsis >gi|18491157|gb|AAL69481.1| unknown protein [Arabidopsis
  misc_feature (1)..(353): Homolog of NCBI NO: 15241572 NR Description: hypothetical protein (fragment at BAC end);
  misc_feature (1)..(353): Homolog of NCBI NO: 26453064 NR Description: unknown protein [Arabidopsis thaliana]
  misc_feature (1)..(292): Homolog of NCBI NO: 11358190 NR Description: hypothetical protein T22D6.210 - Arabidopsis (fragment) >gi|8346564|emb|CAB93728.1| hypothetical protein

SEQ ID NO: 77393 - protein, 339 aa, Arabidopsis thaliana; identical to SEQ ID NO: 42749
  peptide (1)..(339): Ceres Seq. ID no. 12576269
  misc_feature (1)..(339): Homolog of NCBI NO: 10177809 NR Description: gene_id:MKD15.6~unknown protein [Arabidopsis
  misc_feature (1)..(339): Homolog of NCBI NO: 22327005 NR Description: unknown protein; protein id: At5g23200.1, by cDNA: gi_18491156, supported by cDNA: gi_20258932 [Arabidopsis >gi|18491157|gb|AAL69481.1| unknown protein [Arabidopsis
  misc_feature (1)..(331): Homolog of NCBI NO: 15241572 NR Description: hypothetical protein (fragment at BAC end);
  misc_feature (1)..(331): Homolog of NCBI NO: 26453064 NR Description: unknown protein [Arabidopsis thaliana]
  misc_feature (1)..(270): Homolog of NCBI NO: 11358190 NR Description: hypothetical protein T22D6.210 - Arabidopsis (fragment) >gi|8346564|emb|CAB93728.1| hypothetical protein

SEQ ID NO: 77394 - DNA, 1164 bp, Arabidopsis thaliana
  misc_feature (1)..(1164): Ceres Seq. ID no. 12576285
  misc_feature: MA Experiment ID: 108461 Result: Up-regulated in Transcription
  misc_feature: MA Experiment 108461 PARAMETER Experiment Name: At_Germinating_Seeds_cDNA_P Parameter: Age (day) Value: 1 vs. 0
  misc_feature: MA Experiment 108461 PARAMETER Experiment Name: At_Germinating_Seeds_cDNA_P Parameter: Tissue Value: Germinating Seeds
  misc_feature: MA Experiment ID: 108462 Result: Up-regulated in Transcription
  misc_feature: MA Experiment 108462 PARAMETER Experiment Name: At_Germinating_Seeds_cDNA_P Parameter: Age (day) Value: 2 vs. 0
  misc_feature: MA Experiment 108462 PARAMETER Experiment Name: At_Germinating_Seeds_cDNA_P Parameter: Tissue Value: Germinating Seeds
  misc_feature: MA Experiment ID: 108464 Result: Up-regulated in Transcription
  misc_feature: MA Experiment 108464 PARAMETER Experiment Name: At_Germinating_Seeds_cDNA_P Parameter: Age (day) Value: 4 vs. 0
  misc_feature: MA Experiment 108464 PARAMETER Experiment Name: At_Germinating_Seeds_cDNA_P Parameter: Tissue Value: Germinating Seeds
  misc_feature: MA Experiment ID: 108569 Result: Up-regulated in Transcription
  misc_feature: MA Experiment 108569 PARAMETER Experiment Name: At_0.001%_MeJA__cDNA_P Parameter: Timepoint (hr) Value: 6
  misc_feature: MA Experiment 108569 PARAMETER Experiment Name: At_0.001%_MeJA__cDNA_P Parameter: Tissue Value: Aerial
  misc_feature: MA Experiment 108569 PARAMETER Experiment Name: At_0.001%_MeJA__cDNA_P Parameter: Treatment Value: 0.001% MeJA vs. No Treatment
  misc_feature: MA Experiment ID: 108573 Result: Up-regulated in Transcription
  misc_feature: MA Experiment 108573 PARAMETER Experiment Name: At_Drought_cDNA_P Parameter: Timepoint (hr) Value: 6
  misc_feature: MA Experiment 108573 PARAMETER Experiment Name: At_Drought_cDNA_P Parameter: Tissue Value: Aerial
  misc_feature: MA Experiment 108573 PARAMETER Experiment Name: At_Drought_cDNA_P Parameter: Treatment Value: Drought vs. No Drought
  misc_feature: MA Experiment ID: 108579 Result: Down-regulated in Transcription
  misc_feature: MA Experiment 108579 PARAMETER Experiment Name: At_4deg_Cold_cDNA_P Parameter: Temperature (deg C) Value: 4 vs. 22
  misc_feature: MA Experiment 108579 PARAMETER Experiment Name: At_4deg_Cold_cDNA_P Parameter: Timepoint (hr) Value: 6
  misc_feature: MA Experiment 108579 PARAMETER Experiment Name: At_4deg_Cold_cDNA_P Parameter: Tissue Value: Aerial
  misc_feature: MA Experiment ID: 108595 Result: Down-regulated in Transcription
  misc_feature: MA Experiment 108595 PARAMETER Experiment Name: At_Ler-pi_Ovule_cDNA_P Parameter: Plant Line Value: null
  misc_feature: MA Experiment ID: 20000087 Result: Down-regulated in Transcription
  misc_feature: MA Experiment 20000087 PARAMETER Experiment Name: At_100uM_ABA_Mutants_cDNA_P Parameter: Plant Line Value: WS
  misc_feature: MA Experiment 20000087 PARAMETER Experiment Name: At_100uM_ABA_Mutants_cDNA_P Parameter: Timepoint (hr) Value: 6
  misc_feature: MA Experiment 20000087 PARAMETER Experiment Name: At_100uM_ABA_Mutants_cDNA_P Parameter: Tissue Value: Aerial
  misc_feature: MA Experiment 20000087 PARAMETER Experiment Name: At_100uM_ABA_Mutants_cDNA_P Parameter: Treatment Value: 100uM ABA vs. No Treatment
  misc_feature: MA Experiment ID: 20000224 Result: Down-regulated in Transcription
  misc_feature: MA Experiment ID: 20000437 Result: Down-regulated in Transcription
  misc_feature: MA Experiment 20000437 PARAMETER Experiment Name: At_Drought_P Parameter: Age (day) Value: 8
  misc_feature: MA Experiment 20000437 PARAMETER Experiment Name: At_Drought_P Parameter: Organism Value: A. thaliana
  misc_feature: MA Experiment 20000437 PARAMETER Experiment Name: At_Drought_P Parameter: Plant Line Value: WS
  misc_feature: MA Experiment 20000437 PARAMETER Experiment Name: At_Drought_P Parameter: Timepoint (hr) Value: 24
  misc_feature: MA Experiment 20000437 PARAMETER Experiment Name: At_Drought_P Parameter: Tissue Value: Whole Plant
  misc_feature: MA Experiment 20000437 PARAMETER Experiment Name: At_Drought_P Parameter: Treatment Value: Drought vs. No Drought
  misc_feature: MA Experiment ID: 20001247 Result: Up-regulated in Transcription
  misc_feature: MA Experiment 20001247 PARAMETER Experiment Name: At_Far-red-induction_P Parameter: Age (day) Value: 7
  misc_feature: MA Experiment 20001247 PARAMETER Experiment Name: At_Far-red-induction_P Parameter: Light Value: Far-red vs. White
  misc_feature: MA Experiment 20001247 PARAMETER Experiment Name: At_Far-red-induction_P Parameter: Organism Value: A. thaliana
  misc_feature: MA Experiment 20001247 PARAMETER Experiment Name: At_Far-red-induction_P Parameter: Plant Line Value: Columbia
  misc_feature: MA Experiment 20001247 PARAMETER Experiment Name: At_Far-red-induction_P Parameter: Timepoint (hr) Value: 1
  misc_feature: MA Experiment 20001247 PARAMETER Experiment Name: At_Far-red-induction_P Parameter: Tissue Value: Whole Plant
  misc_feature: MA Experiment ID: 20001248 Result: Up-regulated in Transcription
  misc_feature: MA Experiment 20001248 PARAMETER Experiment Name: At_Far-red-induction_P Parameter: Age (day) Value: 7
  misc_feature: MA Experiment 20001248 PARAMETER Experiment Name: At_Far-red-induction_P Parameter: Light Value: Far-red vs. White
  misc_feature: MA Experiment 20001248 PARAMETER Experiment Name: At_Far-red-induction_P Parameter: Organism Value: A. thaliana
  misc_feature: MA Experiment 20001248 PARAMETER Experiment Name: At_Far-red-induction_P Parameter: Plant Line Value: Columbia
  misc_feature: MA Experiment 20001248 PARAMETER Experiment Name: At_Far-red-induction_P Parameter: Timepoint (hr) Value: 4
  misc_feature: MA Experiment 20001248 PARAMETER Experiment Name: At_Far-red-induction_P Parameter: Tissue Value: Whole Plant
  misc_feature: MA Experiment ID: 20001450 Result: Up-regulated in Transcription
  misc_feature: MA Experiment 20001450 PARAMETER Experiment Name: At_Far-red-induction_P Parameter: Age (day) Value: 7
  misc_feature: MA Experiment 20001450 PARAMETER Experiment Name: At_Far-red-induction_P Parameter: Light Value: Far-red vs. White
  misc_feature: MA Experiment 20001450 PARAMETER Experiment Name: At_Far-red-induction_P Parameter: Organism Value: A. thaliana
  misc_feature: MA Experiment 20001450 PARAMETER Experiment Name: At_Far-red-induction_P Parameter: Plant Line Value: Columbia
  misc_feature: MA Experiment 20001450 PARAMETER Experiment Name: At_Far-red-induction_P Parameter: Timepoint (hr) Value: 8
  misc_feature: MA Experiment 20001450 PARAMETER Experiment Name: At_Far-red-induction_P Parameter: Tissue Value: Whole Plant
  misc_feature: MA Experiment ID: 20001451 Result: Up-regulated in Transcription
  misc_feature: MA Experiment 20001451 PARAMETER Experiment Name: At_Far-red-induction_P Parameter: Age (day) Value: 7
  misc_feature: MA Experiment 20001451 PARAMETER Experiment Name: At_Far-red-induction_P Parameter: Light Value: Far-red vs. White
  misc_feature: MA Experiment 20001451 PARAMETER Experiment Name: At_Far-red-induction_P Parameter: Organism Value: A. thaliana
  misc_feature: MA Experiment 20001451 PARAMETER Experiment Name: At_Far-red-induction_P Parameter: Plant Line Value: Columbia
  misc_feature: MA Experiment 20001451 PARAMETER Experiment Name: At_Far-red-induction_P Parameter: Timepoint (hr) Value: 24
  misc_feature: MA Experiment 20001451 PARAMETER Experiment Name: At_Far-red-induction_P Parameter: Tissue Value: Whole Plant
  misc_feature: MA Experiment ID: 20001554 Result: Down-regulated in Transcription
  misc_feature: MA Experiment 20001554 PARAMETER Experiment Name: At_Drought_Soil_Dry_P Parameter: Age (day) Value: 21
  misc_feature: MA Experiment 20001554 PARAMETER Experiment Name: At_Drought_Soil_Dry_P Parameter: Organism Value: A. thaliana
  misc_feature: MA Experiment 20001554 PARAMETER Experiment Name: At_Drought_Soil_Dry_P Parameter: Plant Line Value: WS
  misc_feature: MA Experiment 20001554 PARAMETER Experiment Name: At_Drought_Soil_Dry_P Parameter: Post Timepoint (hr) Value: None
  misc_feature: MA Experiment 20001554 PARAMETER Experiment Name: At_Drought_Soil_Dry_P Parameter: Post-Treatment Value: None
  misc_feature: MA Experiment 20001554 PARAMETER Experiment Name: At_Drought_Soil_Dry_P Parameter: Timepoint (day) Value: 7
  misc_feature: MA Experiment 20001554 PARAMETER Experiment Name: At_Drought_Soil_Dry_P Parameter: Treatment Value: Drought vs. No Drought
  misc_feature: MA Experiment ID: 20001555 Result: Down-regulated in Transcription
  misc_feature: MA Experiment 20001555 PARAMETER Experiment Name: At_Drought_Soil_Dry_P Parameter: Age (day) Value: 24
  misc_feature: MA Experiment 20001555 PARAMETER Experiment Name: At_Drought_Soil_Dry_P Parameter: Organism Value: A. thaliana
  misc_feature: MA Experiment 20001555 PARAMETER Experiment Name: At_Drought_Soil_Dry_P Parameter: Plant Line Value: WS
  misc_feature: MA Experiment 20001555 PARAMETER Experiment Name: At_Drought_Soil_Dry_P Parameter: Post Timepoint (hr) Value: None
  misc_feature: MA Experiment 20001555 PARAMETER Experiment Name: At_Drought_Soil_Dry_P Parameter: Post-Treatment Value: None
  misc_feature: MA Experiment 20001555 PARAMETER Experiment Name: At_Drought_Soil_Dry_P Parameter: Timepoint (day) Value: 10
  misc_feature: MA Experiment 20001555 PARAMETER Experiment Name: At_Drought_Soil_Dry_P Parameter: Treatment Value: Drought vs. No Drought
  misc_feature: MA Experiment ID: 20001556 Result: Down-regulated in Transcription
  misc_feature: MA Experiment 20001556 PARAMETER Experiment Name: At_Drought_Soil_Dry_P Parameter: Age (day) Value: 26
  misc_feature: MA Experiment 20001556 PARAMETER Experiment Name: At_Drought_Soil_Dry_P Parameter: Organism Value: A. thaliana
  misc_feature: MA Experiment 20001556 PARAMETER Experiment Name: At_Drought_Soil_Dry_P Parameter: Plant Line Value: WS
  misc_feature: MA Experiment 20001556 PARAMETER Experiment Name: At_Drought_Soil_Dry_P Parameter: Post Timepoint (hr) Value: None
  misc_feature: MA Experiment 20001556 PARAMETER Experiment Name: At_Drought_Soil_Dry_P Parameter: Post-Treatment Value: None
  misc_feature: MA Experiment 20001556 PARAMETER Experiment Name: At_Drought_Soil_Dry_P Parameter: Timepoint (day) Value: 12
  misc_feature: MA Experiment 20001556 PARAMETER Experiment Name: At_Drought_Soil_Dry_P Parameter: Treatment Value: Drought vs. No Drought
ctattcttctcgacgacgaaagaaaacaccgaagcaacgaggaagaagaagattataatctaatctctccttcgtgtagtttagcgaagagtgatgcgattttcttctggcggtgtttgatttcgtattctcgagttgttgtgggggagagattgattagaattagagatgatgagtttcgtgatttcagatgaatttctggggacatttgtgccgattctggtgtattgggtgtattcagggatgtacatttgcttaggatctttggataaatatagattgcattcgaagatagatgaggatgagaagaatctcgtttctaaatctgccgtcgttaagggcgttcttcttcaacagactcttcaggctattatctccgttattctcttcaagataacaggaagtgatgcagatgctgctacgacacagcaattttccattctacttctggctaggcagtttatcatcgctatgcttgtaattgacacttggcaatatttcattcatcgatatatgcacctcaacaagttcttatacaagcacatccactctcagcatcatcgccttattgtgccttattcgtatggagctctatacaaccatccactagaaggtcttctcttggacactattggtggtgctttgtctttcctcttctctggtatgtccccaagaacagccatctttttcttctccttcgctaccatcaaaacagtagatgatcattgtggactatggcttccgggaaatccatttcacatcttcttcagtaataactctgcttaccatgatgttcaccaccaactctatggaaccaaatacaacttctcgcagccattctttgttatgtgggataggattctcggcacttacttgccttattcattggagaaaagagccaatggaggatttgaaacacggccaatcaaagtatccaaagatgagtaatttctctttctttcttttggggcttcttgtcaatgctaagtcatcattttgctcgttagagaaccactgtaacctttgcgtacttgtaattgtacatacaattccaatctatccttttttcgatctgcgggcatatgtttctgtgtaagccagcagtaaatttatcttgtaatagccaaaacttcagatcttctctgttattattatctgctttat

SEQ ID NO: 77395 - protein, 259 aa, Arabidopsis thaliana
  peptide (1)..(259): Ceres Seq. ID no. 12576286
  misc_feature (1)..(259): Homolog of NCBI NO: 18394095 NR Description: acid phosphatase, putative; protein id: supported by cDNA: gi_13605749 [Arabidopsis thaliana] At1g14290/F14L17_4 [Arabidopsis thaliana]
  misc_feature (2)..(259): Homolog of NCBI NO: 25511716 NR Description: F14L17.5 protein - Arabidopsis thaliana Contains similarity to acid phosphatase from Lupinus albus and contains a Sterol desaturase PF|01598 domain. EST gb|AI995340
  misc_feature (1)..(259): Homolog of NCBI NO: 22330531 NR Description: acid phosphatase, putative; protein id: supported by cDNA: gi_17979534 [Arabidopsis thaliana] At1g69640/F24J1.22 [Arabidopsis thaliana]
  misc_feature (2)..(259): Homolog of NCBI NO: 25404823 NR Description: probable sterol desaturase T6C23.16 [imported] -
  misc_feature (11)..(254): Homolog of NCBI NO: 34913184 NR Description: similar to acid phosphatase [Oryza sativa
  misc_feature (34)..(199): Homolog of NCBI NO: 5360721 NR Description: acid phosphatase [Lupinus albus]
  misc_feature (81)..(253): Homolog of NCBI NO: 34911990 NR Description: P0694A04.28 [Oryza sativa (japonica
  misc_feature (2)..(82): Homolog of NCBI NO: 34911990 NR Description: P0694A04.28 [Oryza sativa (japonica
  misc_feature (89)..(237): Homolog of NCBI NO: 19113281 NR Description: hypothetical integral membrane protein, putative in lipid metabolism [Schizosaccharomyces pombe]
  misc_feature (16)..(78): Homolog of NCBI NO: 19113281 NR Description: hypothetical integral membrane protein, putative in lipid metabolism [Schizosaccharomyces pombe]
MMSFVISDEFLGTFVPILVYWVYSGMYICLGSLDKYRLHSKIDEDEKNLVSKSAVVKGVLLQQTLQAIISVILFKITGSDADAATTQQFSILLLARQFIIAMLVIDTWQYFIHRYMHLNKFLYKHIHSQHHRLIVPYSYGALYNHPLEGLLLDTIGGALSFLFSGMSPRTAIFFFSFATIKTVDDHCGLWLPGNPFHIFFSNNSAYHDVHHQLYGTKYNFSQPFFVMWDRILGTYLPYSLEKRANGGFETRPIKVSKDE

SEQ ID NO: 77396 - protein, 258 aa, Arabidopsis thaliana
  peptide (1)..(258): Ceres Seq. ID no. 12576287
  misc_feature (1)..(258): Homolog of NCBI NO: 18394095 NR Description: acid phosphatase, putative; protein id: supported by cDNA: gi_13605749 [Arabidopsis thaliana] At1g14290/F14L17_4 [Arabidopsis thaliana]
  misc_feature (1)..(258): Homolog of NCBI NO: 25511716 NR Description: F14L17.5 protein - Arabidopsis thaliana Contains similarity to acid phosphatase from Lupinus albus and contains a Sterol desaturase PF|01598 domain. EST gb|AI995340
  misc_feature (1)..(258): Homolog of NCBI NO: 22330531 NR Description: acid phosphatase, putative; protein id: supported by cDNA: gi_17979534 [Arabidopsis thaliana] At1g69640/F24J1.22 [Arabidopsis thaliana]
  misc_feature (1)..(258): Homolog of NCBI NO: 25404823 NR Description: probable sterol desaturase T6C23.16 [imported] -
  misc_feature (10)..(253): Homolog of NCBI NO: 34913184 NR Description: similar to acid phosphatase [Oryza sativa
  misc_feature (33)..(198): Homolog of NCBI NO: 5360721 NR Description: acid phosphatase [Lupinus albus]
  misc_feature (80)..(252): Homolog of NCBI NO: 34911990 NR Description: P0694A04.28 [Oryza sativa (japonica
  misc_feature (1)..(81): Homolog of NCBI NO: 34911990 NR Description: P0694A04.28 [Oryza sativa (japonica
  misc_feature (88)..(236): Homolog of NCBI NO: 19113281 NR Description: hypothetical integral membrane protein, putative in lipid metabolism [Schizosaccharomyces pombe]
  misc_feature (15)..(77): Homolog of NCBI NO: 19113281 NR Description: hypothetical integral membrane protein, putative in lipid metabolism [Schizosaccharomyces pombe]
MSFVISDEFLGTFVPILVYWVYSGMYICLGSLDKYRLHSKIDEDEKNLVSKSAVVKGVLLQQTLQAIISVILFKITGSDADAATTQQFSILLLARQFIIAMLVIDTWQYFIHRYMHLNKFLYKHIHSQHHRLIVPYSYGALYNHPLEGLLLDTIGGALSFLFSGMSPRTAIFFFSFATIKTVDDHCGLWLPGNPFHIFFSNNSAYHDVHHQLYGTKYNFSQPFFVMWDRILGTYLPYSLEKRANGGFETRPIKVSKDE

SEQ ID NO: 77397 - protein, 234 aa, Arabidopsis thaliana
  peptide (1)..(234): Ceres Seq. ID no. 12576288
  misc_feature (1)..(234): Homolog of NCBI NO: 18394095 NR Description: acid phosphatase, putative; protein id: supported by cDNA: gi_13605749 [Arabidopsis thaliana] At1g14290/F14L17_4 [Arabidopsis thaliana]
  misc_feature (1)..(234): Homolog of NCBI NO: 25511716 NR Description: F14L17.5 protein - Arabidopsis thaliana Contains similarity to acid phosphatase from Lupinus albus and contains a Sterol desaturase PF|01598 domain. EST gb|AI995340
  misc_feature (1)..(234): Homolog of NCBI NO: 22330531 NR Description: acid phosphatase, putative; protein id: supported by cDNA: gi_17979534 [Arabidopsis thaliana] At1g69640/F24J1.22 [Arabidopsis thaliana]
  misc_feature (1)..(234): Homolog of NCBI NO: 25404823 NR Description: probable sterol desaturase T6C23.16 [imported] -
  misc_feature (1)..(229): Homolog of NCBI NO: 34913184 NR Description: similar to acid phosphatase [Oryza sativa
  misc_feature (9)..(174): Homolog of NCBI NO: 5360721 NR Description: acid phosphatase [Lupinus albus]
  misc_feature (56)..(228): Homolog of NCBI NO: 34911990 NR Description: P0694A04.28 [Oryza sativa (japonica
  misc_feature (1)..(57): Homolog of NCBI NO: 34911990 NR Description: P0694A04.28 [Oryza sativa (japonica
  misc_feature (64)..(212): Homolog of NCBI NO: 19113281 NR Description: hypothetical integral membrane protein, putative in lipid metabolism [Schizosaccharomyces pombe]
  misc_feature (1)..(53): Homolog of NCBI NO: 19113281 NR Description: hypothetical integral membrane protein, putative in lipid metabolism [Schizosaccharomyces pombe]
MYICLGSLDKYRLHSKIDEDEKNLVSKSAVVKGVLLQQTLQAIISVILFKITGSDADAATTQQFSILLLARQFIIAMLVIDTWQYFIHRYMHLNKFLYKHIHSQHHRLIVPYSYGALYNHPLEGLLLDTIGGALSFLFSGMSPRTAIFFFSFATIKTVDDHCGLWLPGNPFHIFFSNNSAYHDVHHQLYGTKYNFSQPFFVMWDRILGTYLPYSLEKRANGGFETRPIKVSKDE

SEQ ID NO: 77398 - DNA, 1744 bp, Arabidopsis thaliana
  misc_feature (1)..(1744): Ceres Seq. ID no. 12576289
  misc_feature: MA Experiment ID: 20000185 Result: Down-regulated in Transcription
  misc_feature: MA Experiment 20000185 PARAMETER Experiment Name: At_Roots__P Parameter: Age (day) Value: 7 vs. 21
  misc_feature: MA Experiment 20000185 PARAMETER Experiment Name: At_Roots__P Parameter: Organism Value: A. thaliana
  misc_feature: MA Experiment 20000185 PARAMETER Experiment Name: At_Roots__P Parameter: Tissue Value: Roots vs. Whole Plant
  misc_feature: MA Experiment ID: 20000308 Result: Down-regulated in Transcription
  misc_feature: MA Experiment 20000308 PARAMETER Experiment Name: At_100mM_NaCl__P Parameter: Age (day) Value: 17
  misc_feature: MA Experiment 20000308 PARAMETER Experiment Name: At_100mM_NaCl__P Parameter: Organism Value: A. thaliana
  misc_feature: MA Experiment 20000308 PARAMETER Experiment Name: At_100mM_NaCl__P Parameter: Plant Line Value: WS
  misc_feature: MA Experiment 20000308 PARAMETER Experiment Name: At_100mM_NaCl__P Parameter: Timepoint (hr) Value: 72
  misc_feature: MA Experiment 20000308 PARAMETER Experiment Name: At_100mM_NaCl__P Parameter: Tissue Value: Whole Plant
  misc_feature: MA Experiment 20000308 PARAMETER Experiment Name: At_100mM_NaCl__P Parameter: Treatment Value: 100mM NaCl vs. No Treatment
  misc_feature: MA Experiment ID: 20000436 Result: Down-regulated in Transcription
  misc_feature: MA Experiment 20000436 PARAMETER Experiment Name: At_Drought_P Parameter: Age (day) Value: 7
  misc_feature: MA Experiment 20000436 PARAMETER Experiment Name: At_Drought_P Parameter: Organism Value: A. thaliana
  misc_feature: MA Experiment 20000436 PARAMETER Experiment Name: At_Drought_P Parameter: Plant Line Value: WS
  misc_feature: MA Experiment 20000436 PARAMETER Experiment Name: At_Drought_P Parameter: Timepoint (hr) Value: 12
  misc_feature: MA Experiment 20000436 PARAMETER Experiment Name: At_Drought_P Parameter: Tissue Value: Whole Plant
  misc_feature: MA Experiment 20000436 PARAMETER Experiment Name: At_Drought_P Parameter: Treatment Value: Drought vs. No Drought
  misc_feature: MA Experiment ID: 20000438 Result: Up-regulated in Transcription
  misc_feature: MA Experiment 20000438 PARAMETER Experiment Name: At_Shoots__P Parameter: Age (day) Value: 14
  misc_feature: MA Experiment 20000438 PARAMETER Experiment Name: At_Shoots__P Parameter: Tissue Value: Shoots vs. Whole Plant
  misc_feature: MA Experiment ID: 20000439 Result: Down-regulated in Transcription
  misc_feature: MA Experiment 20000439 PARAMETER Experiment Name: At_Roots__P Parameter: Age (day) Value: 14 vs. 21
  misc_feature: MA Experiment 20000439 PARAMETER Experiment Name: At_Roots__P Parameter: Organism Value: A. thaliana
  misc_feature: MA Experiment 20000439 PARAMETER Experiment Name: At_Roots__P Parameter: Tissue Value: Roots vs. Whole Plant
  misc_feature: MA Experiment ID: 20001248 Result: Down-regulated in Transcription
  misc_feature: MA Experiment 20001248 PARAMETER Experiment Name: At_Far-red-induction_P Parameter: Age (day) Value: 7
  misc_feature: MA Experiment 20001248 PARAMETER Experiment Name: At_Far-red-induction_P Parameter: Light Value: Far-red vs. White
  misc_feature: MA Experiment 20001248 PARAMETER Experiment Name: At_Far-red-induction_P Parameter: Organism Value: A. thaliana
  misc_feature: MA Experiment 20001248 PARAMETER Experiment Name: At_Far-red-induction_P Parameter: Plant Line Value: Columbia
  misc_feature: MA Experiment 20001248 PARAMETER Experiment Name: At_Far-red-induction_P Parameter: Timepoint (hr) Value: 4
  misc_feature: MA Experiment 20001248 PARAMETER Experiment Name: At_Far-red-induction_P Parameter: Tissue Value: Whole Plant
  misc_feature: MA Experiment ID: 20001557 Result: Down-regulated in Transcription
  misc_feature: MA Experiment 20001557 PARAMETER Experiment Name: At_Drought_Soil_Dry_P Parameter: Age (day) Value: 27
  misc_feature: MA Experiment 20001557 PARAMETER Experiment Name: At_Drought_Soil_Dry_P Parameter: Organism Value: A. thaliana
  misc_feature: MA Experiment 20001557 PARAMETER Experiment Name: At_Drought_Soil_Dry_P Parameter: Plant Line Value: WS
  misc_feature: MA Experiment 20001557 PARAMETER Experiment Name: At_Drought_Soil_Dry_P Parameter: Post Timepoint (hr) Value: 3
  misc_feature: MA Experiment 20001557 PARAMETER Experiment Name: At_Drought_Soil_Dry_P Parameter: Post-Treatment Value: Re-Water vs. No Drought
  misc_feature: MA Experiment 20001557 PARAMETER Experiment Name: At_Drought_Soil_Dry_P Parameter: Timepoint (day) Value: 13
  misc_feature: MA Experiment 20001557 PARAMETER Experiment Name: At_Drought_Soil_Dry_P Parameter: Treatment Value: Drought vs. No Drought
agattttggttttgtgttgagaacaactccaaagagacgagaagcagcgaatcgtacgagcagagagatatatgtttcattacgtcgatgatggattctgctttatatcatcctcgaatctttttcgctcacagcttcatcaatggcttgtatagttctcctaggtttgctaatacttgctggagattggttagtcgttcaagttgggagatcaaggctagtgagaatagtgatcgcaatgtgttcgatgaaaatcctgttaggaaaaccgacgggtcgttgtttgattctgcttcgtttgagacagttgacgcggaaatcacgcctgagactgatgatttcttcgtgagtgacgcagagggtgatccagattgtcctactcaaggttattcctctattgaacttgctcttcaagctctacgcaaaggaaagtttgtgatcgttgttgacgatgaaaccggagatgttgaagggaatctgatcatggctgcaactcttacgagtccaaaagacatagcttttctgattaagaatggttcaggtattgtctcagttggtatgaagaaagaaaaccttgaaagattaagccttacacttatgtcacctgaaatggaagacgaagattcctctgctccaactttcaccatcactgtggatgcaaaatctggaacatcaactggagtatcagcttcagacagggcgatgacggttcttgcactttcgtctctcgatgctaaaccagatgatttcaggaggcctggtcatgtattccctctcaagtacagagatggtggagttttaaggagagctggtcacaccgaagcttcagtggatctaatgatattggctggtttacgtcccctctctgttctttcagctattcttgatcaagaagatgggtctatggcttcactgccgtatatgaaaaagcttgctacggaacatgatatccccattgtatcgttgactgatttaatcagatatcgaagaaagcgagataagcttgttgagagaatcacagtgtctcgtttgcctaccaaatggggtcttttccaagcttattgttatcgatctaaactcgatggaaccgaaaatatcgccctcgttaagggaaacgttggaaatggtgaggacattctggtgcgagtgcattcagagtgcttgacaggagacatttttggctcagcacggtgtgactgtggaaaccaattggacttagccatggagttaatcgagaaagagggaagaggagttgttgtgtatctccgtggccacgaaggaagaggcattggccttggtcacaagcttagagcttataacttgcaggacgaaggacacgacactgttcaggccaatgttgaacttggcctatccattgattctcgtgaatacggtatcggtgctcagatgctacgagacataggagtgagaacaatgagactaatgacgaataaccctgccaaattcactggtctgaaagggtacggactcgctgtagttggccgtgtgccggtggtgacaccaatcaccaaggagaacagaagatatatggagaccaaacgcaagaagatgggtcacatttatatctctgataacaacgatcagccattagcttgacccaaaagcttttgatagaaacacacacttttgaattttgtatttataaattgattcattcttatgtaatcatcaaccacaattactttttttctggaagatttgacataaaatcgaattatagttt

SEQ ID NO: 77399 - protein, 538 aa, Arabidopsis thaliana
  peptide (1)..(538): Ceres Seq. ID no. 12576290
  misc_feature (133)..(331): Pfam Name: 3,4-dihydroxy-2-butanone 4-phosphate synthase Pfam Description: 3,4-dihydroxy-2-butanone 4-phosphate synthase
  misc_feature (30)..(538): Homolog of NCBI NO: 18424277 NR Description: GTP cyclohydrolase II /
  misc_feature (98)..(531): Homolog of NCBI NO: 29367375 NR Description: GTP cyclohydrolase
  misc_feature (96)..(528): Homolog of NCBI NO: 27735197 NR Description: Riboflavin biosynthesis protein ribA [Includes:
  misc_feature (96)..(528): Homolog of NCBI NO: 7436011 NR Description: GTP cyclohydrolase II (EC 3.5.4.25) / 3,
  misc_feature (162)..(528): Homolog of NCBI NO: 30697989 NR Description: GTP cyclohydrolase II;
  misc_feature (96)..(507): Homolog of NCBI NO: 25290324 NR Description: probable GTP cyclohydrolase [imported] - thaliana >gi|4544447|gb|AAD22355.1| putative GTP cyclohydrolase
  misc_feature (96)..(507): Homolog of NCBI NO: 30681714 NR Description: GTP cyclohydrolase -related [Arabidopsis thaliana]
  misc_feature (133)..(526): Homolog of NCBI NO: 23018011 NR Description: hypothetical protein [Thermobifida fusca]
  misc_feature (130)..(528): Homolog of NCBI NO: 15605862 NR Description: GTP cyclohydrolase II [Aquifex aeolicus]
  misc_feature (132)..(526): Homolog of NCBI NO: 15827210 NR Description: putative GTP cyclohydrolase phosphate synthase [Mycobacterium leprae]
RFWFCVENNSKETRSSESYEQRDICFITSMMDSALYHPRIFFAHSFINGLYSSPRFANTCWRLVSRSSWEIKASENSDRNVFDENPVRKTDGSLFDSASFETVDAEITPETDDFFVSDAEGDPDCPTQGYSSIELALQALRKGKFVIVVDDETGDVEGNLIMAATLTSPKDIAFLIKNGSGIVSVGMKKENLERLSLTLMSPEMEDEDSSAPTFTITVDAKSGTSTGVSASDRAMTVLALSSLDAKPDDFRRPGHVFPLKYRDGGVLRRAGHTEASVDLMILAGLRPLSVLSAILDQEDGSMASLPYMKKLATEHDIPIVSLTDLIRYRRKRDKLVERITVSRLPTKWGLFQAYCYRSKLDGTENIALVKGNVGNGEDILVRVHSECLTGDIFGSARCDCGNQLDLAMELIEKEGRGVVVYLRGHEGRGIGLGHKLRAYNLQDEGHDTVQANVELGLSIDSREYGIGAQMLRDIGVRTMRLMTNNPAKFTGLKGYGLAVVGRVPVVTPITKENRRYMETKRKKMGHIYISDNNDQPLA

SEQ ID NO: 77400 - protein, 509 aa, Arabidopsis thaliana
  peptide (1)..(509): Ceres Seq. ID no. 12576291
  misc_feature (104)..(302): Pfam Name: 3,4-dihydroxy-2-butanone 4-phosphate synthase Pfam Description: 3,4-dihydroxy-2-butanone 4-phosphate synthase
  misc_feature (1)..(509): Homolog of NCBI NO: 18424277 NR Description: GTP cyclohydrolase II /
  misc_feature (69)..(502): Homolog of NCBI NO: 29367375 NR Description: GTP cyclohydrolase
  misc_feature (67)..(499): Homolog of NCBI NO: 27735197 NR Description: Riboflavin biosynthesis protein ribA [Includes:
  misc_feature (67)..(499): Homolog of NCBI NO: 7436011 NR Description: GTP cyclohydrolase II (EC 3.5.4.25) / 3,
  misc_feature (133)..(499): Homolog of NCBI NO: 30697989 NR Description: GTP cyclohydrolase II;
  misc_feature (67)..(478): Homolog of NCBI NO: 25290324 NR Description: probable GTP cyclohydrolase [imported] - thaliana >gi|4544447|gb|AAD22355.1| putative GTP cyclohydrolase
  misc_feature (67)..(478): Homolog of NCBI NO: 30681714 NR Description: GTP cyclohydrolase -related [Arabidopsis thaliana]
  misc_feature (104)..(497): Homolog of NCBI NO: 23018011 NR Description: hypothetical protein [Thermobifida fusca]
  misc_feature (101)..(499): Homolog of NCBI NO: 15605862 NR Description: GTP cyclohydrolase II [Aquifex aeolicus]
  misc_feature (103)..(497): Homolog of NCBI NO: 15827210 NR Description: putative GTP cyclohydrolase phosphate synthase [Mycobacterium leprae]
MMDSALYHPRIFFAHSFINGLYSSPRFANTCWRLVSRSSWEIKASENSDRNVFDENPVRKTDGSLFDSASFETVDAEITPETDDFFVSDAEGDPDCPTQGYSSIELALQALRKGKFVIVVDDETGDVEGNLIMAATLTSPKDIAFLIKNGSGIVSVGMKKENLERLSLTLMSPEMEDEDSSAPTFTITVDAKSGTSTGVSASDRAMTVLALSSLDAKPDDFRRPGHVFPLKYRDGGVLRRAGHTEASVDLMILAGLRPLSVLSAILDQEDGSMASLPYMKKLATEHDIPIVSLTDLIRYRRKRDKLVERITVSRLPTKWGLFQAYCYRSKLDGTENIALVKGNVGNGEDILVRVHSECLTGDIFGSARCDCGNQLDLAMELIEKEGRGVVVYLRGHEGRGIGLGHKLRAYNLQDEGHDTVQANVELGLSIDSREYGIGAQMLRDIGVRTMRLMTNNPAKFTGLKGYGLAVVGRVPVVTPITKENRRYMETKRKKMGHIYISDNNDQPLA

SEQ ID NO: 77401 - protein, 508 aa, Arabidopsis thaliana
  peptide (1)..(508): Ceres Seq. ID no. 12576292
  misc_feature (103)..(301): Pfam Name: 3,4-dihydroxy-2-butanone 4-phosphate synthase Pfam Description: 3,4-dihydroxy-2-butanone 4-phosphate synthase
  misc_feature (1)..(508): Homolog of NCBI NO: 18424277 NR Description: GTP cyclohydrolase II /
  misc_feature (68)..(501): Homolog of NCBI NO: 29367375 NR Description: GTP cyclohydrolase
  misc_feature (66)..(498): Homolog of NCBI NO: 27735197 NR Description: Riboflavin biosynthesis protein ribA [Includes:
  misc_feature (66)..(498): Homolog of NCBI NO: 7436011 NR Description: GTP cyclohydrolase II (EC 3.5.4.25) / 3,
  misc_feature (132)..(498): Homolog of NCBI NO: 30697989 NR Description: GTP cyclohydrolase II;
  misc_feature (66)..(477): Homolog of NCBI NO: 25290324 NR Description: probable GTP cyclohydrolase [imported] - thaliana >gi|4544447|gb|AAD22355.1| putative GTP cyclohydrolase
  misc_feature (66)..(477): Homolog of NCBI NO: 30681714 NR Description: GTP cyclohydrolase -related [Arabidopsis thaliana]
  misc_feature (103)..(496): Homolog of NCBI NO: 23018011 NR Description: hypothetical protein [Thermobifida fusca]
  misc_feature (100)..(498): Homolog of NCBI NO: 15605862 NR Description: GTP cyclohydrolase II [Aquifex aeolicus]
  misc_feature (102)..(496): Homolog of NCBI NO: 15827210 NR Description: putative GTP cyclohydrolase phosphate synthase [Mycobacterium leprae]
MDSALYHPRIFFAHSFINGLYSSPRFANTCWRLVSRSSWEIKASENSDRNVFDENPVRKTDGSLFDSASFETVDAEITPETDDFFVSDAEGDPDCPTQGYSSIELALQALRKGKFVIVVDDETGDVEGNLIMAATLTSPKDIAFLIKNGSGIVSVGMKKENLERLSLTLMSPEMEDEDSSAPTFTITVDAKSGTSTGVSASDRAMTVLALSSLDAKPDDFRRPGHVFPLKYRDGGVLRRAGHTEASVDLMILAGLRPLSVLSAILDQEDGSMASLPYMKKLATEHDIPIVSLTDLIRYRRKRDKLVERITVSRLPTKWGLFQAYCYRSKLDGTENIALVKGNVGNGEDILVRVHSECLTGDIFGSARCDCGNQLDLAMELIEKEGRGVVVYLRGHEGRGIGLGHKLRAYNLQDEGHDTVQANVELGLSIDSREYGIGAQMLRDIGVRTMRLMTNNPAKFTGLKGYGLAVVGRVPVVTPITKENRRYMETKRKKMGHIYISDNNDQPLA

SEQ ID NO: 77402 - DNA, 1427 bp, Arabidopsis thaliana
  misc_feature (1)..(1427): Ceres Seq. ID no. 12576297
  misc_feature: MA Experiment ID: 108434 Result: Down-regulated in Transcription
  misc_feature: MA Experiment 108434 PARAMETER Experiment Name: At_Root_Tips_cDNA_P Parameter: Tissue Value: Root Tips
  misc_feature: MA Experiment ID: 108488 Result: Down-regulated in Transcription
  misc_feature: MA Experiment ID: 108585 Result: Up-regulated in Transcription
  misc_feature: MA Experiment 108585 PARAMETER Experiment Name: At_5mM_NaNP_cDNA_P Parameter: Timepoint (hr) Value: 6
  misc_feature: MA Experiment 108585 PARAMETER Experiment Name: At_5mM_NaNP_cDNA_P Parameter: Tissue Value: Aerial
  misc_feature: MA Experiment 108585 PARAMETER Experiment Name: At_5mM_NaNP_cDNA_P Parameter: Treatment Value: null
  misc_feature: MA Experiment ID: 108668 Result: Up-regulated in Transcription
  misc_feature: MA Experiment 108668 PARAMETER Experiment Name: At_2mM_SA_cDNA_P Parameter: Plant Line Value: WS
  misc_feature: MA Experiment 108668 PARAMETER Experiment Name: At_2mM_SA_cDNA_P Parameter: Timepoint (hr) Value: 6
  misc_feature: MA Experiment 108668 PARAMETER Experiment Name: At_2mM_SA_cDNA_P Parameter: Treatment Value: 2mM SA vs. No Treatment
  misc_feature: MA Experiment ID: 20000112 Result: Up-regulated in Transcription
  misc_feature: MA Experiment 20000112 PARAMETER Experiment Name: At_42deg_Heat_cDNA_P Parameter: Temperature (deg C) Value: 42 vs. 22
  misc_feature: MA Experiment 20000112 PARAMETER Experiment Name: At_42deg_Heat_cDNA_P Parameter: Timepoint (hr) Value: 2
  misc_feature: MA Experiment 20000112 PARAMETER Experiment Name: At_42deg_Heat_cDNA_P Parameter: Tissue Value: Aerial
  misc_feature: MA Experiment ID: 20000144 Result: Up-regulated in Transcription
  misc_feature: MA Experiment 20000144 PARAMETER Experiment Name: At_42deg_Heat_cDNA_P Parameter: Temperature (deg C) Value: 42 vs. 22
  misc_feature: MA Experiment 20000144 PARAMETER Experiment Name: At_42deg_Heat_cDNA_P Parameter: Timepoint (hr) Value: 1
  misc_feature: MA Experiment 20000144 PARAMETER Experiment Name: At_42deg_Heat_cDNA_P Parameter: Tissue Value: Aerial
  misc_feature: MA Experiment ID: 20000180 Result: Down-regulated in Transcription
  misc_feature: MA Experiment 20000180 PARAMETER Experiment Name: At_Germinating_Seeds_P Parameter: Age (hr) Value: 24 vs. 0
  misc_feature: MA Experiment 20000180 PARAMETER Experiment Name: At_Germinating_Seeds_P Parameter: Tissue Value: Germinating Seeds
  misc_feature: MA Experiment ID: 20000182 Result: Up-regulated in Transcription
  misc_feature: MA Experiment 20000182 PARAMETER Experiment Name: At_2mM_SA_P Parameter: Age (day) Value: 14
  misc_feature: MA Experiment 20000182 PARAMETER Experiment Name: At_2mM_SA_P Parameter: Organism Value: A. thaliana
  misc_feature: MA Experiment 20000182 PARAMETER Experiment Name: At_2mM_SA_P Parameter: Plant Line Value: WS
  misc_feature: MA Experiment 20000182 PARAMETER Experiment Name: At_2mM_SA_P Parameter: Timepoint (hr) Value: 6
  misc_feature: MA Experiment 20000182 PARAMETER Experiment Name: At_2mM_SA_P Parameter: Tissue Value: Aerial
  misc_feature: MA Experiment 20000182 PARAMETER Experiment Name: At_2mM_SA_P Parameter: Treatment Value: 2mM SA vs. No Treatment
  misc_feature: MA Experiment ID: 20000184 Result: Down-regulated in Transcription
  misc_feature: MA Experiment 20000184 PARAMETER Experiment Name: At_Shoots__P Parameter: Age (day) Value: 7
  misc_feature: MA Experiment 20000184 PARAMETER Experiment Name: At_Shoots__P Parameter: Tissue Value: Shoots vs. Whole Plant
  misc_feature: MA Experiment ID: 20000794 Result: Up-regulated in Transcription
  misc_feature: MA Experiment 20000794 PARAMETER Experiment Name: At_Petals_P Parameter: Age (day) Value: 23-25 days
  misc_feature: MA Experiment 20000794 PARAMETER Experiment Name: At_Petals_P Parameter: Plant Line Value: WS
  misc_feature: MA Experiment 20000794 PARAMETER Experiment Name: At_Petals_P Parameter: Tissue Value: Petals vs. Whole plant
  misc_feature: MA Experiment ID: 20001560 Result: Down-regulated in Transcription
  misc_feature: MA Experiment 20001560 PARAMETER Experiment Name: At_Drought_Soil_Dry_P Parameter: Age (day) Value: 28
  misc_feature: MA Experiment 20001560 PARAMETER Experiment Name: At_Drought_Soil_Dry_P Parameter: Organism Value: A. thaliana
  misc_feature: MA Experiment 20001560 PARAMETER Experiment Name: At_Drought_Soil_Dry_P Parameter: Plant Line Value: WS
  misc_feature: MA Experiment 20001560 PARAMETER Experiment Name: At_Drought_Soil_Dry_P Parameter: Post Timepoint (hr) Value: None
  misc_feature: MA Experiment 20001560 PARAMETER Experiment Name: At_Drought_Soil_Dry_P Parameter: Post-Treatment Value: None
  misc_feature: MA Experiment 20001560 PARAMETER Experiment Name: At_Drought_Soil_Dry_P Parameter: Timepoint (day) Value: 14
  misc_feature: MA Experiment 20001560 PARAMETER Experiment Name: At_Drought_Soil_Dry_P Parameter: Treatment Value: Drought vs. No Drought
  misc_feature: MA Experiment ID: 20001911 Result: Up-regulated in Transcription
  misc_feature: MA Experiment 20001911 PARAMETER Experiment Name: At_Drought_Reproduction_P Parameter: Age (day) Value: 40
  misc_feature: MA Experiment 20001911 PARAMETER Experiment Name: At_Drought_Reproduction_P Parameter: Organism Value: A. thaliana
  misc_feature: MA Experiment 20001911 PARAMETER Experiment Name: At_Drought_Reproduction_P Parameter: Plant Line Value: WS
  misc_feature: MA Experiment 20001911 PARAMETER Experiment Name: At_Drought_Reproduction_P Parameter: Timepoint (day) Value: 10
  misc_feature: MA Experiment 20001911 PARAMETER Experiment Name: At_Drought_Reproduction_P Parameter: Tissue Value: Flowers
  misc_feature: MA Experiment 20001911 PARAMETER Experiment Name: At_Drought_Reproduction_P Parameter: Treatment Value: Drought vs. No Drought
aaagaaaaaaaacaaacacaaaacacgcttctcttgttgagaagctagcaaaacaacactaaacctgaaacaaacgtaaatccgccgcaacaacccagttttttccgacggcgtacaagcttcctccgccgtaacgccgtcgtttaataccaagaagcttgattaggtttccgtagtgtgtgatttttttaaggttctgaacactgatgtcaaacccattgaaagagtcaagagaggatattgcaaattctactcctcacatgagggataatgagtatgttcggctagttgtggctcatgaagcctccccagctgaaaccgtgttgtctctatcgcaatcagaggtgcagagtaagaaatttatgtggtggttaaaagctttgggaatatgtgcagttgctctcttgcttacgcttgttttcggaaaatggggagttccgtttgtgtttcaaaaggttcttattccaattttgcaatgggaagcaactgcgtttggccgtcctatgctcgcgattgtccttgttgtttccttggctttgtttcctgtgttcttgataccttctggtccttccatgtggttagctgggatgatttttggttatggtctcggttttgttattatcatggttggaaccaccattggcatggttctcccttacttaatcgggcttatgttccgtgatcgcctccatcaatggttaaaaagatggcctcgtcaagctgctgttctaagactagctgcagaaggaagctggttccatcaattcagagtcgtggcaatctttcgggtttccccatttccttacacgatttttaactacgcaatcgtcgtgacaagcatgagattctggccttacttcttcggatccatagcaggaatgataccagaagctttcatctacatttacagcggtcggttaatcagaacattcgcagatgtgcaatacggacatcaacgtttgacaacagtggagattgtgtacaatgtaatctccttagtcattgcggttgtgaccactgttgctttcactgtgtacgcgaaaagagctttgagagagcttcaaaacgcagaagctaatgaagatgaagaagttcaagtaagaaaagtgagattcgagatgaagaacgtagttcagcacgaagaagataatcatcagcgtttgccttagccgaaagttgacacaaagctaagataggtttgtataaagctttgaacgttgacatgttcttcagcaggatttagagtaaataacaaaaggggtaaaaaaagtctgatatagtaggaagactaagactagtcaagattggatttatattagtgtgactgattccaattattgaaacaaataaaagaagcatttaggctaaaatagtgtatgaaaatatggatgctcatgctctctttgatctagtagtgtatattttaa

SEQ ID NO: 77403 - protein, 320 aa, Arabidopsis thaliana
  peptide (1)..(320): Ceres Seq. ID no. 12576298
  misc_feature (96)..(232): Pfam Name: DedA family Pfam Description: DedA family
  misc_feature (1)..(320): Homolog of NCBI NO: 18395356 NR Description: expressed protein; protein id: At2g02370.1, by cDNA: gi_13605570, supported by cDNA: gi_16323325 [Arabidopsis >gi|13605571|gb|AAK32779.1|AF361611_1 At2g02370/T16F16.16
  misc_feature (161)..(320): Homolog of NCBI NO: 25410981 NR Description: hypothetical protein At2g02370 [imported] -
  misc_feature (55)..(320): Homolog of NCBI NO: 34913316 NR Description: P0519E12.36 [Oryza sativa (japonica >gi|22093829|dbj|BAC07116.1| hypothetical protein [Oryza sativa
  misc_feature (32)..(289): Homolog of NCBI NO: 15221330 NR Description: hypothetical protein; protein id: At1g12450.1
  misc_feature (24)..(289): Homolog of NCBI NO: 30685958 NR Description: expressed protein [Arabidopsis thaliana] unknown protein [Arabidopsis thaliana]
  misc_feature (24)..(286): Homolog of NCBI NO: 15234386 NR Description: putative protein; protein id: At4g12000.1, by cDNA: gi_18176120, supported by cDNA: gi_20465310 [Arabidopsis
  misc_feature (148)..(289): Homolog of NCBI NO: 7486891 NR Description: hypothetical protein T12H17.240 - Arabidopsis >gi|2832606|emb|CAA16570.1| predicted protein [Arabidopsis >gi|3292810|emb|CAA19800.1| putative protein [Arabidopsis
  misc_feature (32)..(161): Homolog of NCBI NO: 8778630 NR Description: F5O11.19 [Arabidopsis thaliana]
  misc_feature (233)..(289): Homolog of NCBI NO: 8778630 NR Description: F5O11.19 [Arabidopsis thaliana]
  misc_feature (52)..(235): Homolog of NCBI NO: 8778630 NR Description: F5O11.19 [Arabidopsis thaliana]
MSNPLKESREDIANSTPHMRDNEYVRLVVAHEASPAETVLSLSQSEVQSKKFMWWLKALGICAVALLLTLVFGKWGVPFVFQKVLIPILQWEATAFGRPMLAIVLVVSLALFPVFLIPSGPSMWLAGMIFGYGLGFVIIMVGTTIGMVLPYLIGLMFRDRLHQWLKRWPRQAAVLRLAAEGSWFHQFRVVAIFRVSPFPYTIFNYAIVVTSMRFWPYFFGSIAGMIPEAFIYIYSGRLIRTFADVQYGHQRLTTVEIVYNVISLVIAVVTTVAFTVYAKRALRELQNAEANEDEEVQVRKVRFEMKNVVQHEEDNHQRLP

SEQ ID NO: 77404 - protein, 302 aa, Arabidopsis thaliana
  peptide (1)..(302): Ceres Seq. ID no. 12576299
  misc_feature (78)..(214): Pfam Name: DedA family Pfam Description: DedA family
  misc_feature (1)..(302): Homolog of NCBI NO: 18395356 NR Description: expressed protein; protein id: At2g02370.1, by cDNA: gi_13605570, supported by cDNA: gi_16323325 [Arabidopsis >gi|13605571|gb|AAK32779.1|AF361611_1 At2g02370/T16F16.16
  misc_feature (143)..(302): Homolog of NCBI NO: 25410981 NR Description: hypothetical protein At2g02370 [imported] -
  misc_feature (37)..(302): Homolog of NCBI NO: 34913316 NR Description: P0519E12.36 [Oryza sativa (japonica >gi|22093829|dbj|BAC07116.1| hypothetical protein [Oryza sativa
  misc_feature (14)..(271): Homolog of NCBI NO: 15221330 NR Description: hypothetical protein; protein id: At1g12450.1
  misc_feature (6)..(271): Homolog of NCBI NO: 30685958 NR Description: expressed protein [Arabidopsis thaliana] unknown protein [Arabidopsis thaliana]
  misc_feature (6)..(268): Homolog of NCBI NO: 15234386 NR Description: putative protein; protein id: At4g12000.1, by cDNA: gi_18176120, supported by cDNA: gi_20465310 [Arabidopsis
  misc_feature (130)..(271): Homolog of NCBI NO: 7486891 NR Description: hypothetical protein T12H17.240 - Arabidopsis >gi|2832606|emb|CAA16570.1| predicted protein [Arabidopsis >gi|3292810|emb|CAA19800.1| putative protein [Arabidopsis
  misc_feature (14)..(143): Homolog of NCBI NO: 8778630 NR Description: F5O11.19 [Arabidopsis thaliana]
  misc_feature (215)..(271): Homolog of NCBI NO: 8778630 NR Description: F5O11.19 [Arabidopsis thaliana]
  misc_feature (34)..(217): Homolog of NCBI NO: 8778630 NR Description: F5O11.19 [Arabidopsis thaliana]
MRDNEYVRLVVAHEASPAETVLSLSQSEVQSKKFMWWLKALGICAVALLLTLVFGKWGVPFVFQKVLIPILQWEATAFGRPMLAIVLVVSLALFPVFLIPSGPSMWLAGMIFGYGLGFVIIMVGTTIGMVLPYLIGLMFRDRLHQWLKRWPRQAAVLRLAAEGSWFHQFRVVAIFRVSPFPYTIFNYAIVVTSMRFWPYFFGSIAGMIPEAFIYIYSGRLIRTFADVQYGHQRLTTVEIVYNVISLVIAVVTTVAFTVYAKRALRELQNAEANEDEEVQVRKVRFEMKNVVQHEEDNHQRLP

SEQ ID NO: 77405 - protein, 268 aa, Arabidopsis thaliana
  peptide (1)..(268): Ceres Seq. ID no. 12576300
  misc_feature (44)..(180): Pfam Name: DedA family Pfam Description: DedA family
  misc_feature (1)..(268): Homolog of NCBI NO: 18395356 NR Description: expressed protein; protein id: At2g02370.1, by cDNA: gi_13605570, supported by cDNA: gi_16323325 [Arabidopsis >gi|13605571|gb|AAK32779.1|AF361611_1 At2g02370/T16F16.16
  misc_feature (109)..(268): Homolog of NCBI NO: 25410981 NR Description: hypothetical protein At2g02370 [imported] -
  misc_feature (3)..(268): Homolog of NCBI NO: 34913316 NR Description: P0519E12.36 [Oryza sativa (japonica >gi|22093829|dbj|BAC07116.1| hypothetical protein [Oryza sativa
  misc_feature (1)..(237): Homolog of NCBI NO: 15221330 NR Description: hypothetical protein; protein id: At1g12450.1
  misc_feature (1)..(237): Homolog of NCBI NO: 30685958 NR Description: expressed protein [Arabidopsis thaliana] unknown protein [Arabidopsis thaliana]
  misc_feature (1)..(234): Homolog of NCBI NO: 15234386 NR Description: putative protein; protein id: At4g12000.1, by cDNA: gi_18176120, supported by cDNA: gi_20465310 [Arabidopsis
  misc_feature (96)..(237): Homolog of NCBI NO: 7486891 NR Description: hypothetical protein T12H17.240 - Arabidopsis >gi|2832606|emb|CAA16570.1| predicted protein [Arabidopsis >gi|3292810|emb|CAA19800.1| putative protein [Arabidopsis
  misc_feature (1)..(109): Homolog of NCBI NO: 8778630 NR Description: F5O11.19 [Arabidopsis thaliana]
  misc_feature (181)..(237): Homolog of NCBI NO: 8778630 NR Description: F5O11.19 [Arabidopsis thaliana]
  misc_feature (1)..(183): Homolog of NCBI NO: 8778630 NR Description: F5O11.19 [Arabidopsis thaliana]
MWWLKALGICAVALLLTLVFGKWGVPFVFQKVLIPILQWEATAFGRPMLAIVLVVSLALFPVFLIPSGPSMWLAGMIFGYGLGFVIIMVGTTIGMVLPYLIGLMFRDRLHQWLKRWPRQAAVLRLAAEGSWFHQFRVVAIFRVSPFPYTIFNYAIVVTSMRFWPYFFGSIAGMIPEAFIYIYSGRLIRTFADVQYGHQRLTTVEIVYNVISLVIAVVTTVAFTVYAKRALRELQNAEANEDEEVQVRKVRFEMKNVVQHEEDNHQRLP

SEQ ID NO: 77406 - DNA, 1276 bp, Arabidopsis thaliana
  misc_feature (1)..(1276): Ceres Seq. ID no. 12576308
  misc_feature: MA Experiment ID: 20000234 Result: Down-regulated in Transcription
  misc_feature: MA Experiment 20000234 PARAMETER Experiment Name: At_Siliques_P Parameter: Age (day) Value: 21
  misc_feature: MA Experiment 20000234 PARAMETER Experiment Name: At_Siliques_P Parameter: Organism Value: A. thaliana
  misc_feature: MA Experiment 20000234 PARAMETER Experiment Name: At_Siliques_P Parameter: Plant Line Value: WS
  misc_feature: MA Experiment 20000234 PARAMETER Experiment Name: At_Siliques_P Parameter: Tissue Value: Less Than 5mm Siliques vs. Whole Plant
  misc_feature: MA Experiment ID: 20000265 Result: Down-regulated in Transcription
  misc_feature: MA Experiment 20000265 PARAMETER Experiment Name: At_Open_Flower_P Parameter: Age (day) Value: 21
  misc_feature: MA Experiment 20000265 PARAMETER Experiment Name: At_Open_Flower_P Parameter: Plant Line Value: WS
  misc_feature: MA Experiment 20000265 PARAMETER Experiment Name: At_Open_Flower_P Parameter: Tissue Value: Closed Flower vs. Whole Plant
  misc_feature: MA Experiment ID: 20000286 Result: Down-regulated in Transcription
  misc_feature: MA Experiment 20000286 PARAMETER Experiment Name: At_Open_Flower_P Parameter: Age (day) Value: 21
  misc_feature: MA Experiment 20000286 PARAMETER Experiment Name: At_Open_Flower_P Parameter: Plant Line Value: WS
  misc_feature: MA Experiment 20000286 PARAMETER Experiment Name: At_Open_Flower_P Parameter: Tissue Value: Half Open vs. Whole Plant
  misc_feature: MA Experiment ID: 20000437 Result: Up-regulated in Transcription
  misc_feature: MA Experiment 20000437 PARAMETER Experiment Name: At_Drought_P Parameter: Age (day) Value: 8
  misc_feature: MA Experiment 20000437 PARAMETER Experiment Name: At_Drought_P Parameter: Organism Value: A. thaliana
  misc_feature: MA Experiment 20000437 PARAMETER Experiment Name: At_Drought_P Parameter: Plant Line Value: WS
  misc_feature: MA Experiment 20000437 PARAMETER Experiment Name: At_Drought_P Parameter: Timepoint (hr) Value: 24
  misc_feature: MA Experiment 20000437 PARAMETER Experiment Name: At_Drought_P Parameter: Tissue Value: Whole Plant
  misc_feature: MA Experiment 20000437 PARAMETER Experiment Name: At_Drought_P Parameter: Treatment Value: Drought vs. No Drought
  misc_feature: MA Experiment ID: 20001451 Result: Up-regulated in Transcription
  misc_feature: MA Experiment 20001451 PARAMETER Experiment Name: At_Far-red-induction_P Parameter: Age (day) Value: 7
  misc_feature: MA Experiment 20001451 PARAMETER Experiment Name: At_Far-red-induction_P Parameter: Light Value: Far-red vs. White
  misc_feature: MA Experiment 20001451 PARAMETER Experiment Name: At_Far-red-induction_P Parameter: Organism Value: A. thaliana
  misc_feature: MA Experiment 20001451 PARAMETER Experiment Name: At_Far-red-induction_P Parameter: Plant Line Value: Columbia
  misc_feature: MA Experiment 20001451 PARAMETER Experiment Name: At_Far-red-induction_P Parameter: Timepoint (hr) Value: 24
  misc_feature: MA Experiment 20001451 PARAMETER Experiment Name: At_Far-red-induction_P Parameter: Tissue Value: Whole Plant
attgttgcgtgtttggttatctcttctttcttctctctcacctaaatcaagggatttgttctgatcaactttgaacagaatttacaacaaatccctagaaaaatctgacccttccttcttcctcaggaagatttaagatacttgttgataaggatattcggaagaagcttttgaaatttttggcaaaggtctcatttgatccgacttttctggtaatttttttccctttattgtttgtttttccaacagatctgaacatttttgttacgattaatcaaatttctgtgttcttaaattggatttggggaaattttgagtagcgagatagatcttatcaaagctgggttaaatcgaatttttgtttatagaaaagctgggtttagatcgaaatgaatcatttttgattatatagaagctgtgttttattggaatttgatcaattttgattgtatcgaagctgcgttaaatcgaaatgattgattatattgaagctgggtttgatcgaattgaatcggttatttgattatcatgttatgaattgaagacaaccttaaaaaatgagtcttctggtgtcagatgataaattgtttttgttgtttgtttagttgaaggtgaaatagatacaaaaaaaatgggctcagaggaaaacaacagcacaagctttccaccaacagagccaaagctctgtgataacggatgtggattcttcgggtcaccatccaacatgaatctctgctcgaaatgttacagaagcttaagagccgaggaagatcaaaccgcggtagcgaaagctgcggtgaagaactctttaaagcttccatcttgcagtatcattgcacctggacaaaaacatcctctggaaattaaaccagctcatttggaaaccgttgttgtaaccgctgagccgtcttctgtacctgtagccgcggaacaggacgaggctgagccgtcgagacctgttagaccgaacaacaggtgtttcagctgtaacaagaaggttggtgtaatggggtttaagtgcaaatgcggtagcacgttttgcgggagtcataggtacccggagaagcatgagtgtagcttcgatttcaaagaagttggacgtgatgcaattgcaaaggctaatcctttggttaaggcggataaagttcagaggatttgaagaaaacaaactttgttatttttaagtattttcgttgtcttctgcatttgatcagtttctgcctgggatgttcgatgtttggtttccatgaatcaaaatgaaaattgctgttcttgc

SEQ ID NO: 77407 - protein, 175 aa, Arabidopsis thaliana; identical to SEQ ID NO: 25636
  peptide (1)..(175): Ceres Seq. ID no. 12576309
  misc_feature (116)..(156): Pfam Name: AN1-like Zinc finger Pfam Description: AN1-like Zinc finger
  misc_feature (1)..(175): Homolog of NCBI NO: 15234402 NR Description: putative protein; protein id: At4g12040.1, by cDNA: 45., supported by cDNA: gi_13605498 [Arabidopsis
  misc_feature (1)..(174): Homolog of NCBI NO: 15235819 NR Description: similar to zinc finger - like protein; protein
  misc_feature (1)..(175): Homolog of NCBI NO: 8778645 NR Description: F5O11.17 [Arabidopsis thaliana]
  misc_feature (1)..(175): Homolog of NCBI NO: 15221329 NR Description: hypothetical protein; protein id: At1g12440.1
  misc_feature (15)..(175): Homolog of NCBI NO: 15225894 NR Description: putative zinc finger protein; protein id: supported by cDNA: 14203., supported by cDNA: gi_18253038
  misc_feature (12)..(175): Homolog of NCBI NO: 18403408 NR Description: expressed protein; protein id: At1g51200.1, by cDNA: gi_15912334 [Arabidopsis thaliana]
  misc_feature (12)..(175): Homolog of NCBI NO: 25082726 NR Description: expressed protein [Arabidopsis thaliana]
  misc_feature (13)..(175): Homolog of NCBI NO: 18404102 NR Description: expressed protein; protein id: At2g36320.1, by cDNA: 24255. [Arabidopsis thaliana] >gi|25408460|pir||C84779
  misc_feature (13)..(175): Homolog of NCBI NO: 15231686 NR Description: zinc finger - like protein; protein id: supported by cDNA: gi_14596166 [Arabidopsis thaliana]
  misc_feature (13)..(175): Homolog of NCBI NO: 35187687 NR Description: zinc-finger protein [Oryza sativa (indica

SEQ ID NO: 77408 - protein, 144 aa, Arabidopsis thaliana; identical to SEQ ID NO: 25637
  peptide (1)..(144): Ceres Seq. ID no. 12576310
  misc_feature (85)..(125): Pfam Name: AN1-like Zinc finger Pfam Description: AN1-like Zinc finger
  misc_feature (1)..(144): Homolog of NCBI NO: 15234402 NR Description: putative protein; protein id: At4g12040.1, by cDNA: 45., supported by cDNA: gi_13605498 [Arabidopsis
  misc_feature (1)..(143): Homolog of NCBI NO: 15235819 NR Description: similar to zinc finger - like protein; protein
  misc_feature (1)..(144): Homolog of NCBI NO: 8778645 NR Description: F5O11.17 [Arabidopsis thaliana]
  misc_feature (1)..(144): Homolog of NCBI NO: 15221329 NR Description: hypothetical protein; protein id: At1g12440.1
  misc_feature (1)..(144): Homolog of NCBI NO: 15225894 NR Description: putative zinc finger protein; protein id: supported by cDNA: 14203., supported by cDNA: gi_18253038
  misc_feature (1)..(144): Homolog of NCBI NO: 18403408 NR Description: expressed protein; protein id: At1g51200.1, by cDNA: gi_15912334 [Arabidopsis thaliana]
  misc_feature (1)..(144): Homolog of NCBI NO: 25082726 NR Description: expressed protein [Arabidopsis thaliana]
  misc_feature (1)..(144): Homolog of NCBI NO: 18404102 NR Description: expressed protein; protein id: At2g36320.1, by cDNA: 24255. [Arabidopsis thaliana] >gi|25408460|pir||C84779
  misc_feature (1)..(144): Homolog of NCBI NO: 15231686 NR Description: zinc finger - like protein; protein id: supported by cDNA: gi_14596166 [Arabidopsis thaliana]
  misc_feature (1)..(144): Homolog of NCBI NO: 35187687 NR Description: zinc-finger protein [Oryza sativa (indica

SEQ ID NO: 77409 - DNA, 976 bp, Arabidopsis thaliana
  misc_feature (1)..(976): Ceres Seq. ID no. 12576315
  misc_feature: MA Experiment ID: 20000173 Result: Up-regulated in Transcription
  misc_feature: MA Experiment 20000173 PARAMETER Experiment Name: At_42deg_Heat_P Parameter: Age (day) Value: 14
  misc_feature: MA Experiment 20000173 PARAMETER Experiment Name: At_42deg_Heat_P Parameter: Organism Value: A. thaliana
  misc_feature: MA Experiment 20000173 PARAMETER Experiment Name: At_42deg_Heat_P Parameter: Plant Line Value: WS
  misc_feature: MA Experiment 20000173 PARAMETER Experiment Name: At_42deg_Heat_P Parameter: Temperature (deg C) Value: 42 vs. 22
  misc_feature: MA Experiment 20000173 PARAMETER Experiment Name: At_42deg_Heat_P Parameter: Timepoint (hr) Value: 6
  misc_feature: MA Experiment 20000173 PARAMETER Experiment Name: At_42deg_Heat_P Parameter: Tissue Value: Aerial
  misc_feature: MA Experiment ID: 20000182 Result: Up-regulated in Transcription
  misc_feature: MA Experiment 20000182 PARAMETER Experiment Name: At_2mM_SA_P Parameter: Age (day) Value: 14
  misc_feature: MA Experiment 20000182 PARAMETER Experiment Name: At_2mM_SA_P Parameter: Organism Value: A. thaliana
  misc_feature: MA Experiment 20000182 PARAMETER Experiment Name: At_2mM_SA_P Parameter: Plant Line Value: WS
  misc_feature: MA Experiment 20000182 PARAMETER Experiment Name: At_2mM_SA_P Parameter: Timepoint (hr) Value: 6
  misc_feature: MA Experiment 20000182 PARAMETER Experiment Name: At_2mM_SA_P Parameter: Tissue Value: Aerial
  misc_feature: MA Experiment 20000182 PARAMETER Experiment Name: At_2mM_SA_P Parameter: Treatment Value: 2mM SA vs. No Treatment
  misc_feature: MA Experiment ID: 20000439 Result: Down-regulated in Transcription
  misc_feature: MA Experiment 20000439 PARAMETER Experiment Name: At_Roots__P Parameter: Age (day) Value: 14 vs. 21
  misc_feature: MA Experiment 20000439 PARAMETER Experiment Name: At_Roots__P Parameter: Organism Value: A. thaliana
  misc_feature: MA Experiment 20000439 PARAMETER Experiment Name: At_Roots__P Parameter: Tissue Value: Roots vs. Whole Plant
  misc_feature: MA Experiment ID: 20001247 Result: Up-regulated in Transcription
  misc_feature: MA Experiment 20001247 PARAMETER Experiment Name: At_Far-red-induction_P Parameter: Age (day) Value: 7
  misc_feature: MA Experiment 20001247 PARAMETER Experiment Name: At_Far-red-induction_P Parameter: Light Value: Far-red vs. White
  misc_feature: MA Experiment 20001247 PARAMETER Experiment Name: At_Far-red-induction_P Parameter: Organism Value: A. thaliana
  misc_feature: MA Experiment 20001247 PARAMETER Experiment Name: At_Far-red-induction_P Parameter: Plant Line Value: Columbia
  misc_feature: MA Experiment 20001247 PARAMETER Experiment Name: At_Far-red-induction_P Parameter: Timepoint (hr) Value: 1
  misc_feature: MA Experiment 20001247 PARAMETER Experiment Name: At_Far-red-induction_P Parameter: Tissue Value: Whole Plant
tctctctctctctctctctctctctaccgtccttctagggtttctttgatcacattcaaatttgtcgcctttaatctcaatcctgtaagaatcagaggatatggattccaattggatcaattgtccctctgttttctcctcatcctcttcttcttccagacgctgtcaatcccgatcagacttgtatttaggaggagggtacgaggatcttgaaggagaagacgatttgaaggcagagtttatatgccctttttgcgctgaagattttgacattgttgggctttgttgtcacattgatgaagaacatcctgttgaagccaagaatggggtctgtcctgtatgcactaagagggtgggattggatatcgttggccatattacgacgcaacatgcgaatttctttaaggtacagcgaaggagaaggttgcgaagaggaggatatagctctacctatctcgccttgaaaaaggaactccgggaagcaaacctacagtctcttcttggtggatcttcaagtttcacttcttcaaccaatatcgattctgatccgttgctgtcatcctttatgtttaattctccttcagtgaaccagtctgcaaacaaatctgctacacctgtgactgtaggaaacgcggctacaaaagtctcgattaaggaatctctcaaaagagacattcaagaagctccactttcaggtgaagatcaggagaaggcgaaaaagagtgagtttgtgcgaggcttgttgttgtcaaccatgcttgaagacgatttctaatttctcgttataaatccattgccttgttgtggttggtgcatgagacttgaggatctcaggttggaattgttaggagtggtttcaatgtatgatgcaaaatattgtaagttataagaggatgcagagttgcatccatatataattgtcatttgtaccttggaacctttatgtgcataaccggaaacagagtactttcctttc

SEQ ID NO: 77410 - protein, 224 aa, Arabidopsis thaliana
  peptide (1)..(224): Ceres Seq. ID no. 12576316
  misc_feature (11)..(219): Pfam Name: Drought induced 19 protein (Di19) Pfam Description: Drought induced 19 protein (Di19)
  misc_feature (1)..(224): Homolog of NCBI NO: 18377875 NR Description: AT3g06760/F3E22_10 [Arabidopsis thaliana]
  misc_feature (1)..(224): Homolog of NCBI NO: 15230782 NR Description: unknown protein; protein id: At3g06760.1 thaliana] >gi|7549637|gb|AAF63822.1| unknown protein [Arabidopsis
  misc_feature (1)..(224): Homolog of NCBI NO: 13937216 NR Description: AT5g49230/K21P3_11 [Arabidopsis thaliana]
  misc_feature (1)..(224): Homolog of NCBI NO: 15239827 NR Description: drought-induced protein Di19-like protein; id: At5g49230.1, supported by cDNA: gi_13937215 [Arabidopsis
  misc_feature (16)..(222): Homolog of NCBI NO: 25992529 NR Description: fiber protein Fb2 [Gossypium barbadense]
  misc_feature (16)..(222): Homolog of NCBI NO: 28393233 NR Description: unknown protein [Arabidopsis thaliana]
  misc_feature (16)..(222): Homolog of NCBI NO: 15240426 NR Description: drought-induced protein - like; protein id:
  misc_feature (23)..(222): Homolog of NCBI NO: 15028023 NR Description: unknown protein [Arabidopsis thaliana]
  misc_feature (23)..(222): Homolog of NCBI NO: 1076316 NR Description: drought-induced protein Di19 - Arabidopsis
  misc_feature (16)..(224): Homolog of NCBI NO: 15235270 NR Description: drought-induced-19-like 1; protein id: supported by cDNA: gi_13272462 [Arabidopsis thaliana]
MDSNWINCPSVFSSSSSSSRRCQSRSDLYLGGGYEDLEGEDDLKAEFICPFCAEDFDIVGLCCHIDEEHPVEAKNGVCPVCTKRVGLDIVGHITTQHANFFKVQRRRRLRRGGYSSTYLALKKELREANLQSLLGGSSSFTSSTNIDSDPLLSSFMFNSPSVNQSANKSATPVTVGNAATKVSIKESLKRDIQEAPLSGEDQEKAKKSEFVRGLLLSTMLEDDF

SEQ ID NO: 77411 - DNA, 1596 bp, Arabidopsis thaliana
  misc_feature (1)..(1596): Ceres Seq. ID no. 12576321
  misc_feature: MA Experiment ID: 20000173 Result: Down-regulated in Transcription
  misc_feature: MA Experiment 20000173 PARAMETER Experiment Name: At_42deg_Heat_P Parameter: Age (day) Value: 14
  misc_feature: MA Experiment 20000173 PARAMETER Experiment Name: At_42deg_Heat_P Parameter: Organism Value: A. thaliana
  misc_feature: MA Experiment 20000173 PARAMETER Experiment Name: At_42deg_Heat_P Parameter: Plant Line Value: WS
  misc_feature: MA Experiment 20000173 PARAMETER Experiment Name: At_42deg_Heat_P Parameter: Temperature (deg C) Value: 42 vs. 22
  misc_feature: MA Experiment 20000173 PARAMETER Experiment Name: At_42deg_Heat_P Parameter: Timepoint (hr) Value: 6
  misc_feature: MA Experiment 20000173 PARAMETER Experiment Name: At_42deg_Heat_P Parameter: Tissue Value: Aerial
  misc_feature: MA Experiment ID: 20000184 Result: Down-regulated in Transcription
  misc_feature: MA Experiment 20000184 PARAMETER Experiment Name: At_Shoots__P Parameter: Age (day) Value: 7
  misc_feature: MA Experiment 20000184 PARAMETER Experiment Name: At_Shoots__P Parameter: Tissue Value: Shoots vs. Whole Plant
  misc_feature: MA Experiment ID: 20000185 Result: Down-regulated in Transcription
  misc_feature: MA Experiment 20000185 PARAMETER Experiment Name: At_Roots__P Parameter: Age (day) Value: 7 vs. 21
  misc_feature: MA Experiment 20000185 PARAMETER Experiment Name: At_Roots__P Parameter: Organism Value: A. thaliana
  misc_feature: MA Experiment 20000185 PARAMETER Experiment Name: At_Roots__P Parameter: Tissue Value: Roots vs. Whole Plant
  misc_feature: MA Experiment ID: 20000227 Result: Down-regulated in Transcription
  misc_feature: MA Experiment 20000227 PARAMETER Experiment Name: At_Root-Tips-vs-Tops_P Parameter: Tissue Value: Root Tips vs. Root Tops
  misc_feature: MA Experiment ID: 20000234 Result: Down-regulated in Transcription
  misc_feature: MA Experiment 20000234 PARAMETER Experiment Name: At_Siliques_P Parameter: Age (day) Value: 21
  misc_feature: MA Experiment 20000234 PARAMETER Experiment Name: At_Siliques_P Parameter: Organism Value: A. thaliana
  misc_feature: MA Experiment 20000234 PARAMETER Experiment Name: At_Siliques_P Parameter: Plant Line Value: WS
  misc_feature: MA Experiment 20000234 PARAMETER Experiment Name: At_Siliques_P Parameter: Tissue Value: Less Than 5mm Siliques vs. Whole Plant
  misc_feature: MA Experiment ID: 20000265 Result: Down-regulated in Transcription
  misc_feature: MA Experiment 20000265 PARAMETER Experiment Name: At_Open_Flower_P Parameter: Age (day) Value: 21
  misc_feature: MA Experiment 20000265 PARAMETER Experiment Name: At_Open_Flower_P Parameter: Plant Line Value: WS
  misc_feature: MA Experiment 20000265 PARAMETER Experiment Name: At_Open_Flower_P Parameter: Tissue Value: Closed Flower vs. Whole Plant
  misc_feature: MA Experiment ID: 20000286 Result: Down-regulated in Transcription
  misc_feature: MA Experiment 20000286 PARAMETER Experiment Name: At_Open_Flower_P Parameter: Age (day) Value: 21
  misc_feature: MA Experiment 20000286 PARAMETER Experiment Name: At_Open_Flower_P Parameter: Plant Line Value: WS
  misc_feature: MA Experiment 20000286 PARAMETER Experiment Name: At_Open_Flower_P Parameter: Tissue Value: Half Open vs. Whole Plant
  misc_feature: MA Experiment ID: 20000439 Result: Down-regulated in Transcription
  misc_feature: MA Experiment 20000439 PARAMETER Experiment Name: At_Roots__P Parameter: Age (day) Value: 14 vs. 21
  misc_feature: MA Experiment 20000439 PARAMETER Experiment Name: At_Roots__P Parameter: Organism Value: A. thaliana
  misc_feature: MA Experiment 20000439 PARAMETER Experiment Name: At_Roots__P Parameter: Tissue Value: Roots vs. Whole Plant
  misc_feature: MA Experiment ID: 20000451 Result: Down-regulated in Transcription
  misc_feature: MA Experiment 20000451 PARAMETER Experiment Name: At_CS6879_Shoots-Roots_P Parameter: Age (day) Value: 14
  misc_feature: MA Experiment 20000451 PARAMETER Experiment Name: At_CS6879_Shoots-Roots_P Parameter: Organism Value: A. thaliana
  misc_feature: MA Experiment 20000451 PARAMETER Experiment Name: At_CS6879_Shoots-Roots_P Parameter: Plant Line Value: CS6879 vs. WS
  misc_feature: MA Experiment 20000451 PARAMETER Experiment Name: At_CS6879_Shoots-Roots_P Parameter: Tissue Value: Roots
  misc_feature: MA Experiment ID: 20000496 Result: Down-regulated in Transcription
  misc_feature: MA Experiment 20000496 PARAMETER Experiment Name: At_Guard_Cells_P Parameter: Harvest Date Value: 7/19/2002
  misc_feature: MA Experiment 20000496 PARAMETER Experiment Name: At_Guard_Cells_P Parameter: Organism Value: Canola
  misc_feature: MA Experiment 20000496 PARAMETER Experiment Name: At_Guard_Cells_P Parameter: Tissue Value: Guard Cells vs. Leaves
  misc_feature: MA Experiment ID: 20001557 Result: Down-regulated in Transcription
  misc_feature: MA Experiment 20001557 PARAMETER Experiment Name: At_Drought_Soil_Dry_P Parameter: Age (day) Value: 27
  misc_feature: MA Experiment 20001557 PARAMETER Experiment Name: At_Drought_Soil_Dry_P Parameter: Organism Value: A. thaliana
  misc_feature: MA Experiment 20001557 PARAMETER Experiment Name: At_Drought_Soil_Dry_P Parameter: Plant Line Value: WS
  misc_feature: MA Experiment 20001557 PARAMETER Experiment Name: At_Drought_Soil_Dry_P Parameter: Post Timepoint (hr) Value: 3
  misc_feature: MA Experiment 20001557 PARAMETER Experiment Name: At_Drought_Soil_Dry_P Parameter: Post-Treatment Value: Re-Water vs. No Drought
  misc_feature: MA Experiment 20001557 PARAMETER Experiment Name: At_Drought_Soil_Dry_P Parameter: Timepoint (day) Value: 13
  misc_feature: MA Experiment 20001557 PARAMETER Experiment Name: At_Drought_Soil_Dry_P Parameter: Treatment Value: Drought vs. No Drought
  misc_feature: MA Experiment ID: 20001558 Result: Down-regulated in Transcription
  misc_feature: MA Experiment 20001558 PARAMETER Experiment Name: At_Drought_Soil_Dry_P Parameter: Age (day) Value: 27
  misc_feature: MA Experiment 20001558 PARAMETER Experiment Name: At_Drought_Soil_Dry_P Parameter: Organism Value: A. thaliana
  misc_feature: MA Experiment 20001558 PARAMETER Experiment Name: At_Drought_Soil_Dry_P Parameter: Plant Line Value: WS
  misc_feature: MA Experiment 20001558 PARAMETER Experiment Name: At_Drought_Soil_Dry_P Parameter: Post Timepoint (hr) Value: 6
  misc_feature: MA Experiment 20001558 PARAMETER Experiment Name: At_Drought_Soil_Dry_P Parameter: Post-Treatment Value: Re-Water vs. No Drought
  misc_feature: MA Experiment 20001558 PARAMETER Experiment Name: At_Drought_Soil_Dry_P Parameter: Timepoint (day) Value: 13
  misc_feature: MA Experiment 20001558 PARAMETER Experiment Name: At_Drought_Soil_Dry_P Parameter: Treatment Value: Drought vs. No Drought
  misc_feature: MA Experiment ID: 20001560 Result: Down-regulated in Transcription
  misc_feature: MA Experiment 20001560 PARAMETER Experiment Name: At_Drought_Soil_Dry_P Parameter: Age (day) Value: 28
  misc_feature: MA Experiment 20001560 PARAMETER Experiment Name: At_Drought_Soil_Dry_P Parameter: Organism Value: A. thaliana
  misc_feature: MA Experiment 20001560 PARAMETER Experiment Name: At_Drought_Soil_Dry_P Parameter: Plant Line Value: WS
  misc_feature: MA Experiment 20001560 PARAMETER Experiment Name: At_Drought_Soil_Dry_P Parameter: Post Timepoint (hr) Value: None
  misc_feature: MA Experiment 20001560 PARAMETER Experiment Name: At_Drought_Soil_Dry_P Parameter: Post-Treatment Value: None
  misc_feature: MA Experiment 20001560 PARAMETER Experiment Name: At_Drought_Soil_Dry_P Parameter: Timepoint (day) Value: 14
  misc_feature: MA Experiment 20001560 PARAMETER Experiment Name: At_Drought_Soil_Dry_P Parameter: Treatment Value: Drought vs. No Drought
  misc_feature: MA Experiment ID: 20001905 Result: Down-regulated in Transcription
  misc_feature: MA Experiment 20001905 PARAMETER Experiment Name: At_Drought_Reproduction_P Parameter: Age (day) Value: 40
  misc_feature: MA Experiment 20001905 PARAMETER Experiment Name: At_Drought_Reproduction_P Parameter: Organism Value: A. thaliana
  misc_feature: MA Experiment 20001905 PARAMETER Experiment Name: At_Drought_Reproduction_P Parameter: Plant Line Value: WS
  misc_feature: MA Experiment 20001905 PARAMETER Experiment Name: At_Drought_Reproduction_P Parameter: Timepoint (day) Value: 10
  misc_feature: MA Experiment 20001905 PARAMETER Experiment Name: At_Drought_Reproduction_P Parameter: Tissue Value: Rosettes
  misc_feature: MA Experiment 20001905 PARAMETER Experiment Name: At_Drought_Reproduction_P Parameter: Treatment Value: Drought vs. No Drought
  misc_feature: MA Experiment ID: 20001906 Result: Down-regulated in Transcription
  misc_feature: MA Experiment 20001906 PARAMETER Experiment Name: At_Drought_Reproduction_P Parameter: Age (day) Value: 35
  misc_feature: MA Experiment 20001906 PARAMETER Experiment Name: At_Drought_Reproduction_P Parameter: Organism Value: A. thaliana
  misc_feature: MA Experiment 20001906 PARAMETER Experiment Name: At_Drought_Reproduction_P Parameter: Plant Line Value: WS
  misc_feature: MA Experiment 20001906 PARAMETER Experiment Name: At_Drought_Reproduction_P Parameter: Timepoint (day) Value: 5
  misc_feature: MA Experiment 20001906 PARAMETER Experiment Name: At_Drought_Reproduction_P Parameter: Tissue Value: Siliques
  misc_feature: MA Experiment 20001906 PARAMETER Experiment Name: At_Drought_Reproduction_P Parameter: Treatment Value: Drought vs. No Drought
aaggataagaatcaaagaaagaagatggaatctgaaagactcgaatcacatcttctgaataagcaagaagaagaagcttcttccttcacttctggtcttcttctcagcacatccgtcgttgtcgctggatccttctgttatggctgcgccatgtcatattcgtcgcctgctcagtccaaaatcatggaagaactgggactttccgttgcagattattcgtttttcacttcggtaatgacattaggaggaatgattaccgccgtgttcagcggtaaaatctctgctctcgttggtcgtcgacagacaatgtggatctcagatgtttgctgtatttttggttggctcgctgtagcgtttgcacatgatattataatgcttaatactggacgactcttcttggggtttggggttggtctcattagttatgtggttcctgtgtatatagcagaaattacacccaaaacatttcgtggaggattttcttattccaatcagcttctacaatgtcttgggatttcactcatgttcttcaccggaaactttttccattggcgaacattagctcttttaagtgcaatcccaagtgctttccaagtgatatgtttattttttattcctgaatctcctagatggctggcgatgtatggtcaagatcaagagcttgaagtttcgttgaaaaaactaaggggagaaaatagtgatattctaaaggaagctgctgaaatcagagaaacagtggaaatatccagaaaagagtctcaaagtggaataagagacttgttccatatcggaaacgcacattcgttaatctttcgttgaaaatggttagattggattgggtttaatgctcttgcaacaattttgtgggagtgcggcgataagtgcttatgctgctcgaattttcgacaaagccggttttccaagcgacataggaacaaccatcctcgcagtgattctgataccgcaatctatagttgtcatgttaaccgttgaccgatggggacgccgaccacttcttatgatttcttctatcggaatgtgcatatgctcattttttattggcctttcatactaccttcagaagaatggtgaatttcagaagttatgttccgttatgttaatcgtcggtttagtgggttatgtctcatcctttggcattggcctaggtggattaccatgggttataatgtctgagatatttccggtgaatgtgaaaatcaccgccggtagccttgtaacgatgtcaaattggttttttaattggattatcatctatagttttaatttcatgatacagtggagcgcttccggaacatatttcatattttctggagtttctctggtgacgatcgtattcatatggacattggtgcctgagacgaaaggccgaacactcgaagagattcaaacatcattagtccgactttcgtaaaatctaagtatggattatacgtaatgttaagtctcttgaatagtctttttaaccgctgtcaaaaagaaaagaaaagaatagtctttttaaccgtatattaatgtttggttaaataagcgttttctctcactttgattaaatagtaataatggctatgattttac

SEQ ID NO: 77412 - protein, 272 aa, Arabidopsis thaliana
  peptide (1)..(272): Ceres Seq. ID no. 12576322
  misc_feature (52)..(119): Pfam Name: Sugar (and other) transporter Pfam Description: Sugar (and other) transporter
  misc_feature (102)..(243): Homolog of NCBI NO: 25407061 NR Description: hypothetical protein [imported] - Arabidopsis >gi|2342688|gb|AAB70414.1| Similar to Beta integral membrane
  misc_feature (51)..(119): Homolog of NCBI NO: 25407061 NR Description: hypothetical protein [imported] - Arabidopsis >gi|2342688|gb|AAB70414.1| Similar to Beta integral membrane
  misc_feature (51)..(243): Homolog of NCBI NO: 30680852 NR Description: sugar transporter family [Arabidopsis thaliana]
  misc_feature (9)..(52): Homolog of NCBI NO: 30680852 NR Description: sugar transporter family [Arabidopsis thaliana]
  misc_feature (9)..(272): Homolog of NCBI NO: 18390954 NR Description: putative sugar transport protein, ERD6; protein At1g08900.1, supported by cDNA: gi_14423387, supported by cDNA: [Arabidopsis thaliana] >gi|14423388|gb|AAK62376.1|AF386931_1
  misc_feature (51)..(243): Homolog of NCBI NO: 25407059 NR Description: hypothetical protein [imported] - Arabidopsis >gi|2342689|gb|AAB70415.1| Similar to Beta integral membrane
  misc_feature (9)..(52): Homolog of NCBI NO: 25407059 NR Description: hypothetical protein [imported] - Arabidopsis >gi|2342689|gb|AAB70415.1| Similar to Beta integral membrane
  misc_feature (54)..(270): Homolog of NCBI NO: 6686829 NR Description: putative sugar transporter [Arabidopsis thaliana]
  misc_feature (11)..(270): Homolog of NCBI NO: 18390957 NR Description: putative sugar transport protein, ERD6; protein At1g08920.1, supported by cDNA: gi_14194108 [Arabidopsis >gi|14194109|gb|AAK56249.1|AF367260_1 At1g08920/F7G19_20
  misc_feature (11)..(270): Homolog of NCBI NO: 30680865 NR Description: sugar transporter, putative [Arabidopsis thaliana]
KDKNQRKKMESERLESHLLNKQEEEASSFTSGLLLSTSVVVAGSFCYGCAMSYSSPAQSKIMEELGLSVADYSFFTSVMTLGGMITAVFSGKISALVGRRQTMWISDVCCIFGWLAVAFAHDIIMLNTGRLFLGFGVGLISYVVPVYIAEITPKTFRGGFSYSNQLLQCLGISLMFFTGNFFHWRTLALLSAIPSAFQVICLFFIPESPRWLAMYGQDQELEVSLKKLRGENSDILKEAAEIRETVEISRKESQSGIRDLFHIGNAHSLIFR

SEQ ID NO: 77413 - protein, 264 aa, Arabidopsis thaliana
  peptide (1)..(264): Ceres Seq. ID no. 12576323
  misc_feature (44)..(111): Pfam Name: Sugar (and other) transporter Pfam Description: Sugar (and other) transporter
  misc_feature (94)..(235): Homolog of NCBI NO: 25407061 NR Description: hypothetical protein [imported] - Arabidopsis >gi|2342688|gb|AAB70414.1| Similar to Beta integral membrane
  misc_feature (43)..(111): Homolog of NCBI NO: 25407061 NR Description: hypothetical protein [imported] - Arabidopsis >gi|2342688|gb|AAB70414.1| Similar to Beta integral membrane
  misc_feature (43)..(235): Homolog of NCBI NO: 30680852 NR Description: sugar transporter family [Arabidopsis thaliana]
  misc_feature (1)..(44): Homolog of NCBI NO: 30680852 NR Description: sugar transporter family [Arabidopsis thaliana]
  misc_feature (1)..(264): Homolog of NCBI NO: 18390954 NR Description: putative sugar transport protein, ERD6; protein At1g08900.1, supported by cDNA: gi_14423387, supported by cDNA: [Arabidopsis thaliana] >gi|14423388|gb|AAK62376.1|AF386931_1
  misc_feature (43)..(235): Homolog of NCBI NO: 25407059 NR Description: hypothetical protein [imported] - Arabidopsis >gi|2342689|gb|AAB70415.1| Similar to Beta integral membrane
  misc_feature (1)..(44): Homolog of NCBI NO: 25407059 NR Description: hypothetical protein [imported] - Arabidopsis >gi|2342689|gb|AAB70415.1| Similar to Beta integral membrane
  misc_feature (46)..(262): Homolog of NCBI NO: 6686829 NR Description: putative sugar transporter [Arabidopsis thaliana]
  misc_feature (3)..(262): Homolog of NCBI NO: 18390957 NR Description: putative sugar transport protein, ERD6; protein At1g08920.1, supported by cDNA: gi_14194108 [Arabidopsis >gi|14194109|gb|AAK56249.1|AF367260_1 At1g08920/F7G19_20
  misc_feature (3)..(262): Homolog of NCBI NO: 30680865 NR Description: sugar transporter, putative [Arabidopsis thaliana]
MESERLESHLLNKQEEEASSFTSGLLLSTSVVVAGSFCYGCAMSYSSPAQSKIMEELGLSVADYSFFTSVMTLGGMITAVFSGKISALVGRRQTMWISDVCCIFGWLAVAFAHDIIMLNTGRLFLGFGVGLISYVVPVYIAEITPKTFRGGFSYSNQLLQCLGISLMFFTGNFFHWRTLALLSAIPSAFQVICLFFIPESPRWLAMYGQDQELEVSLKKLRGENSDILKEAAEIRETVEISRKESQSGIRDLFHIGNAHSLIFR

SEQ ID NO: 77414 - protein, 222 aa, Arabidopsis thaliana
  peptide (1)..(222): Ceres Seq. ID no. 12576324
  misc_feature (2)..(69): Pfam Name: Sugar (and other) transporter Pfam Description: Sugar (and other) transporter
  misc_feature (52)..(193): Homolog of NCBI NO: 25407061 NR Description: hypothetical protein [imported] - Arabidopsis >gi|2342688|gb|AAB70414.1| Similar to Beta integral membrane
  misc_feature (1)..(69): Homolog of NCBI NO: 25407061 NR Description: hypothetical protein [imported] - Arabidopsis >gi|2342688|gb|AAB70414.1| Similar to Beta integral membrane
  misc_feature (1)..(193): Homolog of NCBI NO: 30680852 NR Description: sugar transporter family [Arabidopsis thaliana]
  misc_feature (1)..(222): Homolog of NCBI NO: 18390954 NR Description: putative sugar transport protein, ERD6; protein At1g08900.1, supported by cDNA: gi_14423387, supported by cDNA: [Arabidopsis thaliana] >gi|14423388|gb|AAK62376.1|AF386931_1
  misc_feature (1)..(193): Homolog of NCBI NO: 25407059 NR Description: hypothetical protein [imported] - Arabidopsis >gi|2342689|gb|AAB70415.1| Similar to Beta integral membrane
  misc_feature (4)..(220): Homolog of NCBI NO: 6686829 NR Description: putative sugar transporter [Arabidopsis thaliana]
  misc_feature (1)..(220): Homolog of NCBI NO: 18390957 NR Description: putative sugar transport protein, ERD6; protein At1g08920.1, supported by cDNA: gi_14194108 [Arabidopsis >gi|14194109|gb|AAK56249.1|AF367260_1 At1g08920/F7G19_20
  misc_feature (1)..(220): Homolog of NCBI NO: 30680865 NR Description: sugar transporter, putative [Arabidopsis thaliana]
  misc_feature (1)..(220): Homolog of NCBI NO: 6686827 NR Description: putative sugar transporter [Arabidopsis thaliana]
  misc_feature (1)..(220): Homolog of NCBI NO: 18421108 NR Description: sugar transporter-like protein; protein id:
MSYSSPAQSKIMEELGLSVADYSFFTSVMTLGGMITAVFSGKISALVGRRQTMWISDVCCIFGWLAVAFAHDIIMLNTGRLFLGFGVGLISYVVPVYIAEITPKTFRGGFSYSNQLLQCLGISLMFFTGNFFHWRTLALLSAIPSAFQVICLFFIPESPRWLAMYGQDQELEVSLKKLRGENSDILKEAAEIRETVEISRKESQSGIRDLFHIGNAHSLIFR

SEQ ID NO: 77415 - DNA, 828 bp, Arabidopsis thaliana
  misc_feature (1)..(828): Ceres Seq. ID no. 12576325
  misc_feature: MA Experiment ID: 20000179 Result: Up-regulated in Transcription
  misc_feature: MA Experiment 20000179 PARAMETER Experiment Name: At_Germinating_Seeds_P Parameter: Age (hr) Value: 6 vs. 0
  misc_feature: MA Experiment 20000179 PARAMETER Experiment Name: At_Germinating_Seeds_P Parameter: Tissue Value: Germinating Seeds
  misc_feature: MA Experiment ID: 20000180 Result: Up-regulated in Transcription
  misc_feature: MA Experiment 20000180 PARAMETER Experiment Name: At_Germinating_Seeds_P Parameter: Age (hr) Value: 24 vs. 0
  misc_feature: MA Experiment 20000180 PARAMETER Experiment Name: At_Germinating_Seeds_P Parameter: Tissue Value: Germinating Seeds
  misc_feature: MA Experiment ID: 20000182 Result: Up-regulated in Transcription
  misc_feature: MA Experiment 20000182 PARAMETER Experiment Name: At_2mM_SA_P Parameter: Age (day) Value: 14
  misc_feature: MA Experiment 20000182 PARAMETER Experiment Name: At_2mM_SA_P Parameter: Organism Value: A. thaliana
  misc_feature: MA Experiment 20000182 PARAMETER Experiment Name: At_2mM_SA_P Parameter: Plant Line Value: WS
  misc_feature: MA Experiment 20000182 PARAMETER Experiment Name: At_2mM_SA_P Parameter: Timepoint (hr) Value: 6
  misc_feature: MA Experiment 20000182 PARAMETER Experiment Name: At_2mM_SA_P Parameter: Tissue Value: Aerial
  misc_feature: MA Experiment 20000182 PARAMETER Experiment Name: At_2mM_SA_P Parameter: Treatment Value: 2mM SA vs. No Treatment
  misc_feature: MA Experiment ID: 20000185 Result: Up-regulated in Transcription
  misc_feature: MA Experiment 20000185 PARAMETER Experiment Name: At_Roots__P Parameter: Age (day) Value: 7 vs. 21
  misc_feature: MA Experiment 20000185 PARAMETER Experiment Name: At_Roots__P Parameter: Organism Value: A. thaliana
  misc_feature: MA Experiment 20000185 PARAMETER Experiment Name: At_Roots__P Parameter: Tissue Value: Roots vs. Whole Plant
  misc_feature: MA Experiment ID: 20000227 Result: Down-regulated in Transcription
  misc_feature: MA Experiment 20000227 PARAMETER Experiment Name: At_Root-Tips-vs-Tops_P Parameter: Tissue Value: Root Tips vs. Root Tops
  misc_feature: MA Experiment ID: 20000438 Result: Down-regulated in Transcription
  misc_feature: MA Experiment 20000438 PARAMETER Experiment Name: At_Shoots__P Parameter: Age (day) Value: 14
  misc_feature: MA Experiment 20000438 PARAMETER Experiment Name: At_Shoots__P Parameter: Tissue Value: Shoots vs. Whole Plant
  misc_feature: MA Experiment ID: 20000439 Result: Up-regulated in Transcription
  misc_feature: MA Experiment 20000439 PARAMETER Experiment Name: At_Roots__P Parameter: Age (day) Value: 14 vs. 21
  misc_feature: MA Experiment 20000439 PARAMETER Experiment Name: At_Roots__P Parameter: Organism Value: A. thaliana
  misc_feature: MA Experiment 20000439 PARAMETER Experiment Name: At_Roots__P Parameter: Tissue Value: Roots vs. Whole Plant
  misc_feature: MA Experiment ID: 20000527 Result: Down-regulated in Transcription
  misc_feature: MA Experiment 20000527 PARAMETER Experiment Name: At_10percent_PEG_P Parameter: Age (day) Value: 20
  misc_feature: MA Experiment 20000527 PARAMETER Experiment Name: At_10percent_PEG_P Parameter: Organism Value: A. thaliana
  misc_feature: MA Experiment 20000527 PARAMETER Experiment Name: At_10percent_PEG_P Parameter: Plant Line Value: WS
  misc_feature: MA Experiment 20000527 PARAMETER Experiment Name: At_10percent_PEG_P Parameter: Timepoint (day) Value: 20
  misc_feature: MA Experiment 20000527 PARAMETER Experiment Name: At_10percent_PEG_P Parameter: Tissue Value: Whole Plant
  misc_feature: MA Experiment 20000527 PARAMETER Experiment Name: At_10percent_PEG_P Parameter: Treatment Value: 10percent PEG vs. No Treatment
  misc_feature: MA Experiment ID: 20000794 Result: Up-regulated in Transcription
  misc_feature: MA Experiment 20000794 PARAMETER Experiment Name: At_Petals_P Parameter: Age (day) Value: 23-25 days
  misc_feature: MA Experiment 20000794 PARAMETER Experiment Name: At_Petals_P Parameter: Plant Line Value: WS
  misc_feature: MA Experiment 20000794 PARAMETER Experiment Name: At_Petals_P Parameter: Tissue Value: Petals vs. Whole plant
  misc_feature: MA Experiment ID: 20001451 Result: Up-regulated in Transcription
  misc_feature: MA Experiment 20001451 PARAMETER Experiment Name: At_Far-red-induction_P Parameter: Age (day) Value: 7
  misc_feature: MA Experiment 20001451 PARAMETER Experiment Name: At_Far-red-induction_P Parameter: Light Value: Far-red vs. White
  misc_feature: MA Experiment 20001451 PARAMETER Experiment Name: At_Far-red-induction_P Parameter: Organism Value: A. thaliana
  misc_feature: MA Experiment 20001451 PARAMETER Experiment Name: At_Far-red-induction_P Parameter: Plant Line Value: Columbia
  misc_feature: MA Experiment 20001451 PARAMETER Experiment Name: At_Far-red-induction_P Parameter: Timepoint (hr) Value: 24
  misc_feature: MA Experiment 20001451 PARAMETER Experiment Name: At_Far-red-induction_P Parameter: Tissue Value: Whole Plant
  misc_feature: MA Experiment ID: 20001554 Result: Down-regulated in Transcription
  misc_feature: MA Experiment 20001554 PARAMETER Experiment Name: At_Drought_Soil_Dry_P Parameter: Age (day) Value: 21
  misc_feature: MA Experiment 20001554 PARAMETER Experiment Name: At_Drought_Soil_Dry_P Parameter: Organism Value: A. thaliana
  misc_feature: MA Experiment 20001554 PARAMETER Experiment Name: At_Drought_Soil_Dry_P Parameter: Plant Line Value: WS
  misc_feature: MA Experiment 20001554 PARAMETER Experiment Name: At_Drought_Soil_Dry_P Parameter: Post Timepoint (hr) Value: None
  misc_feature: MA Experiment 20001554 PARAMETER Experiment Name: At_Drought_Soil_Dry_P Parameter: Post-Treatment Value: None
  misc_feature: MA Experiment 20001554 PARAMETER Experiment Name: At_Drought_Soil_Dry_P Parameter: Timepoint (day) Value: 7
  misc_feature: MA Experiment 20001554 PARAMETER Experiment Name: At_Drought_Soil_Dry_P Parameter: Treatment Value: Drought vs. No Drought
  misc_feature: MA Experiment ID: 20001556 Result: Down-regulated in Transcription
  misc_feature: MA Experiment 20001556 PARAMETER Experiment Name: At_Drought_Soil_Dry_P Parameter: Age (day) Value: 26
  misc_feature: MA Experiment 20001556 PARAMETER Experiment Name: At_Drought_Soil_Dry_P Parameter: Organism Value: A. thaliana
  misc_feature: MA Experiment 20001556 PARAMETER Experiment Name: At_Drought_Soil_Dry_P Parameter: Plant Line Value: WS
  misc_feature: MA Experiment 20001556 PARAMETER Experiment Name: At_Drought_Soil_Dry_P Parameter: Post Timepoint (hr) Value: None
  misc_feature: MA Experiment 20001556 PARAMETER Experiment Name: At_Drought_Soil_Dry_P Parameter: Post-Treatment Value: None
  misc_feature: MA Experiment 20001556 PARAMETER Experiment Name: At_Drought_Soil_Dry_P Parameter: Timepoint (day) Value: 12
  misc_feature: MA Experiment 20001556 PARAMETER Experiment Name: At_Drought_Soil_Dry_P Parameter: Treatment Value: Drought vs. No Drought
  misc_feature: MA Experiment ID: 20001911 Result: Down-regulated in Transcription
  misc_feature: MA Experiment 20001911 PARAMETER Experiment Name: At_Drought_Reproduction_P Parameter: Age (day) Value: 40
  misc_feature: MA Experiment 20001911 PARAMETER Experiment Name: At_Drought_Reproduction_P Parameter: Organism Value: A. thaliana
  misc_feature: MA Experiment 20001911 PARAMETER Experiment Name: At_Drought_Reproduction_P Parameter: Plant Line Value: WS
  misc_feature: MA Experiment 20001911 PARAMETER Experiment Name: At_Drought_Reproduction_P Parameter: Timepoint (day) Value: 10
  misc_feature: MA Experiment 20001911 PARAMETER Experiment Name: At_Drought_Reproduction_P Parameter: Tissue Value: Flowers
  misc_feature: MA Experiment 20001911 PARAMETER Experiment Name: At_Drought_Reproduction_P Parameter: Treatment Value: Drought vs. No Drought
gtccgaattctccaagtctctcatcatcacacccactccaacaaactttctacgagagaaaaaaacaaaaagaaaaacaaacaatggagaatcttgtaggtcttcttcgaattcatgtgaaaagaggtgtgaatctcgccattagagacatctcaagcagtgatccttacatcgtcgttcactgcggtaaacagaagttgaaaacacgcgtggtgaaacatagtgtaaaccccgagtggaacgacgacttgacactttccgtgactgatccgaatctcccgattaaacttacggtttatgactatgacttgctctccgcggatgacaagatgggagaagccgagttccacattggtccatttattgaagctattaaatttgcccatcagctcggaccaggacttcctaatgggaccataataaagaagatagagccgagcagaaaaaattgtttgtctgaatcaagccacattgtgttgaaccaaggcaagattgtccagaatatgttccttagactccagcacgtggagtgtggagaggttgagctacagctcgagtggatcgatgtcccgggttcaaggggtatttaggtcaaatcatatcgatccgatctttattagtcccttgtgcatatggttagaaactagaactatggtgcagtttaaaactggtcaatgaaagaatctcaaactggcttgtgtaataaactcatttcgttttttttttctcttgtttgattccaaaaagtttgcaattccatgaggagtaagtgtaaacatttggatatctacataaatatcctgtcttattagcgtgaattgtgtagac

SEQ ID NO: 77416 - protein, 195 aa, Arabidopsis thaliana
  peptide (1)..(195): Ceres Seq. ID no. 12576326
  misc_feature (35)..(114): Pfam Name: C2 domain Pfam Description: C2 domain
  misc_feature (28)..(195): Homolog of NCBI NO: 15240322 NR Description: putative protein; protein id: At5g37740.1, by cDNA: gi_18377800, supported by cDNA: gi_21281220 [Arabidopsis
  misc_feature (28)..(192): Homolog of NCBI NO: 18408493 NR Description: expressed protein; protein id: At1g66360.1, by cDNA: 19307. [Arabidopsis thaliana] >gi|25404615|pir||H96688
  misc_feature (28)..(195): Homolog of NCBI NO: 30684739 NR Description: C2 domain-containing protein [Arabidopsis
  misc_feature (14)..(195): Homolog of NCBI NO: 15221907 NR Description: unknown protein; protein id: At1g48590.1
  misc_feature (19)..(195): Homolog of NCBI NO: 25405940 NR Description: protein T1N15.21 [imported] - Arabidopsis >gi|8778695|gb|AAF79703.1|AC020889_11 T1N15.21 [Arabidopsis
  misc_feature (28)..(195): Homolog of NCBI NO: 15219500 NR Description: hypothetical protein; protein id: At1g73580.1
  misc_feature (28)..(195): Homolog of NCBI NO: 18409682 NR Description: expressed protein; protein id: At1g70810.1, by cDNA: 23322., supported by cDNA: gi_13430459 [Arabidopsis
  misc_feature (28)..(195): Homolog of NCBI NO: 13430460 NR Description: unknown protein [Arabidopsis thaliana]
  misc_feature (32)..(195): Homolog of NCBI NO: 15226306 NR Description: hypothetical protein; protein id: At2g01540.1, by cDNA: gi_17065055, supported by cDNA: gi_20260029 [Arabidopsis >gi|25410912|pir||A84426 hypothetical protein At2g01540
  misc_feature (28)..(191): Homolog of NCBI NO: 33146442 NR Description: zinc finger and C2 domain protein-like [Oryza
PNSPSLSSSHPLQQTFYERKKQKEKQTMENLVGLLRIHVKRGVNLAIRDISSSDPYIVVHCGKQKLKTRVVKHSVNPEWNDDLTLSVTDPNLPIKLTVYDYDLLSADDKMGEAEFHIGPFIEAIKFAHQLGPGLPNGTIIKKIEPSRKNCLSESSHIVLNQGKIVQNMFLRLQHVECGEVELQLEWIDVPGSRGI

SEQ ID NO: 77417 - protein, 168 aa, Arabidopsis thaliana
  peptide (1)..(168): Ceres Seq. ID no. 12576327
  misc_feature (8)..(87): Pfam Name: C2 domain Pfam Description: C2 domain
  misc_feature (1)..(168): Homolog of NCBI NO: 15240322 NR Description: putative protein; protein id: At5g37740.1, by cDNA: gi_18377800, supported by cDNA: gi_21281220 [Arabidopsis
  misc_feature (1)..(165): Homolog of NCBI NO: 18408493 NR Description: expressed protein; protein id: At1g66360.1, by cDNA: 19307. [Arabidopsis thaliana] >gi|25404615|pir||H96688
  misc_feature (1)..(168): Homolog of NCBI NO: 30684739 NR Description: C2 domain-containing protein [Arabidopsis
  misc_feature (1)..(168): Homolog of NCBI NO: 15221907 NR Description: unknown protein; protein id: At1g48590.1
  misc_feature (1)..(168): Homolog of NCBI NO: 25405940 NR Description: protein T1N15.21 [imported] - Arabidopsis >gi|8778695|gb|AAF79703.1|AC020889_11 T1N15.21 [Arabidopsis
  misc_feature (1)..(168): Homolog of NCBI NO: 15219500 NR Description: hypothetical protein; protein id: At1g73580.1
  misc_feature (1)..(168): Homolog of NCBI NO: 18409682 NR Description: expressed protein; protein id: At1g70810.1, by cDNA: 23322., supported by cDNA: gi_13430459 [Arabidopsis
  misc_feature (1)..(168): Homolog of NCBI NO: 13430460 NR Description: unknown protein [Arabidopsis thaliana]
  misc_feature (5)..(168): Homolog of NCBI NO: 15226306 NR Description: hypothetical protein; protein id: At2g01540.1, by cDNA: gi_17065055, supported by cDNA: gi_20260029 [Arabidopsis >gi|25410912|pir||A84426 hypothetical protein At2g01540
  misc_feature (1)..(164): Homolog of NCBI NO: 33146442 NR Description: zinc finger and C2 domain protein-like [Oryza
MENLVGLLRIHVKRGVNLAIRDISSSDPYIVVHCGKQKLKTRVVKHSVNPEWNDDLTLSVTDPNLPIKLTVYDYDLLSADDKMGEAEFHIGPFIEAIKFAHQLGPGLPNGTIIKKIEPSRKNCLSESSHIVLNQGKIVQNMFLRLQHVECGEVELQLEWIDVPGSRGI

SEQ ID NO: 77418 - DNA, 1684 bp, Arabidopsis thaliana
  misc_feature (1)..(1684): Ceres Seq. ID no. 12576352
  misc_feature: MA Experiment ID: 108434 Result: Down-regulated in Transcription
  misc_feature: MA Experiment 108434 PARAMETER Experiment Name: At_Root_Tips_cDNA_P Parameter: Tissue Value: Root Tips
  misc_feature: MA Experiment ID: 108572 Result: Up-regulated in Transcription
  misc_feature: MA Experiment 108572 PARAMETER Experiment Name: At_Drought_cDNA_P Parameter: Timepoint (hr) Value: 1
  misc_feature: MA Experiment 108572 PARAMETER Experiment Name: At_Drought_cDNA_P Parameter: Tissue Value: Aerial
  misc_feature: MA Experiment 108572 PARAMETER Experiment Name: At_Drought_cDNA_P Parameter: Treatment Value: Drought vs. No Drought
  misc_feature: MA Experiment ID: 108573 Result: Up-regulated in Transcription
  misc_feature: MA Experiment 108573 PARAMETER Experiment Name: At_Drought_cDNA_P Parameter: Timepoint (hr) Value: 6
  misc_feature: MA Experiment 108573 PARAMETER Experiment Name: At_Drought_cDNA_P Parameter: Tissue Value: Aerial
  misc_feature: MA Experiment 108573 PARAMETER Experiment Name: At_Drought_cDNA_P Parameter: Treatment Value: Drought vs. No Drought
  misc_feature: MA Experiment ID: 108574 Result: Up-regulated in Transcription
  misc_feature: MA Experiment 108574 PARAMETER Experiment Name: At_Wounding__cDNA_P Parameter: Timepoint (hr) Value: 1
  misc_feature: MA Experiment 108574 PARAMETER Experiment Name: At_Wounding__cDNA_P Parameter: Tissue Value: Aerial
  misc_feature: MA Experiment 108574 PARAMETER Experiment Name: At_Wounding__cDNA_P Parameter: Treatment Value: Wounding vs. No Wounding
  misc_feature: MA Experiment ID: 108595 Result: Up-regulated in Transcription
  misc_feature: MA Experiment 108595 PARAMETER Experiment Name: At_Ler-pi_Ovule_cDNA_P Parameter: Plant Line Value: null
  misc_feature: MA Experiment ID: 108607 Result: Up-regulated in Transcription
  misc_feature: MA Experiment 108607 PARAMETER Experiment Name: At_100uM_ABA_cDNA_P Parameter: Timepoint (hr) Value: 4
  misc_feature: MA Experiment 108607 PARAMETER Experiment Name: At_100uM_ABA_cDNA_P Parameter: Tissue Value: Aerial
  misc_feature: MA Experiment 108607 PARAMETER Experiment Name: At_100uM_ABA_cDNA_P Parameter: Treatment Value: 100uM ABA vs. No Treatment
  misc_feature: MA Experiment ID: 108608 Result: Up-regulated in Transcription
  misc_feature: MA Experiment 108608 PARAMETER Experiment Name: At_100uM_ABA_cDNA_P Parameter: Timepoint (hr) Value: 1
  misc_feature: MA Experiment 108608 PARAMETER Experiment Name: At_100uM_ABA_cDNA_P Parameter: Tissue Value: Aerial
  misc_feature: MA Experiment 108608 PARAMETER Experiment Name: At_100uM_ABA_cDNA_P Parameter: Treatment Value: 100uM ABA vs. No Treatment
  misc_feature: MA Experiment ID: 20000069 Result: Up-regulated in Transcription
  misc_feature: MA Experiment 20000069 PARAMETER Experiment Name: At_100uM_ABA_Mutants_cDNA_P Parameter: Plant Line Value: CS23
  misc_feature: MA Experiment 20000069 PARAMETER Experiment Name: At_100uM_ABA_Mutants_cDNA_P Parameter: Timepoint (hr) Value: 6
  misc_feature: MA Experiment 20000069 PARAMETER Experiment Name: At_100uM_ABA_Mutants_cDNA_P Parameter: Tissue Value: Aerial
  misc_feature: MA Experiment 20000069 PARAMETER Experiment Name: At_100uM_ABA_Mutants_cDNA_P Parameter: Treatment Value: 100uM ABA vs. No Treatment
  misc_feature: MA Experiment ID: 20000070 Result: Up-regulated in Transcription
  misc_feature: MA Experiment 20000070 PARAMETER Experiment Name: At_100uM_ABA_Mutants_cDNA_P Parameter: Plant Line Value: CS24
  misc_feature: MA Experiment 20000070 PARAMETER Experiment Name: At_100uM_ABA_Mutants_cDNA_P Parameter: Timepoint (hr) Value: 6
  misc_feature: MA Experiment 20000070 PARAMETER Experiment Name: At_100uM_ABA_Mutants_cDNA_P Parameter: Tissue Value: Aerial
  misc_feature: MA Experiment 20000070 PARAMETER Experiment Name: At_100uM_ABA_Mutants_cDNA_P Parameter: Treatment Value: 100uM ABA vs. No Treatment
  misc_feature: MA Experiment ID: 20000111 Result: Up-regulated in Transcription
  misc_feature: MA Experiment 20000111 PARAMETER Experiment Name: At_42deg_Heat_cDNA_P Parameter: Temperature (deg C) Value: 42 vs. 22
  misc_feature: MA Experiment 20000111 PARAMETER Experiment Name: At_42deg_Heat_cDNA_P Parameter: Timepoint (hr) Value: 6
  misc_feature: MA Experiment 20000111 PARAMETER Experiment Name: At_42deg_Heat_cDNA_P Parameter: Tissue Value: Aerial
  misc_feature: MA Experiment ID: 20000112 Result: Up-regulated in Transcription
  misc_feature: MA Experiment 20000112 PARAMETER Experiment Name: At_42deg_Heat_cDNA_P Parameter: Temperature (deg C) Value: 42 vs. 22
  misc_feature: MA Experiment 20000112 PARAMETER Experiment Name: At_42deg_Heat_cDNA_P Parameter: Timepoint (hr) Value: 2
  misc_feature: MA Experiment 20000112 PARAMETER Experiment Name: At_42deg_Heat_cDNA_P Parameter: Tissue Value: Aerial
  misc_feature: MA Experiment ID: 20000113 Result: Up-regulated in Transcription
  misc_feature: MA Experiment 20000113 PARAMETER Experiment Name: At_42deg_Heat_cDNA_P Parameter: Temperature (deg C) Value: 42 vs. 22
  misc_feature: MA Experiment 20000113 PARAMETER Experiment Name: At_42deg_Heat_cDNA_P Parameter: Timepoint (hr) Value: 8
  misc_feature: MA Experiment 20000113 PARAMETER Experiment Name: At_42deg_Heat_cDNA_P Parameter: Tissue Value: Aerial
  misc_feature: MA Experiment ID: 20000166 Result: Up-regulated in Transcription
  misc_feature: MA Experiment 20000166 PARAMETER Experiment Name: At_100uM_ABA_P Parameter: Age (day) Value: 14
  misc_feature: MA Experiment 20000166 PARAMETER Experiment Name: At_100uM_ABA_P Parameter: Organism Value: A. thaliana
  misc_feature: MA Experiment 20000166 PARAMETER Experiment Name: At_100uM_ABA_P Parameter: Plant Line Value: WS
  misc_feature: MA Experiment 20000166 PARAMETER Experiment Name: At_100uM_ABA_P Parameter: Timepoint (hr) Value: 1
  misc_feature: MA Experiment 20000166 PARAMETER Experiment Name: At_100uM_ABA_P Parameter: Tissue Value: Aerial
  misc_feature: MA Experiment 20000166 PARAMETER Experiment Name: At_100uM_ABA_P Parameter: Treatment Value: 100uM ABA vs. No Treatment
  misc_feature: MA Experiment ID: 20000173 Result: Up-regulated in Transcription
  misc_feature: MA Experiment 20000173 PARAMETER Experiment Name: At_42deg_Heat_P Parameter: Age (day) Value: 14
  misc_feature: MA Experiment 20000173 PARAMETER Experiment Name: At_42deg_Heat_P Parameter: Organism Value: A. thaliana
  misc_feature: MA Experiment 20000173 PARAMETER Experiment Name: At_42deg_Heat_P Parameter: Plant Line Value: WS
  misc_feature: MA Experiment 20000173 PARAMETER Experiment Name: At_42deg_Heat_P Parameter: Temperature (deg C) Value: 42 vs. 22
  misc_feature: MA Experiment 20000173 PARAMETER Experiment Name: At_42deg_Heat_P Parameter: Timepoint (hr) Value: 6
  misc_feature: MA Experiment 20000173 PARAMETER Experiment Name: At_42deg_Heat_P Parameter: Tissue Value: Aerial
  misc_feature: MA Experiment ID: 20000184 Result: Down-regulated in Transcription
  misc_feature: MA Experiment 20000184 PARAMETER Experiment Name: At_Shoots__P Parameter: Age (day) Value: 7
  misc_feature: MA Experiment 20000184 PARAMETER Experiment Name: At_Shoots__P Parameter: Tissue Value: Shoots vs. Whole Plant
  misc_feature: MA Experiment ID: 20000437 Result: Up-regulated in Transcription
  misc_feature: MA Experiment 20000437 PARAMETER Experiment Name: At_Drought_P Parameter: Age (day) Value: 8
  misc_feature: MA Experiment 20000437 PARAMETER Experiment Name: At_Drought_P Parameter: Organism Value: A. thaliana
  misc_feature: MA Experiment 20000437 PARAMETER Experiment Name: At_Drought_P Parameter: Plant Line Value: WS
  misc_feature: MA Experiment 20000437 PARAMETER Experiment Name: At_Drought_P Parameter: Timepoint (hr) Value: 24
  misc_feature: MA Experiment 20000437 PARAMETER Experiment Name: At_Drought_P Parameter: Tissue Value: Whole Plant
  misc_feature: MA Experiment 20000437 PARAMETER Experiment Name: At_Drought_P Parameter: Treatment Value: Drought vs. No Drought
  misc_feature: MA Experiment ID: 20000439 Result: Up-regulated in Transcription
  misc_feature: MA Experiment 20000439 PARAMETER Experiment Name: At_Roots__P Parameter: Age (day) Value: 14 vs. 21
  misc_feature: MA Experiment 20000439 PARAMETER Experiment Name: At_Roots__P Parameter: Organism Value: A. thaliana
  misc_feature: MA Experiment 20000439 PARAMETER Experiment Name: At_Roots__P Parameter: Tissue Value: Roots vs. Whole Plant
  misc_feature: MA Experiment ID: 20001905 Result: Up-regulated in Transcription
  misc_feature: MA Experiment 20001905 PARAMETER Experiment Name: At_Drought_Reproduction_P Parameter: Age (day) Value: 40
  misc_feature: MA Experiment 20001905 PARAMETER Experiment Name: At_Drought_Reproduction_P Parameter: Organism Value: A. thaliana
  misc_feature: MA Experiment 20001905 PARAMETER Experiment Name: At_Drought_Reproduction_P Parameter: Plant Line Value: WS
  misc_feature: MA Experiment 20001905 PARAMETER Experiment Name: At_Drought_Reproduction_P Parameter: Timepoint (day) Value: 10
  misc_feature: MA Experiment 20001905 PARAMETER Experiment Name: At_Drought_Reproduction_P Parameter: Tissue Value: Rosettes
  misc_feature: MA Experiment 20001905 PARAMETER Experiment Name: At_Drought_Reproduction_P Parameter: Treatment Value: Drought vs. No Drought
tgtttgtcactaagctctctctctctccttcttcttcgacttttttttttcttcctctcttctctttggttttttggtgttgggttttatctgggttcctgatttcttcaacgaggaaggaaggaagaagaagagaaaagggacaagcgagaattactcttttctccttcaatttccgatgggttgtttcggatgcagtaagaaatcgagcaaacgatccgagactaacaaagatactgtcataaatagaaaaattgtcggtggtactacgagcgttgctaagagtgataagcgagacgatcagactcagcccagttcagattcaacaaaagtcagtccatatagagatgtaaacaatgaaggaggagttggtaaggaagatcagttatctttggatgtgaagggtttgaatctaaatgaccaagtcacagggaagaaagcacagacttttacttttcaagaacttgcagaagctacgggaaactttagatcggattgttttcttggtgaaggaggtttcggaaaagttttcaagggaactatagagaaattggatcaggttgttgcaatcaagcaacttgatcgtaatggggttcaaggaatcagggaatttgtggttgaggtattgactctaagtcttgctgaccatccgaatcttgtgaagcttattgggttttgtgctgagggtgatcagagactactggtgtacgagtatatgccgcaaggatcccttgaagatcatctacatgttctcccttctggtaaaaagcctcttgactggaacacccggatgaaaatagcagctggtgcagcaagaggtttagagtatctgcatgacagaatgacgccccctgtgatttaccgagatcttaaatgttcgaatattttgcttggtgaagactatcaaccgaaactatctgactttgggttggctaaagtaggaccaagcggggataaaacccatgtctcgacaagggttatgggaacgtacggatactgtgctcctgactacgctatgacgggtcagctcacatttaaatccgatatatacagttttggagtagtccttctcgagcttatcaccggaaggaaagcgattgacaatacaaaaacgcgtaaagatcagaatttggttggatgggcacgaccattgttcaaagacaggaggaacttcccaaaaatggttgatccattgcttcagggacaatacccagttagaggactgtaccaagcactagcaatatcagcaatgtgcgttcaagagcagcctaccatgagaccagtggtatctgatgtagtattggctctcaacttcttagcctcttctaaatatgatccgaatagccctagcagcagcagcgggaagaacccttcttttcacagagacagagatgatgaagagaaaagaccacacctcgtcaaggaaactgaatgtgaagggtcctcataggatatccaataagagagtggtaaaaaatcaaatctaattttggcttcaccaagaaattggggaaaaatataaaaccaactcaggtacatttttaacatctattgtggatgtaaatcttgactcggcttctttgtatgtagaatgtttctgttctgtagaaaaggaaaaaaaaaaaaaaccattttgttttgggacatatatacatatattgaacaaaaacaaatatcgttggtc

SEQ ID NO: 77419 - protein, 423 aa, Arabidopsis thaliana; identical to SEQ ID NO: 24904
  peptide (1)..(423): Ceres Seq. ID no. 12576353
  misc_feature (1)..(423): Homolog of NCBI NO: 15223024 NR Description: protein kinase, putative (fragment); protein id: supported by cDNA: gi_18176233, supported by cDNA: gi_20465778 thaliana] >gi|25287629|pir||B86214 hypothetical protein
  misc_feature (1)..(399): Homolog of NCBI NO: 7573596 NR Description: protein kinase 1 [Populus nigra]
  misc_feature (3)..(410): Homolog of NCBI NO: 7573598 NR Description: protein kinase 2 [Populus nigra]
  misc_feature (1)..(409): Homolog of NCBI NO: 15226901 NR Description: putative protein kinase; protein id: At2g28590.1
  misc_feature (49)..(406): Homolog of NCBI NO: 15238886 NR Description: protein kinase -like protein; protein id:
  misc_feature (29)..(389): Homolog of NCBI NO: 34394036 NR Description: putative protein serine/threonine kinase BNK1
  misc_feature (36)..(405): Homolog of NCBI NO: 34907210 NR Description: putative serine/threonine kinase PBS1 protein
  misc_feature (36)..(389): Homolog of NCBI NO: 10445209 NR Description: protein serine/threonine kinase BNK1 [Brassica
  misc_feature (88)..(404): Homolog of NCBI NO: 11259782 NR Description: protein kinase-like - Arabidopsis thaliana
  misc_feature (88)..(387): Homolog of NCBI NO: 30679773 NR Description: protein kinase family [Arabidopsis thaliana]

SEQ ID NO: 77420 - protein, 244 aa, Arabidopsis thaliana; identical to SEQ ID NO: 24905
  peptide (1)..(244): Ceres Seq. ID no. 12576354
  misc_feature (1)..(244): Homolog of NCBI NO: 15223024 NR Description: protein kinase, putative (fragment); protein id: supported by cDNA: gi_18176233, supported by cDNA: gi_20465778 thaliana] >gi|25287629|pir||B86214 hypothetical protein
  misc_feature (1)..(220): Homolog of NCBI NO: 7573596 NR Description: protein kinase 1 [Populus nigra]
  misc_feature (1)..(231): Homolog of NCBI NO: 7573598 NR Description: protein kinase 2 [Populus nigra]
  misc_feature (1)..(230): Homolog of NCBI NO: 15226901 NR Description: putative protein kinase; protein id: At2g28590.1
  misc_feature (1)..(227): Homolog of NCBI NO: 15238886 NR Description: protein kinase -like protein; protein id:
  misc_feature (1)..(210): Homolog of NCBI NO: 34394036 NR Description: putative protein serine/threonine kinase BNK1
  misc_feature (1)..(226): Homolog of NCBI NO: 34907210 NR Description: putative serine/threonine kinase PBS1 protein
  misc_feature (1)..(210): Homolog of NCBI NO: 10445209 NR Description: protein serine/threonine kinase BNK1 [Brassica
  misc_feature (1)..(225): Homolog of NCBI NO: 11259782 NR Description: protein kinase-like - Arabidopsis thaliana
  misc_feature (1)..(208): Homolog of NCBI NO: 30679773 NR Description: protein kinase family [Arabidopsis thaliana]

SEQ ID NO: 77421 - protein, 219 aa, Arabidopsis thaliana
  peptide (1)..(219): Ceres Seq. ID no. 12576355
  misc_feature (1)..(219): Homolog of NCBI NO: 15223024 NR Description: protein kinase, putative (fragment); protein id: supported by cDNA: gi_18176233, supported by cDNA: gi_20465778 thaliana] >gi|25287629|pir||B86214 hypothetical protein
  misc_feature (1)..(195): Homolog of NCBI NO: 7573596 NR Description: protein kinase 1 [Populus nigra]
  misc_feature (1)..(206): Homolog of NCBI NO: 7573598 NR Description: protein kinase 2 [Populus nigra]
  misc_feature (1)..(205): Homolog of NCBI NO: 15226901 NR Description: putative protein kinase; protein id: At2g28590.1
  misc_feature (1)..(202): Homolog of NCBI NO: 15238886 NR Description: protein kinase -like protein; protein id:
  misc_feature (1)..(185): Homolog of NCBI NO: 34394036 NR Description: putative protein serine/threonine kinase BNK1
  misc_feature (1)..(201): Homolog of NCBI NO: 34907210 NR Description: putative serine/threonine kinase PBS1 protein
  misc_feature (1)..(185): Homolog of NCBI NO: 10445209 NR Description: protein serine/threonine kinase BNK1 [Brassica
  misc_feature (1)..(200): Homolog of NCBI NO: 11259782 NR Description: protein kinase-like - Arabidopsis thaliana
  misc_feature (1)..(183): Homolog of NCBI NO: 30679773 NR Description: protein kinase family [Arabidopsis thaliana]
MKIAAGAARGLEYLHDRMTPPVIYRDLKCSNILLGEDYQPKLSDFGLAKVGPSGDKTHVSTRVMGTYGYCAPDYAMTGQLTFKSDIYSFGVVLLELITGRKAIDNTKTRKDQNLVGWARPLFKDRRNFPKMVDPLLQGQYPVRGLYQALAISAMCVQEQPTMRPVVSDVVLALNFLASSKYDPNSPSSSSGKNPSFHRDRDDEEKRPHLVKETECEGSS

SEQ ID NO: 77422 - DNA, 2455 bp, Arabidopsis thaliana
  misc_feature (1)..(2455): Ceres Seq. ID no. 12576356
  misc_feature: MA Experiment ID: 20000438 Result: Up-regulated in Transcription
  misc_feature: MA Experiment 20000438 PARAMETER Experiment Name: At_Shoots__P Parameter: Age (day) Value: 14
  misc_feature: MA Experiment 20000438 PARAMETER Experiment Name: At_Shoots__P Parameter: Tissue Value: Shoots vs. Whole Plant
  misc_feature: MA Experiment ID: 20000794 Result: Up-regulated in Transcription
  misc_feature: MA Experiment 20000794 PARAMETER Experiment Name: At_Petals_P Parameter: Age (day) Value: 23-25 days
  misc_feature: MA Experiment 20000794 PARAMETER Experiment Name: At_Petals_P Parameter: Plant Line Value: WS
  misc_feature: MA Experiment 20000794 PARAMETER Experiment Name: At_Petals_P Parameter: Tissue Value: Petals vs. Whole plant
  misc_feature: MA Experiment ID: 20001248 Result: Down-regulated in Transcription
  misc_feature: MA Experiment 20001248 PARAMETER Experiment Name: At_Far-red-induction_P Parameter: Age (day) Value: 7
  misc_feature: MA Experiment 20001248 PARAMETER Experiment Name: At_Far-red-induction_P Parameter: Light Value: Far-red vs. White
  misc_feature: MA Experiment 20001248 PARAMETER Experiment Name: At_Far-red-induction_P Parameter: Organism Value: A. thaliana
  misc_feature: MA Experiment 20001248 PARAMETER Experiment Name: At_Far-red-induction_P Parameter: Plant Line Value: Columbia
  misc_feature: MA Experiment 20001248 PARAMETER Experiment Name: At_Far-red-induction_P Parameter: Timepoint (hr) Value: 4
  misc_feature: MA Experiment 20001248 PARAMETER Experiment Name: At_Far-red-induction_P Parameter: Tissue Value: Whole Plant
acaacaaatatctctctctctctcgctctctctcgctctctctttcttcttcttcatcttctttcatggctgttactggctgggcaatcacaatctgaattctttcttcctccttgtctctctgattttcgccgagttttgggggctcttgttgttacacgatgagtctggtggttggtcagtctctgggtttaactctagtcggtgatggtctttcgttacgcaattccaaaataaatgtcggaaaatcaaagtttttctcggtaaatcggaggagattggcgcgtgcggccctggtacaagctaggcctaaggaagacggagcggcggcaagtccttccccatcgtcgagaccggcgtcagttgtgcagtaccgacgagctgatctcgcggatgatcttcaagccgaggcacgagctttgggtcgtgctattgatgcttctatttactctccggagctcatcgccaggaaacatggctctcagcctttcaaggctttgcggagaagtttggagatattgggagctttgggtggtttcgctttgaaattggggattgaccagaagcagggcaacttagagaagaacatgaagaagagagcaatcgagctccggcggatcttcactcgtctcggacctacttttgttaaattgggtcaaggtttgtccacccgacccgacctctgtccacccgattaccttgaagaacttgcagagcttcaggatgctttgccaaccttccctgatgcagaggcatttgcttgcattgagagagagttggatttgtcgctagagaccattttctcgtctgtatctcctgagccaatcgcagcagctagtcttggccaggtttacaaagctcagctgaggtattcaggtcaggttgttgctgtcaaagttcaacgccctgggatcgaagaagccattggccttgatttttaccttattagaggagttgggaaactcattaacaagtatgtagacttcatcactaccgatgtccttacccttatcgatgagttcgcctgcagagtttatcaggagctaaactatgtccaggaggcccaaaatgccagaaggtttaaaaaattgtatgcagataaagcagatgttcttgtgcctgatatattctgggattacacgagccgcaaggtgctaacaatggaatgggttgagggaactaaactgaatgagcaacttgccattgagagtcagggattgaaggttctggatctcgtgaatacaggaatccagtgtagcctaaggcaactcttggagtatggctttttccatgctgaccctcatcctggtaatctcttggcaacacctgatggaaaacttgcctttctagactttggcatgatgagtgagacaccagaggaagctagatttgctatcataggccatgttgtccatttagtgaaccgagattatgaagccatggcacgagattactatgctctgaagttcttgtcccctgatgtggatgttactcctatcataccagctctcagagacttctttgacgatgcacttaattataccgtgagcgagctcaatttcaaaactttggttgatggtctaggtgctgtcttctaccagtatccatttaatgtcccgccctactatgctttgattttgaggtcgcttactgtgcttgaaggtttggcactctacgcagatcctaatttcaaagtactagctgcttcatacccatattttgccaaaaggcttctcactgatccaaacccgtatctaagagatgcccttatcgagctactattcaaagacggaaaatttaggtggaatagactcgagaaccttctacaacagggaagtaaagatagagacttctcagcaaaggatgctctacaaccagttttgaagcttttgctggatccaaatggcgaagaacttcgattgttagtaattaaagaagctgtacgagtcagtgaagcaattgcgctgggcactgttgttgatacatacaattcccttcctgagtttctgagatctcttgtcttcaatggaaatgggaatggccctcttacaatgagtaccgcggaacttcaaagtacgcttgagcttcgggatcaggtctccagaatctggggccttcttcaatcttcagaaagctttgatcctgctattttgcaaccaatactacaggtgttacaacaaccagaggcacgaagacttggaggacgtgttgcaggcggtgtaggccaacgtcttgcagctcggtttctgcaacaacttcttcgagccacaacaccatcttctgcaccatccccataggtcctcttttcttctcagtgaaatggtaaattgtatattaaggcgagacactcgcaaaccacagaattgtttcatgttacagtaatatagtatcattctttctctttgtattgtactagtgaaaaaggaccaaagtataaccaatgagaaatacctcc

SEQ ID NO: 77423 - protein, 711 aa, Arabidopsis thaliana
  peptide (1)..(711): Ceres Seq. ID no. 12576357
  misc_feature (204)..(323): Pfam Name: ABC1 family Pfam Description: ABC1 family
  misc_feature (143)..(711): Homolog of NCBI NO: 14532490 NR Description: At1g79600/F20B17_3 [Arabidopsis thaliana]
  misc_feature (51)..(700): Homolog of NCBI NO: 23042448 NR Description: hypothetical protein [Trichodesmium erythraeum
  misc_feature (95)..(708): Homolog of NCBI NO: 17232452 NR Description: hypothetical protein [Nostoc sp. PCC 7120]
  misc_feature (96)..(702): Homolog of NCBI NO: 22298493 NR Description: ORF_ID:tll0950~hypothetical protein
  misc_feature (96)..(711): Homolog of NCBI NO: 16331408 NR Description: ABC1-like [Synechocystis sp. PCC 6803]
  misc_feature (96)..(597): Homolog of NCBI NO: 37522693 NR Description: hypothetical protein glr3124 [Gloeobacter
  misc_feature (87)..(697): Homolog of NCBI NO: 33867054 NR Description: possible protein kinase: ABC1 family sp. WH 8102] >gi|33639655|emb|CAE09039.1| possible protein
  misc_feature (87)..(697): Homolog of NCBI NO: 33864536 NR Description: possible protein kinase:ABC1 family marinus str. MIT 9313] >gi|33641316|emb|CAE22446.1| possible
  misc_feature (96)..(697): Homolog of NCBI NO: 33862270 NR Description: possible protein kinase:ABC1 family marinus subsp. pastoris str. CCMP1378] possible protein kinase:ABC1 family [Prochlorococcus marinus
  misc_feature (87)..(697): Homolog of NCBI NO: 33241332 NR Description: Predicted protein kinase [Prochlorococcus marinus marinus str. CCMP1375] >gi|33238862|gb|AAQ00927.1| Predicted
MSLVVGQSLGLTLVGDGLSLRNSKINVGKSKFFSVNRRRLARAALVQARPKEDGAAASPSPSSRPASVVQYRRADLADDLQAEARALGRAIDASIYSPELIARKHGSQPFKALRRSLEILGALGGFALKLGIDQKQGNLEKNMKKRAIELRRIFTRLGPTFVKLGQGLSTRPDLCPPDYLEELAELQDALPTFPDAEAFACIERELDLSLETIFSSVSPEPIAAASLGQVYKAQLRYSGQVVAVKVQRPGIEEAIGLDFYLIRGVGKLINKYVDFITTDVLTLIDEFACRVYQELNYVQEAQNARRFKKLYADKADVLVPDIFWDYTSRKVLTMEWVEGTKLNEQLAIESQGLKVLDLVNTGIQCSLRQLLEYGFFHADPHPGNLLATPDGKLAFLDFGMMSETPEEARFAIIGHVVHLVNRDYEAMARDYYALKFLSPDVDVTPIIPALRDFFDDALNYTVSELNFKTLVDGLGAVFYQYPFNVPPYYALILRSLTVLEGLALYADPNFKVLAASYPYFAKRLLTDPNPYLRDALIELLFKDGKFRWNRLENLLQQGSKDRDFSAKDALQPVLKLLLDPNGEELRLLVIKEAVRVSEAIALGTVVDTYNSLPEFLRSLVFNGNGNGPLTMSTAELQSTLELRDQVSRIWGLLQSSESFDPAILQPILQVLQQPEARRLGGRVAGGVGQRLAARFLQQLLRATTPSSAPSP

SEQ ID NO: 77424 - protein, 569 aa, Arabidopsis thaliana
  peptide (1)..(569): Ceres Seq. ID no. 12576358
  misc_feature (62)..(181): Pfam Name: ABC1 family Pfam Description: ABC1 family
  misc_feature (1)..(569): Homolog of NCBI NO: 14532490 NR Description: At1g79600/F20B17_3 [Arabidopsis thaliana]
  misc_feature (1)..(558): Homolog of NCBI NO: 23042448 NR Description: hypothetical protein [Trichodesmium erythraeum
  misc_feature (1)..(566): Homolog of NCBI NO: 17232452 NR Description: hypothetical protein [Nostoc sp. PCC 7120]
  misc_feature (1)..(560): Homolog of NCBI NO: 22298493 NR Description: ORF_ID:tll0950~hypothetical protein
  misc_feature (1)..(569): Homolog of NCBI NO: 16331408 NR Description: ABC1-like [Synechocystis sp. PCC 6803]
  misc_feature (1)..(455): Homolog of NCBI NO: 37522693 NR Description: hypothetical protein glr3124 [Gloeobacter
  misc_feature (1)..(555): Homolog of NCBI NO: 33867054 NR Description: possible protein kinase: ABC1 family sp. WH 8102] >gi|33639655|emb|CAE09039.1| possible protein
  misc_feature (1)..(555): Homolog of NCBI NO: 33864536 NR Description: possible protein kinase:ABC1 family marinus str. MIT 9313] >gi|33641316|emb|CAE22446.1| possible
  misc_feature (1)..(555): Homolog of NCBI NO: 33862270 NR Description: possible protein kinase:ABC1 family marinus subsp. pastoris str. CCMP1378] possible protein kinase:ABC1 family [Prochlorococcus marinus
  misc_feature (1)..(555): Homolog of NCBI NO: 33241332 NR Description: Predicted protein kinase [Prochlorococcus marinus marinus str. CCMP1375] >gi|33238862|gb|AAQ00927.1| Predicted
MKKRAIELRRIFTRLGPTFVKLGQGLSTRPDLCPPDYLEELAELQDALPTFPDAEAFACIERELDLSLETIFSSVSPEPIAAASLGQVYKAQLRYSGQVVAVKVQRPGIEEAIGLDFYLIRGVGKLINKYVDFITTDVLTLIDEFACRVYQELNYVQEAQNARRFKKLYADKADVLVPDIFWDYTSRKVLTMEWVEGTKLNEQLAIESQGLKVLDLVNTGIQCSLRQLLEYGFFHADPHPGNLLATPDGKLAFLDFGMMSETPEEARFAIIGHVVHLVNRDYEAMARDYYALKFLSPDVDVTPIIPALRDFFDDALNYTVSELNFKTLVDGLGAVFYQYPFNVPPYYALILRSLTVLEGLALYADPNFKVLAASYPYFAKRLLTDPNPYLRDALIELLFKDGKFRWNRLENLLQQGSKDRDFSAKDALQPVLKLLLDPNGEELRLLVIKEAVRVSEAIALGTVVDTYNSLPEFLRSLVFNGNGNGPLTMSTAELQSTLELRDQVSRIWGLLQSSESFDPAILQPILQVLQQPEARRLGGRVAGGVGQRLAARFLQQLLRATTPSSAPSP

SEQ ID NO: 77425 - protein, 378 aa, Arabidopsis thaliana
  peptide (1)..(378): Ceres Seq. ID no. 12576359
  misc_feature (1)..(67): Pfam Name: Protein kinase domain Pfam Description: Protein kinase domain
  misc_feature (1)..(378): Homolog of NCBI NO: 14532490 NR Description: At1g79600/F20B17_3 [Arabidopsis thaliana]
  misc_feature (1)..(367): Homolog of NCBI NO: 23042448 NR Description: hypothetical protein [Trichodesmium erythraeum
  misc_feature (1)..(375): Homolog of NCBI NO: 17232452 NR Description: hypothetical protein [Nostoc sp. PCC 7120]
  misc_feature (1)..(369): Homolog of NCBI NO: 22298493 NR Description: ORF_ID:tll0950~hypothetical protein
  misc_feature (1)..(378): Homolog of NCBI NO: 16331408 NR Description: ABC1-like [Synechocystis sp. PCC 6803]
  misc_feature (1)..(264): Homolog of NCBI NO: 37522693 NR Description: hypothetical protein glr3124 [Gloeobacter
  misc_feature (1)..(364): Homolog of NCBI NO: 33867054 NR Description: possible protein kinase: ABC1 family sp. WH 8102] >gi|33639655|emb|CAE09039.1| possible protein
  misc_feature (1)..(364): Homolog of NCBI NO: 33864536 NR Description: possible protein kinase:ABC1 family marinus str. MIT 9313] >gi|33641316|emb|CAE22446.1| possible
  misc_feature (1)..(364): Homolog of NCBI NO: 33862270 NR Description: possible protein kinase:ABC1 family marinus subsp. pastoris str. CCMP1378] possible protein kinase:ABC1 family [Prochlorococcus marinus
  misc_feature (1)..(364): Homolog of NCBI NO: 33241332 NR Description: Predicted protein kinase [Prochlorococcus marinus marinus str. CCMP1375] >gi|33238862|gb|AAQ00927.1| Predicted
MEWVEGTKLNEQLAIESQGLKVLDLVNTGIQCSLRQLLEYGFFHADPHPGNLLATPDGKLAFLDFGMMSETPEEARFAIIGHVVHLVNRDYEAMARDYYALKFLSPDVDVTPIIPALRDFFDDALNYTVSELNFKTLVDGLGAVFYQYPFNVPPYYALILRSLTVLEGLALYADPNFKVLAASYPYFAKRLLTDPNPYLRDALIELLFKDGKFRWNRLENLLQQGSKDRDFSAKDALQPVLKLLLDPNGEELRLLVIKEAVRVSEAIALGTVVDTYNSLPEFLRSLVFNGNGNGPLTMSTAELQSTLELRDQVSRIWGLLQSSESFDPAILQPILQVLQQPEARRLGGRVAGGVGQRLAARFLQQLLRATTPSSAPSP

SEQ ID NO: 77426 - DNA, 1810 bp, Arabidopsis thaliana
  misc_feature (1)..(1810): Ceres Seq. ID no. 12576367
  misc_feature: MA Experiment ID: 108434 Result: Down-regulated in Transcription
  misc_feature: MA Experiment 108434 PARAMETER Experiment Name: At_Root_Tips_cDNA_P Parameter: Tissue Value: Root Tips
  misc_feature: MA Experiment ID: 108577 Result: Down-regulated in Transcription
  misc_feature: MA Experiment 108577 PARAMETER Experiment Name: At_42deg_Heat_cDNA_P Parameter: Temperature (deg C) Value: 42 vs. 22
  misc_feature: MA Experiment 108577 PARAMETER Experiment Name: At_42deg_Heat_cDNA_P Parameter: Timepoint (hr) Value: 6
  misc_feature: MA Experiment 108577 PARAMETER Experiment Name: At_42deg_Heat_cDNA_P Parameter: Tissue Value: Aerial
  misc_feature: MA Experiment ID: 20000070 Result: Up-regulated in Transcription
  misc_feature: MA Experiment 20000070 PARAMETER Experiment Name: At_100uM_ABA_Mutants_cDNA_P Parameter: Plant Line Value: CS24
  misc_feature: MA Experiment 20000070 PARAMETER Experiment Name: At_100uM_ABA_Mutants_cDNA_P Parameter: Timepoint (hr) Value: 6
  misc_feature: MA Experiment 20000070 PARAMETER Experiment Name: At_100uM_ABA_Mutants_cDNA_P Parameter: Tissue Value: Aerial
  misc_feature: MA Experiment 20000070 PARAMETER Experiment Name: At_100uM_ABA_Mutants_cDNA_P Parameter: Treatment Value: 100uM ABA vs. No Treatment
  misc_feature: MA Experiment ID: 20000086 Result: Up-regulated in Transcription
  misc_feature: MA Experiment 20000086 PARAMETER Experiment Name: At_100uM_ABA_Mutants_cDNA_P Parameter: Plant Line Value: CS22
  misc_feature: MA Experiment 20000086 PARAMETER Experiment Name: At_100uM_ABA_Mutants_cDNA_P Parameter: Timepoint (hr) Value: 6
  misc_feature: MA Experiment 20000086 PARAMETER Experiment Name: At_100uM_ABA_Mutants_cDNA_P Parameter: Tissue Value: Aerial
  misc_feature: MA Experiment 20000086 PARAMETER Experiment Name: At_100uM_ABA_Mutants_cDNA_P Parameter: Treatment Value: 100uM ABA vs. No Treatment
  misc_feature: MA Experiment ID: 20000089 Result: Up-regulated in Transcription
  misc_feature: MA Experiment ID: 20000117 Result: Up-regulated in Transcription
  misc_feature: MA Experiment 20000117 PARAMETER Experiment Name: At_100uM_ABA_Mutants_cDNA_P Parameter: Plant Line Value: Columbia
  misc_feature: MA Experiment 20000117 PARAMETER Experiment Name: At_100uM_ABA_Mutants_cDNA_P Parameter: Timepoint (hr) Value: 6
  misc_feature: MA Experiment 20000117 PARAMETER Experiment Name: At_100uM_ABA_Mutants_cDNA_P Parameter: Tissue Value: Aerial
  misc_feature: MA Experiment 20000117 PARAMETER Experiment Name: At_100uM_ABA_Mutants_cDNA_P Parameter: Treatment Value: 100uM ABA vs. No Treatment
  misc_feature: MA Experiment ID: 20001247 Result: Down-regulated in Transcription
  misc_feature: MA Experiment 20001247 PARAMETER Experiment Name: At_Far-red-induction_P Parameter: Age (day) Value: 7
  misc_feature: MA Experiment 20001247 PARAMETER Experiment Name: At_Far-red-induction_P Parameter: Light Value: Far-red vs. White
  misc_feature: MA Experiment 20001247 PARAMETER Experiment Name: At_Far-red-induction_P Parameter: Organism Value: A. thaliana
  misc_feature: MA Experiment 20001247 PARAMETER Experiment Name: At_Far-red-induction_P Parameter: Plant Line Value: Columbia
  misc_feature: MA Experiment 20001247 PARAMETER Experiment Name: At_Far-red-induction_P Parameter: Timepoint (hr) Value: 1
  misc_feature: MA Experiment 20001247 PARAMETER Experiment Name: At_Far-red-induction_P Parameter: Tissue Value: Whole Plant
aaactagtgaaaattttgtcgccaccgtcgcaggtttgttctgtattttggttagagtgttaaaaaactattggaagatgggttctggtcaatggcatatggagaagaggtctactttaaagaatgattcgtttgtaaaagaatacaatccagtcacggaaactgggagtctctctatcattgttcttggtgcttctggtgatcttgctaagaagaagacttttcctgcacttttcaatctatttcatcagggatttcttaatccagatgaagttcatatatttggatatgcaaggagtaagattactgatgaggagcttagagataaaatccgcggatatcttgttgatgagaagaatgcatctaagaaaacagaagctttgtccaagtttctaaagctgattaagtatgtgagtggaccttatgattctgaggaagggtttaagagattagacaaggcgattttggagcacgagatatctaaaaagactgctgaaggatcttcgaggagattgttttatcttgcacttcctccgtctgtataccctcctgtaagcaagatgatcaaggcatggtgcactaacaaatctgatcttggtggatggactaggattgttgttgagaaaccatttggaaaggatttggaatctgcagagcagctgagttctcagattggagccttgtttgaagaaccacagatttatcgtattgatcactatctgggaaaagagttagttcaaaacatgttggttcttcggtttgccaatcgcttgtttttgccactatggaaccgcgacaatattgcaaacgtacagatcgttttcagagaagattttggaactgaaggtcgcggtggatattttgatgaatacggaatcattcgtgatattattcaaaaccacttgctccaggttctttgccttgtcgccatggagaaaccaatctctcttaaacccgagcacatccgggatgagaaagtgaaggttcttcaatctgtgattcccataaaagatgaagaggtggttcttggacaatatgaaggatatagagatgatccaactgttccaaatgactcaaacactccaacgtttgccacaacaattcttcgcattaacaatgaaagatgggaaggtgttccttttatactgaaggccggaaaggcaatgagttcaaagaaggcagatattcgcattcagtttaaagatgttcctggcgacatattcaaatgtcaaaaccaagggaggaacgagtttgttatacgcttgcagccttcagaggccatgtacatgaagctaactgtgaagcaaccgggtctggagatgcaaaccgtgcagagtgaactagacctatcgtacaagcagcgttaccaagatgtctcaattccagaggcttacgaacgccttattcttgacacaatcagaggcgaccaacaacactttgttcgcagagacgaattaaaggcagcttgggaaatcttcactccactgcttcacaggatcgacaagggagaagtgaaatcggtcccatacaaacaaggtagccgtggcccagcggaagcagatcagctacttaagaaagctggttatatgcagactcatggctacatttggatccctcctacattgtaaatggtataatcatagagatgatgatgatgagtacacacaaaataagagggttttttttcttttttttccttgcttgctgaataaaaactcttcaccagtttggagtttgtttaagtgaatcttatgtatactagtgatcttcactaggacattgtttgtttatgccttgtagtttttgttgt

SEQ ID NO: 77427 - protein, 541 aa, Arabidopsis thaliana
  peptide (1)..(541): Ceres Seq. ID no. 12576368
  misc_feature (249)..(533): Pfam Name: Glucose-6-phosphate dehydrogenase, C-terminal domain Pfam Description: Glucose-6-phosphate dehydrogenase, C-terminal
  misc_feature (26)..(541): Homolog of NCBI NO: 15232132 NR Description: glucose-6-phosphate 1-dehydrogenase, putative; id: At3g27300.1, supported by cDNA: gi_18086469 [Arabidopsis
  misc_feature (26)..(541): Homolog of NCBI NO: 25283728 NR Description: glucose-6-phosphate 1-dehydrogenase (EC 1.1.1.49)
  misc_feature (26)..(541): Homolog of NCBI NO: 18086470 NR Description: AT3g27300/K17E12_12 [Arabidopsis thaliana]
  misc_feature (26)..(541): Homolog of NCBI NO: 15237485 NR Description: glucose-6-phosphate dehydrogenase; protein id:
  misc_feature (26)..(541): Homolog of NCBI NO: 25283727 NR Description: glucose-6-phosphate 1-dehydrogenase (EC 1.1.1.49)
  misc_feature (28)..(541): Homolog of NCBI NO: 585165 NR Description: Glucose-6-phosphate 1-dehydrogenase, cytoplasmic
  misc_feature (26)..(541): Homolog of NCBI NO: 3023815 NR Description: Glucose-6-phosphate 1-dehydrogenase, cytoplasmic
  misc_feature (25)..(541): Homolog of NCBI NO: 7431269 NR Description: glucose-6-phosphate 1-dehydrogenase (EC 1.1.1.49)
  misc_feature (28)..(541): Homolog of NCBI NO: 3021508 NR Description: glucose-6-phosphate dehydrogenase [Nicotiana
  misc_feature (28)..(541): Homolog of NCBI NO: 3021510 NR Description: glucose-6-phosphate dehydrogenase [Nicotiana
TSENFVATVAGLFCILVRVLKNYWKMGSGQWHMEKRSTLKNDSFVKEYNPVTETGSLSIIVLGASGDLAKKKTFPALFNLFHQGFLNPDEVHIFGYARSKITDEELRDKIRGYLVDEKNASKKTEALSKFLKLIKYVSGPYDSEEGFKRLDKAILEHEISKKTAEGSSRRLFYLALPPSVYPPVSKMIKAWCTNKSDLGGWTRIVVEKPFGKDLESAEQLSSQIGALFEEPQIYRIDHYLGKELVQNMLVLRFANRLFLPLWNRDNIANVQIVFREDFGTEGRGGYFDEYGIIRDIIQNHLLQVLCLVAMEKPISLKPEHIRDEKVKVLQSVIPIKDEEVVLGQYEGYRDDPTVPNDSNTPTFATTILRINNERWEGVPFILKAGKAMSSKKADIRIQFKDVPGDIFKCQNQGRNEFVIRLQPSEAMYMKLTVKQPGLEMQTVQSELDLSYKQRYQDVSIPEAYERLILDTIRGDQQHFVRRDELKAAWEIFTPLLHRIDKGEVKSVPYKQGSRGPAEADQLLKKAGYMQTHGYIWIPPTL

SEQ ID NO: 77428 - protein, 516 aa, Arabidopsis thaliana
  peptide (1)..(516): Ceres Seq. ID no. 12576369
  misc_feature (224)..(508): Pfam Name: Glucose-6-phosphate dehydrogenase, C-terminal domain Pfam Description: Glucose-6-phosphate dehydrogenase, C-terminal
  misc_feature (1)..(516): Homolog of NCBI NO: 15232132 NR Description: glucose-6-phosphate 1-dehydrogenase, putative; id: At3g27300.1, supported by cDNA: gi_18086469 [Arabidopsis
  misc_feature (1)..(516): Homolog of NCBI NO: 25283728 NR Description: glucose-6-phosphate 1-dehydrogenase (EC 1.1.1.49)
  misc_feature (1)..(516): Homolog of NCBI NO: 18086470 NR Description: AT3g27300/K17E12_12 [Arabidopsis thaliana]
  misc_feature (1)..(516): Homolog of NCBI NO: 15237485 NR Description: glucose-6-phosphate dehydrogenase; protein id:
  misc_feature (1)..(516): Homolog of NCBI NO: 25283727 NR Description: glucose-6-phosphate 1-dehydrogenase (EC 1.1.1.49)
  misc_feature (3)..(516): Homolog of NCBI NO: 585165 NR Description: Glucose-6-phosphate 1-dehydrogenase, cytoplasmic
  misc_feature (1)..(516): Homolog of NCBI NO: 3023815 NR Description: Glucose-6-phosphate 1-dehydrogenase, cytoplasmic
  misc_feature (1)..(516): Homolog of NCBI NO: 7431269 NR Description: glucose-6-phosphate 1-dehydrogenase (EC 1.1.1.49)
  misc_feature (3)..(516): Homolog of NCBI NO: 3021508 NR Description: glucose-6-phosphate dehydrogenase [Nicotiana
  misc_feature (3)..(516): Homolog of NCBI NO: 3021510 NR Description: glucose-6-phosphate dehydrogenase [Nicotiana
MGSGQWHMEKRSTLKNDSFVKEYNPVTETGSLSIIVLGASGDLAKKKTFPALFNLFHQGFLNPDEVHIFGYARSKITDEELRDKIRGYLVDEKNASKKTEALSKFLKLIKYVSGPYDSEEGFKRLDKAILEHEISKKTAEGSSRRLFYLALPPSVYPPVSKMIKAWCTNKSDLGGWTRIVVEKPFGKDLESAEQLSSQIGALFEEPQIYRIDHYLGKELVQNMLVLRFANRLFLPLWNRDNIANVQIVFREDFGTEGRGGYFDEYGIIRDIIQNHLLQVLCLVAMEKPISLKPEHIRDEKVKVLQSVIPIKDEEVVLGQYEGYRDDPTVPNDSNTPTFATTILRINNERWEGVPFILKAGKAMSSKKADIRIQFKDVPGDIFKCQNQGRNEFVIRLQPSEAMYMKLTVKQPGLEMQTVQSELDLSYKQRYQDVSIPEAYERLILDTIRGDQQHFVRRDELKAAWEIFTPLLHRIDKGEVKSVPYKQGSRGPAEADQLLKKAGYMQTHGYIWIPPTL

SEQ ID NO: 77429 - protein, 509 aa, Arabidopsis thaliana
  peptide (1)..(509): Ceres Seq. ID no. 12576370
  misc_feature (217)..(501): Pfam Name: Glucose-6-phosphate dehydrogenase, C-terminal domain Pfam Description: Glucose-6-phosphate dehydrogenase, C-terminal
  misc_feature (1)..(509): Homolog of NCBI NO: 15232132 NR Description: glucose-6-phosphate 1-dehydrogenase, putative; id: At3g27300.1, supported by cDNA: gi_18086469 [Arabidopsis
  misc_feature (1)..(509): Homolog of NCBI NO: 25283728 NR Description: glucose-6-phosphate 1-dehydrogenase (EC 1.1.1.49)
  misc_feature (1)..(509): Homolog of NCBI NO: 18086470 NR Description: AT3g27300/K17E12_12 [Arabidopsis thaliana]
  misc_feature (1)..(509): Homolog of NCBI NO: 15237485 NR Description: glucose-6-phosphate dehydrogenase; protein id:
  misc_feature (1)..(509): Homolog of NCBI NO: 25283727 NR Description: glucose-6-phosphate 1-dehydrogenase (EC 1.1.1.49)
  misc_feature (1)..(509): Homolog of NCBI NO: 585165 NR Description: Glucose-6-phosphate 1-dehydrogenase, cytoplasmic
  misc_feature (1)..(509): Homolog of NCBI NO: 3023815 NR Description: Glucose-6-phosphate 1-dehydrogenase, cytoplasmic
  misc_feature (1)..(509): Homolog of NCBI NO: 7431269 NR Description: glucose-6-phosphate 1-dehydrogenase (EC 1.1.1.49)
  misc_feature (1)..(509): Homolog of NCBI NO: 3021508 NR Description: glucose-6-phosphate dehydrogenase [Nicotiana
  misc_feature (1)..(509): Homolog of NCBI NO: 3021510 NR Description: glucose-6-phosphate dehydrogenase [Nicotiana
MEKRSTLKNDSFVKEYNPVTETGSLSIIVLGASGDLAKKKTFPALFNLFHQGFLNPDEVHIFGYARSKITDEELRDKIRGYLVDEKNASKKTEALSKFLKLIKYVSGPYDSEEGFKRLDKAILEHEISKKTAEGSSRRLFYLALPPSVYPPVSKMIKAWCTNKSDLGGWTRIVVEKPFGKDLESAEQLSSQIGALFEEPQIYRIDHYLGKELVQNMLVLRFANRLFLPLWNRDNIANVQIVFREDFGTEGRGGYFDEYGIIRDIIQNHLLQVLCLVAMEKPISLKPEHIRDEKVKVLQSVIPIKDEEVVLGQYEGYRDDPTVPNDSNTPTFATTILRINNERWEGVPFILKAGKAMSSKKADIRIQFKDVPGDIFKCQNQGRNEFVIRLQPSEAMYMKLTVKQPGLEMQTVQSELDLSYKQRYQDVSIPEAYERLILDTIRGDQQHFVRRDELKAAWEIFTPLLHRIDKGEVKSVPYKQGSRGPAEADQLLKKAGYMQTHGYIWIPPTL

SEQ ID NO: 77430 - DNA, 951 bp, Arabidopsis thaliana
  misc_feature (1)..(951): Ceres Seq. ID no. 12576375
  misc_feature: MA Experiment ID: 20000070 Result: Down-regulated in Transcription
  misc_feature: MA Experiment 20000070 PARAMETER Experiment Name: At_100uM_ABA_Mutants_cDNA_P Parameter: Plant Line Value: CS24
  misc_feature: MA Experiment 20000070 PARAMETER Experiment Name: At_100uM_ABA_Mutants_cDNA_P Parameter: Timepoint (hr) Value: 6
  misc_feature: MA Experiment 20000070 PARAMETER Experiment Name: At_100uM_ABA_Mutants_cDNA_P Parameter: Tissue Value: Aerial
  misc_feature: MA Experiment 20000070 PARAMETER Experiment Name: At_100uM_ABA_Mutants_cDNA_P Parameter: Treatment Value: 100uM ABA vs. No Treatment
  misc_feature: MA Experiment ID: 20000071 Result: Down-regulated in Transcription
  misc_feature: MA Experiment 20000071 PARAMETER Experiment Name: At_100uM_ABA_Mutants_cDNA_P Parameter: Plant Line Value: CS8104
  misc_feature: MA Experiment 20000071 PARAMETER Experiment Name: At_100uM_ABA_Mutants_cDNA_P Parameter: Timepoint (hr) Value: 6
  misc_feature: MA Experiment 20000071 PARAMETER Experiment Name: At_100uM_ABA_Mutants_cDNA_P Parameter: Tissue Value: Aerial
  misc_feature: MA Experiment 20000071 PARAMETER Experiment Name: At_100uM_ABA_Mutants_cDNA_P Parameter: Treatment Value: 100uM ABA vs. No Treatment
  misc_feature: MA Experiment ID: 20000086 Result: Down-regulated in Transcription
  misc_feature: MA Experiment 20000086 PARAMETER Experiment Name: At_100uM_ABA_Mutants_cDNA_P Parameter: Plant Line Value: CS22
  misc_feature: MA Experiment 20000086 PARAMETER Experiment Name: At_100uM_ABA_Mutants_cDNA_P Parameter: Timepoint (hr) Value: 6
  misc_feature: MA Experiment 20000086 PARAMETER Experiment Name: At_100uM_ABA_Mutants_cDNA_P Parameter: Tissue Value: Aerial
  misc_feature: MA Experiment 20000086 PARAMETER Experiment Name: At_100uM_ABA_Mutants_cDNA_P Parameter: Treatment Value: 100uM ABA vs. No Treatment
  misc_feature: MA Experiment ID: 20000087 Result: Down-regulated in Transcription
  misc_feature: MA Experiment 20000087 PARAMETER Experiment Name: At_100uM_ABA_Mutants_cDNA_P Parameter: Plant Line Value: WS
  misc_feature: MA Experiment 20000087 PARAMETER Experiment Name: At_100uM_ABA_Mutants_cDNA_P Parameter: Timepoint (hr) Value: 6
  misc_feature: MA Experiment 20000087 PARAMETER Experiment Name: At_100uM_ABA_Mutants_cDNA_P Parameter: Tissue Value: Aerial
  misc_feature: MA Experiment 20000087 PARAMETER Experiment Name: At_100uM_ABA_Mutants_cDNA_P Parameter: Treatment Value: 100uM ABA vs. No Treatment
  misc_feature: MA Experiment ID: 20000117 Result: Down-regulated in Transcription
  misc_feature: MA Experiment 20000117 PARAMETER Experiment Name: At_100uM_ABA_Mutants_cDNA_P Parameter: Plant Line Value: Columbia
  misc_feature: MA Experiment 20000117 PARAMETER Experiment Name: At_100uM_ABA_Mutants_cDNA_P Parameter: Timepoint (hr) Value: 6
  misc_feature: MA Experiment 20000117 PARAMETER Experiment Name: At_100uM_ABA_Mutants_cDNA_P Parameter: Tissue Value: Aerial
  misc_feature: MA Experiment 20000117 PARAMETER Experiment Name: At_100uM_ABA_Mutants_cDNA_P Parameter: Treatment Value: 100uM ABA vs. No Treatment
  misc_feature: MA Experiment ID: 20000180 Result: Up-regulated in Transcription
  misc_feature: MA Experiment 20000180 PARAMETER Experiment Name: At_Germinating_Seeds_P Parameter: Age (hr) Value: 24 vs. 0
  misc_feature: MA Experiment 20000180 PARAMETER Experiment Name: At_Germinating_Seeds_P Parameter: Tissue Value: Germinating Seeds
  misc_feature: MA Experiment ID: 20000185 Result: Down-regulated in Transcription
  misc_feature: MA Experiment 20000185 PARAMETER Experiment Name: At_Roots__P Parameter: Age (day) Value: 7 vs. 21
  misc_feature: MA Experiment 20000185 PARAMETER Experiment Name: At_Roots__P Parameter: Organism Value: A. thaliana
  misc_feature: MA Experiment 20000185 PARAMETER Experiment Name: At_Roots__P Parameter: Tissue Value: Roots vs. Whole Plant
  misc_feature: MA Experiment ID: 20000234 Result: Up-regulated in Transcription
  misc_feature: MA Experiment 20000234 PARAMETER Experiment Name: At_Siliques_P Parameter: Age (day) Value: 21
  misc_feature: MA Experiment 20000234 PARAMETER Experiment Name: At_Siliques_P Parameter: Organism Value: A. thaliana
  misc_feature: MA Experiment 20000234 PARAMETER Experiment Name: At_Siliques_P Parameter: Plant Line Value: WS
  misc_feature: MA Experiment 20000234 PARAMETER Experiment Name: At_Siliques_P Parameter: Tissue Value: Less Than 5mm Siliques vs. Whole Plant
  misc_feature: MA Experiment ID: 20000436 Result: Down-regulated in Transcription
  misc_feature: MA Experiment 20000436 PARAMETER Experiment Name: At_Drought_P Parameter: Age (day) Value: 7
  misc_feature: MA Experiment 20000436 PARAMETER Experiment Name: At_Drought_P Parameter: Organism Value: A. thaliana
  misc_feature: MA Experiment 20000436 PARAMETER Experiment Name: At_Drought_P Parameter: Plant Line Value: WS
  misc_feature: MA Experiment 20000436 PARAMETER Experiment Name: At_Drought_P Parameter: Timepoint (hr) Value: 12
  misc_feature: MA Experiment 20000436 PARAMETER Experiment Name: At_Drought_P Parameter: Tissue Value: Whole Plant
  misc_feature: MA Experiment 20000436 PARAMETER Experiment Name: At_Drought_P Parameter: Treatment Value: Drought vs. No Drought
  misc_feature: MA Experiment ID: 20000437 Result: Down-regulated in Transcription
  misc_feature: MA Experiment 20000437 PARAMETER Experiment Name: At_Drought_P Parameter: Age (day) Value: 8
  misc_feature: MA Experiment 20000437 PARAMETER Experiment Name: At_Drought_P Parameter: Organism Value: A. thaliana
  misc_feature: MA Experiment 20000437 PARAMETER Experiment Name: At_Drought_P Parameter: Plant Line Value: WS
  misc_feature: MA Experiment 20000437 PARAMETER Experiment Name: At_Drought_P Parameter: Timepoint (hr) Value: 24
  misc_feature: MA Experiment 20000437 PARAMETER Experiment Name: At_Drought_P Parameter: Tissue Value: Whole Plant
  misc_feature: MA Experiment 20000437 PARAMETER Experiment Name: At_Drought_P Parameter: Treatment Value: Drought vs. No Drought
  misc_feature: MA Experiment ID: 20000438 Result: Up-regulated in Transcription
  misc_feature: MA Experiment 20000438 PARAMETER Experiment Name: At_Shoots__P Parameter: Age (day) Value: 14
  misc_feature: MA Experiment 20000438 PARAMETER Experiment Name: At_Shoots__P Parameter: Tissue Value: Shoots vs. Whole Plant
  misc_feature: MA Experiment ID: 20000439 Result: Down-regulated in Transcription
  misc_feature: MA Experiment 20000439 PARAMETER Experiment Name: At_Roots__P Parameter: Age (day) Value: 14 vs. 21
  misc_feature: MA Experiment 20000439 PARAMETER Experiment Name: At_Roots__P Parameter: Organism Value: A. thaliana
  misc_feature: MA Experiment 20000439 PARAMETER Experiment Name: At_Roots__P Parameter: Tissue Value: Roots vs. Whole Plant
  misc_feature: MA Experiment ID: 20000794 Result: Down-regulated in Transcription
  misc_feature: MA Experiment 20000794 PARAMETER Experiment Name: At_Petals_P Parameter: Age (day) Value: 23-25 days
  misc_feature: MA Experiment 20000794 PARAMETER Experiment Name: At_Petals_P Parameter: Plant Line Value: WS
  misc_feature: MA Experiment 20000794 PARAMETER Experiment Name: At_Petals_P Parameter: Tissue Value: Petals vs. Whole plant
  misc_feature: MA Experiment ID: 20001450 Result: Down-regulated in Transcription
  misc_feature: MA Experiment 20001450 PARAMETER Experiment Name: At_Far-red-induction_P Parameter: Age (day) Value: 7
  misc_feature: MA Experiment 20001450 PARAMETER Experiment Name: At_Far-red-induction_P Parameter: Light Value: Far-red vs. White
  misc_feature: MA Experiment 20001450 PARAMETER Experiment Name: At_Far-red-induction_P Parameter: Organism Value: A. thaliana
  misc_feature: MA Experiment 20001450 PARAMETER Experiment Name: At_Far-red-induction_P Parameter: Plant Line Value: Columbia
  misc_feature: MA Experiment 20001450 PARAMETER Experiment Name: At_Far-red-induction_P Parameter: Timepoint (hr) Value: 8
  misc_feature: MA Experiment 20001450 PARAMETER Experiment Name: At_Far-red-induction_P Parameter: Tissue Value: Whole Plant
  misc_feature: MA Experiment ID: 20001757 Result: Up-regulated in Transcription
  misc_feature: MA Experiment 20001757 PARAMETER Experiment Name: At_50mM_NH4NO3_L-to-H_P Parameter: Timepoint (hr) Value: 6
  misc_feature: MA Experiment 20001757 PARAMETER Experiment Name: At_50mM_NH4NO3_L-to-H_P Parameter: Tissue Value: Leaf
  misc_feature: MA Experiment 20001757 PARAMETER Experiment Name: At_50mM_NH4NO3_L-to-H_P Parameter: Treatment Value: 50mM NH4NO3 vs 100mM Mannitol
  misc_feature: MA Experiment ID: 20001905 Result: Down-regulated in Transcription
  misc_feature: MA Experiment 20001905 PARAMETER Experiment Name: At_Drought_Reproduction_P Parameter: Age (day) Value: 40
  misc_feature: MA Experiment 20001905 PARAMETER Experiment Name: At_Drought_Reproduction_P Parameter: Organism Value: A. thaliana
  misc_feature: MA Experiment 20001905 PARAMETER Experiment Name: At_Drought_Reproduction_P Parameter: Plant Line Value: WS
  misc_feature: MA Experiment 20001905 PARAMETER Experiment Name: At_Drought_Reproduction_P Parameter: Timepoint (day) Value: 10
  misc_feature: MA Experiment 20001905 PARAMETER Experiment Name: At_Drought_Reproduction_P Parameter: Tissue Value: Rosettes
  misc_feature: MA Experiment 20001905 PARAMETER Experiment Name: At_Drought_Reproduction_P Parameter: Treatment Value: Drought vs. No Drought
  misc_feature: MA Experiment ID: 20001906 Result: Down-regulated in Transcription
  misc_feature: MA Experiment 20001906 PARAMETER Experiment Name: At_Drought_Reproduction_P Parameter: Age (day) Value: 35
  misc_feature: MA Experiment 20001906 PARAMETER Experiment Name: At_Drought_Reproduction_P Parameter: Organism Value: A. thaliana
  misc_feature: MA Experiment 20001906 PARAMETER Experiment Name: At_Drought_Reproduction_P Parameter: Plant Line Value: WS
  misc_feature: MA Experiment 20001906 PARAMETER Experiment Name: At_Drought_Reproduction_P Parameter: Timepoint (day) Value: 5
  misc_feature: MA Experiment 20001906 PARAMETER Experiment Name: At_Drought_Reproduction_P Parameter: Tissue Value: Siliques
  misc_feature: MA Experiment 20001906 PARAMETER Experiment Name: At_Drought_Reproduction_P Parameter: Treatment Value: Drought vs. No Drought
  misc_feature: MA Experiment ID: 20001911 Result: Down-regulated in Transcription
  misc_feature: MA Experiment 20001911 PARAMETER Experiment Name: At_Drought_Reproduction_P Parameter: Age (day) Value: 40
  misc_feature: MA Experiment 20001911 PARAMETER Experiment Name: At_Drought_Reproduction_P Parameter: Organism Value: A. thaliana
  misc_feature: MA Experiment 20001911 PARAMETER Experiment Name: At_Drought_Reproduction_P Parameter: Plant Line Value: WS
  misc_feature: MA Experiment 20001911 PARAMETER Experiment Name: At_Drought_Reproduction_P Parameter: Timepoint (day) Value: 10
  misc_feature: MA Experiment 20001911 PARAMETER Experiment Name: At_Drought_Reproduction_P Parameter: Tissue Value: Flowers
  misc_feature: MA Experiment 20001911 PARAMETER Experiment Name: At_Drought_Reproduction_P Parameter: Treatment Value: Drought vs. No Drought
acgacactcgcaacttcttccttatcgacacctacactctcctgctacaatggcgactttcctaacaaatgttgtttcaatcaaacctacaatcttctcattccagtccgaatccttcactcctttgcatacacgggtcaatgtattctcctcgaaaccctttccttctctcgctggaactttctcccggagctctagaacgagattcattccttatgctgtaacggagacggaagaaaaacccgccgctttggaccctagttcagaagctgccaggcgtgtgtatatcggtaacatacccaggacggtgaccaatgagcagctcactaaacttgttgaagaacacggtgctgttgaaaaagttcaggtgatgtatgataagtattcaggaagaagccgtcgatttgggtttgctacaatgaaatcagttgaagatgctaatgctgtggttgagaaattgaatggcaataccgttgaagggcgtgagataaaggttaacattacagagaaacctatagcatcatcacctgatttatcagttcttcagtctgaggattcagcatttgtagatagcccttacaaagtgtatgttgggaatctagcaaagactgttacaaaagagatgcttgagaatttgttttctgagaaagggaaagtagtaagtgctaaggtttcaagagtacctggaacttccaaatccaccgggtttggattcgttacgttttcttctgaagaagatgtggaagcagccattgttgctcttaacaattcgttgctggaaggacagaagattcgggtgaataaggcttagcctattggatcataaagaatgtgaaaagaatcgctttgaagagtttttgtaatgcaaatcattagagcttagtgtatcatcttgtattcattctaagttgaaaatgaaaccatatcttttcaaaagcttatagttgtggt

SEQ ID NO: 77431 - protein, 269 aa, Arabidopsis thaliana; identical to SEQ ID NO: 24385
  peptide (1)..(269): Ceres Seq. ID no. 12576376
  misc_feature (94)..(165): Pfam Name: RNA recognition motif. (a.k.a. RRM, RBD, or RNP domain) Pfam Description: RNA recognition motif. (a.k.a. RRM, RBD, or RNP
  misc_feature (17)..(269): Homolog of NCBI NO: 30693595 NR Description: RNA recognition motif (RRM)-containing protein thaliana] >gi|17979394|gb|AAL49922.1| unknown protein thaliana] >gi|22136722|gb|AAM91680.1| unknown protein
  misc_feature (17)..(266): Homolog of NCBI NO: 11357772 NR Description: hypothetical protein F4F15.260 - Arabidopsis >gi|4678944|emb|CAB41335.1| putative protein [Arabidopsis
  misc_feature (26)..(269): Homolog of NCBI NO: 7578881 NR Description: plastid-specific ribosomal protein 2 precursor
  misc_feature (18)..(269): Homolog of NCBI NO: 18921322 NR Description: putative ribonucleoprotein [Oryza sativa]
  misc_feature (76)..(269): Homolog of NCBI NO: 15231200 NR Description: chloroplast RNA-binding protein cp33; protein id: supported by cDNA: 14246., supported by cDNA: gi_14517543, by cDNA: gi_17064757, supported by cDNA: gi_18700225 protein cp33
  misc_feature (76)..(269): Homolog of NCBI NO: 17064758 NR Description: ubiquitin / ribosomal protein CEP52 [Arabidopsis
  misc_feature (66)..(269): Homolog of NCBI NO: 34913270 NR Description: putative ribonucleoprotein [Oryza sativa cultivar- group)] >gi|22296371|dbj|BAC10140.1| putative 29 kDa
  misc_feature (76)..(269): Homolog of NCBI NO: 681912 NR Description: cp33 [Arabidopsis thaliana]
  misc_feature (76)..(269): Homolog of NCBI NO: 7446342 NR Description: RNA-binding protein precursor, 33K - wood tobacco
  misc_feature (76)..(269): Homolog of NCBI NO: 1076509 NR Description: RNA-binding protein RNP1 precursor - kidney bean

SEQ ID NO: 77432 - protein, 253 aa, Arabidopsis thaliana; identical to SEQ ID NO: 24386
  peptide (1)..(253): Ceres Seq. ID no. 12576377
  misc_feature (78)..(149): Pfam Name: RNA recognition motif. (a.k.a. RRM, RBD, or RNP domain) Pfam Description: RNA recognition motif. (a.k.a. RRM, RBD, or RNP
  misc_feature (1)..(253): Homolog of NCBI NO: 30693595 NR Description: RNA recognition motif (RRM)-containing protein thaliana] >gi|17979394|gb|AAL49922.1| unknown protein thaliana] >gi|22136722|gb|AAM91680.1| unknown protein
  misc_feature (1)..(250): Homolog of NCBI NO: 11357772 NR Description: hypothetical protein F4F15.260 - Arabidopsis >gi|4678944|emb|CAB41335.1| putative protein [Arabidopsis
  misc_feature (10)..(253): Homolog of NCBI NO: 7578881 NR Description: plastid-specific ribosomal protein 2 precursor
  misc_feature (2)..(253): Homolog of NCBI NO: 18921322 NR Description: putative ribonucleoprotein [Oryza sativa]
  misc_feature (60)..(253): Homolog of NCBI NO: 15231200 NR Description: chloroplast RNA-binding protein cp33; protein id: supported by cDNA: 14246., supported by cDNA: gi_14517543, by cDNA: gi_17064757, supported by cDNA: gi_18700225 protein cp33
  misc_feature (60)..(253): Homolog of NCBI NO: 17064758 NR Description: ubiquitin / ribosomal protein CEP52 [Arabidopsis
  misc_feature (50)..(253): Homolog of NCBI NO: 34913270 NR Description: putative ribonucleoprotein [Oryza sativa cultivar- group)] >gi|22296371|dbj|BAC10140.1| putative 29 kDa
  misc_feature (60)..(253): Homolog of NCBI NO: 681912 NR Description: cp33 [Arabidopsis thaliana]
  misc_feature (60)..(253): Homolog of NCBI NO: 7446342 NR Description: RNA-binding protein precursor, 33K - wood tobacco
  misc_feature (60)..(253): Homolog of NCBI NO: 1076509 NR Description: RNA-binding protein RNP1 precursor - kidney bean

SEQ ID NO: 77433 - protein, 146 aa, Arabidopsis thaliana; identical to SEQ ID NO: 24387
  peptide (1)..(146): Ceres Seq. ID no. 12576378
  misc_feature (72)..(143): Pfam Name: RNA recognition motif. (a.k.a. RRM, RBD, or RNP domain) Pfam Description: RNA recognition motif. (a.k.a. RRM, RBD, or RNP
  misc_feature (1)..(146): Homolog of NCBI NO: 30693595 NR Description: RNA recognition motif (RRM)-containing protein thaliana] >gi|17979394|gb|AAL49922.1| unknown protein thaliana] >gi|22136722|gb|AAM91680.1| unknown protein
  misc_feature (1)..(143): Homolog of NCBI NO: 11357772 NR Description: hypothetical protein F4F15.260 - Arabidopsis >gi|4678944|emb|CAB41335.1| putative protein [Arabidopsis
  misc_feature (1)..(146): Homolog of NCBI NO: 7578881 NR Description: plastid-specific ribosomal protein 2 precursor
  misc_feature (1)..(146): Homolog of NCBI NO: 18921322 NR Description: putative ribonucleoprotein [Oryza sativa]
  misc_feature (1)..(146): Homolog of NCBI NO: 15231200 NR Description: chloroplast RNA-binding protein cp33; protein id: supported by cDNA: 14246., supported by cDNA: gi_14517543, by cDNA: gi_17064757, supported by cDNA: gi_18700225 protein cp33
  misc_feature (1)..(146): Homolog of NCBI NO: 17064758 NR Description: ubiquitin / ribosomal protein CEP52 [Arabidopsis
  misc_feature (1)..(146): Homolog of NCBI NO: 34913270 NR Description: putative ribonucleoprotein [Oryza sativa cultivar- group)] >gi|22296371|dbj|BAC10140.1| putative 29 kDa
  misc_feature (1)..(146): Homolog of NCBI NO: 681912 NR Description: cp33 [Arabidopsis thaliana]
  misc_feature (1)..(146): Homolog of NCBI NO: 7446342 NR Description: RNA-binding protein precursor, 33K - wood tobacco
  misc_feature (1)..(146): Homolog of NCBI NO: 1076509 NR Description: RNA-binding protein RNP1 precursor - kidney bean

SEQ ID NO: 77434 - DNA, 1551 bp, Arabidopsis thaliana
  misc_feature (1)..(1551): Ceres Seq. ID no. 12576409
  misc_feature: MA Experiment ID: 20000182 Result: Down-regulated in Transcription
  misc_feature: MA Experiment 20000182 PARAMETER Experiment Name: At_2mM_SA_P Parameter: Age (day) Value: 14
  misc_feature: MA Experiment 20000182 PARAMETER Experiment Name: At_2mM_SA_P Parameter: Organism Value: A. thaliana
  misc_feature: MA Experiment 20000182 PARAMETER Experiment Name: At_2mM_SA_P Parameter: Plant Line Value: WS
  misc_feature: MA Experiment 20000182 PARAMETER Experiment Name: At_2mM_SA_P Parameter: Timepoint (hr) Value: 6
  misc_feature: MA Experiment 20000182 PARAMETER Experiment Name: At_2mM_SA_P Parameter: Tissue Value: Aerial
  misc_feature: MA Experiment 20000182 PARAMETER Experiment Name: At_2mM_SA_P Parameter: Treatment Value: 2mM SA vs. No Treatment
  misc_feature: MA Experiment ID: 20001557 Result: Up-regulated in Transcription
  misc_feature: MA Experiment 20001557 PARAMETER Experiment Name: At_Drought_Soil_Dry_P Parameter: Age (day) Value: 27
  misc_feature: MA Experiment 20001557 PARAMETER Experiment Name: At_Drought_Soil_Dry_P Parameter: Organism Value: A. thaliana
  misc_feature: MA Experiment 20001557 PARAMETER Experiment Name: At_Drought_Soil_Dry_P Parameter: Plant Line Value: WS
  misc_feature: MA Experiment 20001557 PARAMETER Experiment Name: At_Drought_Soil_Dry_P Parameter: Post Timepoint (hr) Value: 3
  misc_feature: MA Experiment 20001557 PARAMETER Experiment Name: At_Drought_Soil_Dry_P Parameter: Post-Treatment Value: Re-Water vs. No Drought
  misc_feature: MA Experiment 20001557 PARAMETER Experiment Name: At_Drought_Soil_Dry_P Parameter: Timepoint (day) Value: 13
  misc_feature: MA Experiment 20001557 PARAMETER Experiment Name: At_Drought_Soil_Dry_P Parameter: Treatment Value: Drought vs. No Drought
agctcccacaccatcaaacttactacatctgagttattatgttgaaacaagagagtaacgacataggtagtggagagaacaacagggcacgaccctgtgacacatgccggtcaaacgcctgcaccgtgtattgccatgcagattctgcctacttgtgcatgagctgtgatgctcaagttcactctgccaatcgcgttgcttcccgccataaacgtgtccgggtctgcgagtcatgtgagcgtgctccggctgcttttttgtgtgaggcagatgatgcctctctatgcacagcctgtgattcagaggttcattctgcaaacccacttgctagacgccatcagcgagttccaattctaccaatttctggaaactctttcagctccatgaccactactcaccaccaaagcgagaaaacaatgaccgatccagagaagagactggtggtggatcaagaggaaggtgaagaaggtgataaggatgccaaggaggttgcttcgtggctgttccctaattcagacaaaaataacaataaccaaaacaatgggttattgtttagtgatgagtatctaaaccttgtggattacaactcgagtatggactacaaattcacaggtgaatacagtcaacaccaacaaaactgcagcgtaccacagacgagctacgggggagatagagttgttccgcttaaacttgaagaatcaaggggccaccagtgccataaccaacagaattttcagttcaatatcaaatatggctcctcagggactcactacaacgacaatggttccattaaccataacgtaaggcttttgtatatttgttaccccttcaatttagcatcttcccataacgcagcagggtgaattctttcatcatacacacaaatccactgatccactgccaacagttgatctatagcacatagaaatttcaccagaagtctataataaaaacaatatatgcttccttttgcatcgactctctttagtcctcttaccagggggattgagaatgtctttgtttctgtcattaggcatacatttcatccatggaaactggtgttgtgccggagtcaacagcatgtgtcacaacagcttcacacccaagaacgcccaaagggacagtagagcaacaacctgaccctgcaagccagatgataacagtaacacaactcagtccaatggacagagaagccagggtcctgagatacagagagaagaggaagacaaggaaatttgagaagacaataaggtatgcttcgaggaaggcatatgcagagataagaccgcgggtcaatggccggttcgcaaagagagaaatcgaagccgaggagcaagggttcaacacgatgctaatgtacaacacaggatatgggattgttccttcattctgatactcctgtggcaaaaagaaaaactagattgcaagctgtaaattacttttagtttgagattatgttaggtttggtgaaattcttagcttcaagaagtattactactgttgtgcaaatgggtttgtagttttggctaattaaaactatagtattcttct

SEQ ID NO: 77435 - protein, 274 aa, Arabidopsis thaliana
  peptide (1)..(274): Ceres Seq. ID no. 12576410
  misc_feature (15)..(62): Pfam Name: B-box zinc finger Pfam Description: B-box zinc finger
  misc_feature (1)..(254): Homolog of NCBI NO: 15242402 NR Description: Zinc finger protein CONSTANS; protein id: supported by cDNA: 2588. [Arabidopsis thaliana]
  misc_feature (1)..(254): Homolog of NCBI NO: 7488448 NR Description: CONSTANS homolog 1 - rape
  misc_feature (1)..(254): Homolog of NCBI NO: 11037308 NR Description: constans-like protein [Brassica nigra]
  misc_feature (1)..(254): Homolog of NCBI NO: 7488449 NR Description: CONSTANS homolog 9 - rape
  misc_feature (1)..(254): Homolog of NCBI NO: 2895186 NR Description: CONSTANS homolog [Brassica napus]
  misc_feature (13)..(257): Homolog of NCBI NO: 15242403 NR Description: Zinc finger protein CONSTANS-LIKE 1 (COL1); id: At5g15850.1, supported by cDNA: gi_18389243 [Arabidopsis
  misc_feature (1)..(131): Homolog of NCBI NO: 15232898 NR Description: Zinc finger protein CONSTANS-LIKE 2 (COL2); id: At3g02380.1, supported by cDNA: 949., supported by cDNA: supported by cDNA: gi_1507700, supported by cDNA: gi_16323407
  misc_feature (139)..(254): Homolog of NCBI NO: 15232898 NR Description: Zinc finger protein CONSTANS-LIKE 2 (COL2); id: At3g02380.1, supported by cDNA: 949., supported by cDNA: supported by cDNA: gi_1507700, supported by cDNA: gi_16323407
  misc_feature (13)..(258): Homolog of NCBI NO: 22854906 NR Description: COL1 protein [Brassica nigra] COL1 protein [Brassica nigra] >gi|22854914|gb|AAN09812.1| COL1 [Brassica nigra] >gi|22854918|gb|AAN09814.1| COL1 protein
  misc_feature (13)..(258): Homolog of NCBI NO: 22854916 NR Description: COL1 protein [Brassica nigra]
MLKQESNDIGSGENNRARPCDTCRSNACTVYCHADSAYLCMSCDAQVHSANRVASRHKRVRVCESCERAPAAFLCEADDASLCTACDSEVHSANPLARRHQRVPILPISGNSFSSMTTTHHQSEKTMTDPEKRLVVDQEEGEEGDKDAKEVASWLFPNSDKNNNNQNNGLLFSDEYLNLVDYNSSMDYKFTGEYSQHQQNCSVPQTSYGGDRVVPLKLEESRGHQCHNQQNFQFNIKYGSSGTHYNDNGSINHNVRLLYICYPFNLASSHNAAG

SEQ ID NO: 77436 - protein, 234 aa, Arabidopsis thaliana
  peptide (1)..(234): Ceres Seq. ID no. 12576411
  misc_feature (19)..(65): Pfam Name: B-box zinc finger Pfam Description: B-box zinc finger
  misc_feature (1)..(214): Homolog of NCBI NO: 15242402 NR Description: Zinc finger protein CONSTANS; protein id: supported by cDNA: 2588. [Arabidopsis thaliana]
  misc_feature (1)..(214): Homolog of NCBI NO: 7488448 NR Description: CONSTANS homolog 1 - rape
  misc_feature (1)..(214): Homolog of NCBI NO: 11037308 NR Description: constans-like protein [Brassica nigra]
  misc_feature (1)..(214): Homolog of NCBI NO: 7488449 NR Description: CONSTANS homolog 9 - rape
  misc_feature (1)..(214): Homolog of NCBI NO: 2895186 NR Description: CONSTANS homolog [Brassica napus]
  misc_feature (1)..(217): Homolog of NCBI NO: 15242403 NR Description: Zinc finger protein CONSTANS-LIKE 1 (COL1); id: At5g15850.1, supported by cDNA: gi_18389243 [Arabidopsis
  misc_feature (1)..(91): Homolog of NCBI NO: 15232898 NR Description: Zinc finger protein CONSTANS-LIKE 2 (COL2); id: At3g02380.1, supported by cDNA: 949., supported by cDNA: supported by cDNA: gi_1507700, supported by cDNA: gi_16323407
  misc_feature (99)..(214): Homolog of NCBI NO: 15232898 NR Description: Zinc finger protein CONSTANS-LIKE 2 (COL2); id: At3g02380.1, supported by cDNA: 949., supported by cDNA: supported by cDNA: gi_1507700, supported by cDNA: gi_16323407
  misc_feature (1)..(218): Homolog of NCBI NO: 22854906 NR Description: COL1 protein [Brassica nigra] COL1 protein [Brassica nigra] >gi|22854914|gb|AAN09812.1| COL1 [Brassica nigra] >gi|22854918|gb|AAN09814.1| COL1 protein
  misc_feature (1)..(218): Homolog of NCBI NO: 22854916 NR Description: COL1 protein [Brassica nigra]
MSCDAQVHSANRVASRHKRVRVCESCERAPAAFLCEADDASLCTACDSEVHSANPLARRHQRVPILPISGNSFSSMTTTHHQSEKTMTDPEKRLVVDQEEGEEGDKDAKEVASWLFPNSDKNNNNQNNGLLFSDEYLNLVDYNSSMDYKFTGEYSQHQQNCSVPQTSYGGDRVVPLKLEESRGHQCHNQQNFQFNIKYGSSGTHYNDNGSINHNVRLLYICYPFNLASSHNAAG

SEQ ID NO: 77437 - protein, 159 aa, Arabidopsis thaliana
  peptide (1)..(159): Ceres Seq. ID no. 12576412
  misc_feature (1)..(139): Homolog of NCBI NO: 15242402 NR Description: Zinc finger protein CONSTANS; protein id: supported by cDNA: 2588. [Arabidopsis thaliana]
  misc_feature (1)..(139): Homolog of NCBI NO: 7488448 NR Description: CONSTANS homolog 1 - rape
  misc_feature (1)..(139): Homolog of NCBI NO: 11037308 NR Description: constans-like protein [Brassica nigra]
  misc_feature (1)..(139): Homolog of NCBI NO: 7488449 NR Description: CONSTANS homolog 9 - rape
  misc_feature (1)..(139): Homolog of NCBI NO: 2895186 NR Description: CONSTANS homolog [Brassica napus]
  misc_feature (1)..(142): Homolog of NCBI NO: 15242403 NR Description: Zinc finger protein CONSTANS-LIKE 1 (COL1); id: At5g15850.1, supported by cDNA: gi_18389243 [Arabidopsis
  misc_feature (1)..(16): Homolog of NCBI NO: 15232898 NR Description: Zinc finger protein CONSTANS-LIKE 2 (COL2); id: At3g02380.1, supported by cDNA: 949., supported by cDNA: supported by cDNA: gi_1507700, supported by cDNA: gi_16323407
  misc_feature (24)..(139): Homolog of NCBI NO: 15232898 NR Description: Zinc finger protein CONSTANS-LIKE 2 (COL2); id: At3g02380.1, supported by cDNA: 949., supported by cDNA: supported by cDNA: gi_1507700, supported by cDNA: gi_16323407
  misc_feature (1)..(143): Homolog of NCBI NO: 22854906 NR Description: COL1 protein [Brassica nigra] COL1 protein [Brassica nigra] >gi|22854914|gb|AAN09812.1| COL1 [Brassica nigra] >gi|22854918|gb|AAN09814.1| COL1 protein
  misc_feature (1)..(143): Homolog of NCBI NO: 22854916 NR Description: COL1 protein [Brassica nigra]
MTTTHHQSEKTMTDPEKRLVVDQEEGEEGDKDAKEVASWLFPNSDKNNNNQNNGLLFSDEYLNLVDYNSSMDYKFTGEYSQHQQNCSVPQTSYGGDRVVPLKLEESRGHQCHNQQNFQFNIKYGSSGTHYNDNGSINHNVRLLYICYPFNLASSHNAAG

SEQ ID NO: 77438 - DNA, 1219 bp, Arabidopsis thaliana
  misc_feature (1)..(1219): Ceres Seq. ID no. 12576429
  misc_feature: MA Experiment ID: 20000355 Result: Down-regulated in Transcription
  misc_feature: MA Experiment 20000355 PARAMETER Experiment Name: At_Siliques_Sub_P Parameter: Age (day) Value: 21
  misc_feature: MA Experiment 20000355 PARAMETER Experiment Name: At_Siliques_Sub_P Parameter: Organism Value: A. thaliana
  misc_feature: MA Experiment 20000355 PARAMETER Experiment Name: At_Siliques_Sub_P Parameter: Plant Line Value: WS
  misc_feature: MA Experiment 20000355 PARAMETER Experiment Name: At_Siliques_Sub_P Parameter: Tissue Value: Less Than 5mm Siliques vs. Whole Plant
gcgggaaaatcttgcatctgcctcagaaaattttctggggagctttcaccaattagttcttctcgtctctctctctctctttggttaatgtttctacagattctctcctcctaattcagagacgacaaaacgctataaacaacatttttacagtcatatggcagtcatatgtctccggttaatgcggaggttgaggagatgagatcagagtcgccggtggttaatgataaggcgttagatatttctgatgatgatcatgatgatgagaatgaaccgcttattgtttctggtgaatgtcgtatttgttctgatgagtctcctgttgagaatcttgagagcccttgtgcttgcagtggcagcctaaagtatgctcatagaaaatgtgttcagcgttggtgcaatgaaaagggaaacattatatgcgagatttgtcaccagccttatcaacctggatataccgctccaccacctccacttcagcctgaagaaacaactattgacattggtggaggatggacaatctcaggtttggatgtgcatgatcctcgtctccttgcaattgctgaagctgaacgtcggtatttagagtctgaatatgtggaatatacagcttcaagtgcaagcggggccgcattctgtcgctcagctgctctaatattaatggctcttcttctcttacgacacgcactgaccataacagatgatactgatggcgaagaagacgacccatcttcgatactatctcttgtcctgctccgagctgctggatttcttcttccatgctatatcatggcttgggccatcagtattctacagcgccgaagacagagacaggaagctgcagctttggctacacagtttgcgttggtgcttcagtcagggcagcctagaacagttcacttcacggtatcaccgggaatatcatcatccgccgtggctcatgcgactacatctacacaacaacagcatgacgatcctgtctgaattctgatctaatgtcacaagcatggagccattacaaggtacgatgtaaatcaaatgaagaatttggtgtccgtaaattgtatgagtaaaggattgaaatcatttgaattcgtggaaggttagatctttcattttacttgtagccaaaaatgtcaaataggttttgcacaaatttgtaaattctgctttactatttttcacacattgtcttgaaacttgagtgtatttttttttt

SEQ ID NO: 77439 - protein, 271 aa, Arabidopsis thaliana
  peptide (1)..(271): Ceres Seq. ID no. 12576430
  misc_feature (43)..(88): Pfam Name: Zinc finger, C3HC4 type (RING finger) Pfam Description: Zinc finger, C3HC4 type (RING finger)
  misc_feature (1)..(271): Homolog of NCBI NO: 15227065 NR Description: unknown protein; protein id: At2g02960.1, by cDNA: gi_17529099, supported by cDNA: gi_20259116 [Arabidopsis >gi|25365876|pir||F84442 hypothetical protein At2g02960
  misc_feature (3)..(243): Homolog of NCBI NO: 21537046 NR Description: nucleoside triphosphatase, putative [Arabidopsis
  misc_feature (3)..(243): Homolog of NCBI NO: 15223693 NR Description: nucleoside triphosphatase, putative; protein id:
  misc_feature (3)..(243): Homolog of NCBI NO: 26451292 NR Description: unknown protein [Arabidopsis thaliana]
  misc_feature (3)..(243): Homolog of NCBI NO: 25365878 NR Description: F14L17.2 protein - Arabidopsis thaliana
  misc_feature (29)..(254): Homolog of NCBI NO: 18424590 NR Description: expressed protein; protein id: At5g62460.1, by cDNA: gi_16974606 [Arabidopsis thaliana] gene_id:K19B1.7~unknown protein [Arabidopsis thaliana]
  misc_feature (32)..(249): Homolog of NCBI NO: 15232824 NR Description: putative protein; protein id: At3g47550.1
  misc_feature (32)..(222): Homolog of NCBI NO: 30692888 NR Description: expressed protein [Arabidopsis thaliana]
  misc_feature (32)..(193): Homolog of NCBI NO: 30692886 NR Description: expressed protein [Arabidopsis thaliana]
  misc_feature (1)..(217): Homolog of NCBI NO: 22325409 NR Description: similar to nucleoside triphosphatase, putative;
MSPVNAEVEEMRSESPVVNDKALDISDDDHDDENEPLIVSGECRICSDESPVENLESPCACSGSLKYAHRKCVQRWCNEKGNIICEICHQPYQPGYTAPPPPLQPEETTIDIGGGWTISGLDVHDPRLLAIAEAERRYLESEYVEYTASSASGAAFCRSAALILMALLLLRHALTITDDTDGEEDDPSSILSLVLLRAAGFLLPCYIMAWAISILQRRRQRQEAAALATQFALVLQSGQPRTVHFTVSPGISSSAVAHATTSTQQQHDDPV

SEQ ID NO: 77440 - protein, 261 aa, Arabidopsis thaliana
  peptide (1)..(261): Ceres Seq. ID no. 12576431
  misc_feature (33)..(78): Pfam Name: Zinc finger, C3HC4 type (RING finger) Pfam Description: Zinc finger, C3HC4 type (RING finger)
  misc_feature (1)..(261): Homolog of NCBI NO: 15227065 NR Description: unknown protein; protein id: At2g02960.1, by cDNA: gi_17529099, supported by cDNA: gi_20259116 [Arabidopsis >gi|25365876|pir||F84442 hypothetical protein At2g02960
  misc_feature (1)..(233): Homolog of NCBI NO: 21537046 NR Description: nucleoside triphosphatase, putative [Arabidopsis
  misc_feature (1)..(233): Homolog of NCBI NO: 15223693 NR Description: nucleoside triphosphatase, putative; protein id:
  misc_feature (1)..(233): Homolog of NCBI NO: 26451292 NR Description: unknown protein [Arabidopsis thaliana]
  misc_feature (1)..(233): Homolog of NCBI NO: 25365878 NR Description: F14L17.2 protein - Arabidopsis thaliana
  misc_feature (19)..(244): Homolog of NCBI NO: 18424590 NR Description: expressed protein; protein id: At5g62460.1, by cDNA: gi_16974606 [Arabidopsis thaliana] gene_id:K19B1.7~unknown protein [Arabidopsis thaliana]
  misc_feature (22)..(239): Homolog of NCBI NO: 15232824 NR Description: putative protein; protein id: At3g47550.1
  misc_feature (22)..(212): Homolog of NCBI NO: 30692888 NR Description: expressed protein [Arabidopsis thaliana]
  misc_feature (22)..(183): Homolog of NCBI NO: 30692886 NR Description: expressed protein [Arabidopsis thaliana]
  misc_feature (1)..(207): Homolog of NCBI NO: 22325409 NR Description: similar to nucleoside triphosphatase, putative;
MRSESPVVNDKALDISDDDHDDENEPLIVSGECRICSDESPVENLESPCACSGSLKYAHRKCVQRWCNEKGNIICEICHQPYQPGYTAPPPPLQPEETTIDIGGGWTISGLDVHDPRLLAIAEAERRYLESEYVEYTASSASGAAFCRSAALILMALLLLRHALTITDDTDGEEDDPSSILSLVLLRAAGFLLPCYIMAWAISILQRRRQRQEAAALATQFALVLQSGQPRTVHFTVSPGISSSAVAHATTSTQQQHDDPV

SEQ ID NO: 77441 - DNA, 937 bp, Arabidopsis thaliana
  misc_feature (1)..(937): Ceres Seq. ID no. 12576432
  misc_feature: MA Experiment ID: 20000184 Result: Down-regulated in Transcription
  misc_feature: MA Experiment 20000184 PARAMETER Experiment Name: At_Shoots__P Parameter: Age (day) Value: 7
  misc_feature: MA Experiment 20000184 PARAMETER Experiment Name: At_Shoots__P Parameter: Tissue Value: Shoots vs. Whole Plant
  misc_feature: MA Experiment ID: 20000794 Result: Up-regulated in Transcription
  misc_feature: MA Experiment 20000794 PARAMETER Experiment Name: At_Petals_P Parameter: Age (day) Value: 23-25 days
  misc_feature: MA Experiment 20000794 PARAMETER Experiment Name: At_Petals_P Parameter: Plant Line Value: WS
  misc_feature: MA Experiment 20000794 PARAMETER Experiment Name: At_Petals_P Parameter: Tissue Value: Petals vs. Whole plant
  misc_feature: MA Experiment ID: 20001247 Result: Up-regulated in Transcription
  misc_feature: MA Experiment 20001247 PARAMETER Experiment Name: At_Far-red-induction_P Parameter: Age (day) Value: 7
  misc_feature: MA Experiment 20001247 PARAMETER Experiment Name: At_Far-red-induction_P Parameter: Light Value: Far-red vs. White
  misc_feature: MA Experiment 20001247 PARAMETER Experiment Name: At_Far-red-induction_P Parameter: Organism Value: A. thaliana
  misc_feature: MA Experiment 20001247 PARAMETER Experiment Name: At_Far-red-induction_P Parameter: Plant Line Value: Columbia
  misc_feature: MA Experiment 20001247 PARAMETER Experiment Name: At_Far-red-induction_P Parameter: Timepoint (hr) Value: 1
  misc_feature: MA Experiment 20001247 PARAMETER Experiment Name: At_Far-red-induction_P Parameter: Tissue Value: Whole Plant
  misc_feature: MA Experiment ID: 20001450 Result: Up-regulated in Transcription
  misc_feature: MA Experiment 20001450 PARAMETER Experiment Name: At_Far-red-induction_P Parameter: Age (day) Value: 7
  misc_feature: MA Experiment 20001450 PARAMETER Experiment Name: At_Far-red-induction_P Parameter: Light Value: Far-red vs. White
  misc_feature: MA Experiment 20001450 PARAMETER Experiment Name: At_Far-red-induction_P Parameter: Organism Value: A. thaliana
  misc_feature: MA Experiment 20001450 PARAMETER Experiment Name: At_Far-red-induction_P Parameter: Plant Line Value: Columbia
  misc_feature: MA Experiment 20001450 PARAMETER Experiment Name: At_Far-red-induction_P Parameter: Timepoint (hr) Value: 8
  misc_feature: MA Experiment 20001450 PARAMETER Experiment Name: At_Far-red-induction_P Parameter: Tissue Value: Whole Plant
  misc_feature: MA Experiment ID: 20001451 Result: Up-regulated in Transcription
  misc_feature: MA Experiment 20001451 PARAMETER Experiment Name: At_Far-red-induction_P Parameter: Age (day) Value: 7
  misc_feature: MA Experiment 20001451 PARAMETER Experiment Name: At_Far-red-induction_P Parameter: Light Value: Far-red vs. White
  misc_feature: MA Experiment 20001451 PARAMETER Experiment Name: At_Far-red-induction_P Parameter: Organism Value: A. thaliana
  misc_feature: MA Experiment 20001451 PARAMETER Experiment Name: At_Far-red-induction_P Parameter: Plant Line Value: Columbia
  misc_feature: MA Experiment 20001451 PARAMETER Experiment Name: At_Far-red-induction_P Parameter: Timepoint (hr) Value: 24
  misc_feature: MA Experiment 20001451 PARAMETER Experiment Name: At_Far-red-induction_P Parameter: Tissue Value: Whole Plant
aaaacccaattccctaatcccaaaattcgatctctcatctgatggctggttacagagccgatgaagagtacgattacctcttcaagctcgtgttgatcggcgactctggtgtcggcaaatcgaatctgctctctcggttcaccaagaacgagttcaatctcgaatccaagtctactattggtgttgagttcgctaccaaaaccactaaagtcgaaggcaaagtcgtcaaagctcagatttgggatactgctggtcaagagagataccgagcaatcacaagcgcttattacagaggagctgttggtgctttgcttatttacgacgtgacaaggcacgcaacatttgagaatgcagcaagatggctaagggaactaagaggacacacagacccaaacatagtggtgatgcttatagggaacaagtgcgatctgcgtcacttggtggcagtcaaaacagaagaggctaaagcctttgctgagagagaatccctctatttcatggagacttcagctctagacgcaaccaatgttgaaaacgcattcacggaagtgctcactcagatccacaagatagtgagcaaaagaagtgttgatggaggaggagagtcggctgatttaccgggaaaaggagagacgataaacgttaaagaagacggatcggttcttaagagaatgggttgctgctctaactagagtggggggattgtagatttggcttgatttggttagggtgagacaacaaatgataatctctttgggtcttgcaatcaaaaaagaaataagaaacgattacttttaagatcatgtgtatgctttggtaactttggcctgtaaggtcctttaaaatttaagtacatgattggtaatttgttttcaacactcccaccacttgtaatttgtaaacttgtaataaactgaagaaatgcaaatcatcacct

SEQ ID NO: 77442 - protein, 216 aa, Arabidopsis thaliana; identical to SEQ ID NO: 20728
  peptide (1)..(216): Ceres Seq. ID no. 12576433
  misc_feature (15)..(176): Pfam Name: Ras family Pfam Description: Ras family
  misc_feature (1)..(216): Homolog of NCBI NO: 15221477 NR Description: Ras-related GTP-binding protein (RAB11D); protein At1g06400.1, supported by cDNA: gi_12083263, supported by cDNA:
  misc_feature (1)..(215): Homolog of NCBI NO: 3024502 NR Description: RAS-RELATED PROTEIN RAB11D

SEQ ID NO: 77443 - DNA, 1158 bp, Arabidopsis thaliana
  misc_feature (1)..(1158): Ceres Seq. ID no. 12576440
  misc_feature: MA Experiment ID: 20000171 Result: Down-regulated in Transcription
  misc_feature: MA Experiment 20000171 PARAMETER Experiment Name: At_42deg_Heat_P Parameter: Age (day) Value: 14
  misc_feature: MA Experiment 20000171 PARAMETER Experiment Name: At_42deg_Heat_P Parameter: Organism Value: A. thaliana
  misc_feature: MA Experiment 20000171 PARAMETER Experiment Name: At_42deg_Heat_P Parameter: Plant Line Value: WS
  misc_feature: MA Experiment 20000171 PARAMETER Experiment Name: At_42deg_Heat_P Parameter: Temperature (deg C) Value: 42 vs. 22
  misc_feature: MA Experiment 20000171 PARAMETER Experiment Name: At_42deg_Heat_P Parameter: Timepoint (hr) Value: 1
  misc_feature: MA Experiment 20000171 PARAMETER Experiment Name: At_42deg_Heat_P Parameter: Tissue Value: Aerial
  misc_feature: MA Experiment ID: 20000184 Result: Down-regulated in Transcription
  misc_feature: MA Experiment 20000184 PARAMETER Experiment Name: At_Shoots__P Parameter: Age (day) Value: 7
  misc_feature: MA Experiment 20000184 PARAMETER Experiment Name: At_Shoots__P Parameter: Tissue Value: Shoots vs. Whole Plant
acagcttgaaagatctggagattgcgacacgtggcttctctgatgataacatgatcggtgaaggagggtacggtgtcgtttacagagctgatttctctgacggttctgtcgccgccgtcaagaatctccttaacaacaagggtcaggcggagaaggagttcaaagttgaagtagaagcaattgggaaagtaagacataagaacttggttggtctgatgggatattgtgctgacagtgctcaaagtcaaaggatgcttgtgtatgaatatattgataatggaaacttggagcagtggttacacggtgatgtaggtccggtgagtcctcttacgtgggatatccgcatgaagatagccattggaacagcaaaaggattagcctatttacatgaagggcttgaacctaaggttgtgcaccgtgatgtgaaatctagtaacatcttgctcgataagaaatggaacgcgaaagtgtctgattttggtttggccaagttattaggatctgaaacaagctacgtgacaactcgtgtgatgggaacttttggatatgtttcaccggaatatgcaagtactggtatgctcaatgagtgtagtgatgtctacagtttcggtgttctgctcatggagatcattacaggaaggagcccagttgattattcaagaccgcctggcgagatgaacttagtggattggttcaaaggaatggttgcaagtagacgtggagaagaagttatagaccctaaaatcaagacatcacctcctccaagagctttgaaaagagctttgcttgtttgtttgcgttgcatagaccttgactctagtaaacgaccaaagatgggacaaatcattcacatgcttgaggctgaagattttccattccgtcctgaacacagatcaaaccaggaaagatcgaagtaagaaagattattgggcaaacaataatgtcttggggaagaccacacttgagcgttgatgctattcattacacagccatatattgatagatgtttccatgtttgttcttatattgagaggattgatatgcaaaagagaaaattggaaaagtgaaattagatatatgaggatgaaattcagatttatcgcttgtaatttgtaaatatatcatatattgtataataaaacagtgaactctaagaac

SEQ ID NO: 77444 - protein, 304 aa, Arabidopsis thaliana
  peptide (1)..(304): Ceres Seq. ID no. 12576441
  misc_feature (12)..(285): Pfam Name: Protein kinase domain Pfam Description: Protein kinase domain
  misc_feature (1)..(294): Homolog of NCBI NO: 7488207 NR Description: probable serine/threonine-specific protein kinase
  misc_feature (1)..(304): Homolog of NCBI NO: 30690058 NR Description: protein kinase family [Arabidopsis thaliana]
  misc_feature (2)..(293): Homolog of NCBI NO: 34902334 NR Description: Putative serine/threonine protein kinase [Oryza
  misc_feature (1)..(304): Homolog of NCBI NO: 14194119 NR Description: At1g01540/F22L4_6 [Arabidopsis thaliana]
  misc_feature (1)..(304): Homolog of NCBI NO: 15223428 NR Description: protein serine/threonine kinase, putative; id: At1g01540.1, supported by cDNA: gi_12083265, supported by gi_14194118, supported by cDNA: gi_20334727 [Arabidopsis
  misc_feature (1)..(300): Homolog of NCBI NO: 34897534 NR Description: OSJNBa0042L16.4 [Oryza sativa (japonica
  misc_feature (46)..(304): Homolog of NCBI NO: 25518287 NR Description: hypothetical protein F22L4.8 - Arabidopsis >gi|8920590|gb|AAF81312.1|AC061957_8 Contains a strong similarity an unknown protein from Arabidopsis thaliana gi|2505874 and
  misc_feature (1)..(46): Homolog of NCBI NO: 25518287 NR Description: hypothetical protein F22L4.8 - Arabidopsis >gi|8920590|gb|AAF81312.1|AC061957_8 Contains a strong similarity an unknown protein from Arabidopsis thaliana gi|2505874 and
  misc_feature (1)..(293): Homolog of NCBI NO: 15234142 NR Description: putative protein kinase; protein id: At4g01330.1
  misc_feature (1)..(299): Homolog of NCBI NO: 15235432 NR Description: putative serine/threonine protein kinase; protein At4g02630.1 [Arabidopsis thaliana] >gi|7488204|pir||T01086
SLKDLEIATRGFSDDNMIGEGGYGVVYRADFSDGSVAAVKNLLNNKGQAEKEFKVEVEAIGKVRHKNLVGLMGYCADSAQSQRMLVYEYIDNGNLEQWLHGDVGPVSPLTWDIRMKIAIGTAKGLAYLHEGLEPKVVHRDVKSSNILLDKKWNAKVSDFGLAKLLGSETSYVTTRVMGTFGYVSPEYASTGMLNECSDVYSFGVLLMEIITGRSPVDYSRPPGEMNLVDWFKGMVASRRGEEVIDPKIKTSPPPRALKRALLVCLRCIDLDSSKRPKMGQIIHMLEAEDFPFRPEHRSNQERSK

SEQ ID NO: 77445 - protein, 288 aa, Arabidopsis thaliana
  peptide (1)..(288): Ceres Seq. ID no. 12576442
  misc_feature (1)..(269): Pfam Name: Protein kinase domain Pfam Description: Protein kinase domain
  misc_feature (1)..(278): Homolog of NCBI NO: 7488207 NR Description: probable serine/threonine-specific protein kinase
  misc_feature (1)..(288): Homolog of NCBI NO: 30690058 NR Description: protein kinase family [Arabidopsis thaliana]
  misc_feature (1)..(277): Homolog of NCBI NO: 34902334 NR Description: Putative serine/threonine protein kinase [Oryza
  misc_feature (1)..(288): Homolog of NCBI NO: 14194119 NR Description: At1g01540/F22L4_6 [Arabidopsis thaliana]
  misc_feature (1)..(288): Homolog of NCBI NO: 15223428 NR Description: protein serine/threonine kinase, putative; id: At1g01540.1, supported by cDNA: gi_12083265, supported by gi_14194118, supported by cDNA: gi_20334727 [Arabidopsis
  misc_feature (1)..(284): Homolog of NCBI NO: 34897534 NR Description: OSJNBa0042L16.4 [Oryza sativa (japonica
  misc_feature (30)..(288): Homolog of NCBI NO: 25518287 NR Description: hypothetical protein F22L4.8 - Arabidopsis >gi|8920590|gb|AAF81312.1|AC061957_8 Contains a strong similarity an unknown protein from Arabidopsis thaliana gi|2505874 and
  misc_feature (1)..(30): Homolog of NCBI NO: 25518287 NR Description: hypothetical protein F22L4.8 - Arabidopsis >gi|8920590|gb|AAF81312.1|AC061957_8 Contains a strong similarity an unknown protein from Arabidopsis thaliana gi|2505874 and
  misc_feature (1)..(277): Homolog of NCBI NO: 15234142 NR Description: putative protein kinase; protein id: At4g01330.1
  misc_feature (1)..(283): Homolog of NCBI NO: 15235432 NR Description: putative serine/threonine protein kinase; protein At4g02630.1 [Arabidopsis thaliana] >gi|7488204|pir||T01086
MIGEGGYGVVYRADFSDGSVAAVKNLLNNKGQAEKEFKVEVEAIGKVRHKNLVGLMGYCADSAQSQRMLVYEYIDNGNLEQWLHGDVGPVSPLTWDIRMKIAIGTAKGLAYLHEGLEPKVVHRDVKSSNILLDKKWNAKVSDFGLAKLLGSETSYVTTRVMGTFGYVSPEYASTGMLNECSDVYSFGVLLMEIITGRSPVDYSRPPGEMNLVDWFKGMVASRRGEEVIDPKIKTSPPPRALKRALLVCLRCIDLDSSKRPKMGQIIHMLEAEDFPFRPEHRSNQERSK

SEQ ID NO: 77446 - protein, 233 aa, Arabidopsis thaliana
  peptide (1)..(233): Ceres Seq. ID no. 12576443
  misc_feature (1)..(214): Pfam Name: Protein kinase domain Pfam Description: Protein kinase domain
  misc_feature (1)..(223): Homolog of NCBI NO: 7488207 NR Description: probable serine/threonine-specific protein kinase
  misc_feature (1)..(233): Homolog of NCBI NO: 30690058 NR Description: protein kinase family [Arabidopsis thaliana]
  misc_feature (1)..(222): Homolog of NCBI NO: 34902334 NR Description: Putative serine/threonine protein kinase [Oryza
  misc_feature (1)..(233): Homolog of NCBI NO: 14194119 NR Description: At1g01540/F22L4_6 [Arabidopsis thaliana]
  misc_feature (1)..(233): Homolog of NCBI NO: 15223428 NR Description: protein serine/threonine kinase, putative; id: At1g01540.1, supported by cDNA: gi_12083265, supported by gi_14194118, supported by cDNA: gi_20334727 [Arabidopsis
  misc_feature (1)..(229): Homolog of NCBI NO: 34897534 NR Description: OSJNBa0042L16.4 [Oryza sativa (japonica
  misc_feature (1)..(233): Homolog of NCBI NO: 25518287 NR Description: hypothetical protein F22L4.8 - Arabidopsis >gi|8920590|gb|AAF81312.1|AC061957_8 Contains a strong similarity an unknown protein from Arabidopsis thaliana gi|2505874 and
  misc_feature (1)..(222): Homolog of NCBI NO: 15234142 NR Description: putative protein kinase; protein id: At4g01330.1
  misc_feature (1)..(228): Homolog of NCBI NO: 15235432 NR Description: putative serine/threonine protein kinase; protein At4g02630.1 [Arabidopsis thaliana] >gi|7488204|pir||T01086
  misc_feature (1)..(231): Homolog of NCBI NO: 34894708 NR Description: Putative protein kinase [Oryza sativa (japonica group)] >gi|12328581|dbj|BAB21240.1| Putative protein kinase
MGYCADSAQSQRMLVYEYIDNGNLEQWLHGDVGPVSPLTWDIRMKIAIGTAKGLAYLHEGLEPKVVHRDVKSSNILLDKKWNAKVSDFGLAKLLGSETSYVTTRVMGTFGYVSPEYASTGMLNECSDVYSFGVLLMEIITGRSPVDYSRPPGEMNLVDWFKGMVASRRGEEVIDPKIKTSPPPRALKRALLVCLRCIDLDSSKRPKMGQIIHMLEAEDFPFRPEHRSNQERSK

SEQ ID NO: 77447 - DNA, 845 bp, Arabidopsis thaliana
  misc_feature (1)..(845): Ceres Seq. ID no. 12576463
  misc_feature: MA Experiment ID: 108435 Result: Down-regulated in Transcription
  misc_feature: MA Experiment 108435 PARAMETER Experiment Name: At_stm_Mutants_cDNA_P Parameter: Plant Line Value: wt Landsburg vs stm
  misc_feature: MA Experiment 108435 PARAMETER Experiment Name: At_stm_Mutants_cDNA_P Parameter: Tissue Value: Shoot Apical Meristem Region
  misc_feature: MA Experiment ID: 108461 Result: Up-regulated in Transcription
  misc_feature: MA Experiment 108461 PARAMETER Experiment Name: At_Germinating_Seeds_cDNA_P Parameter: Age (day) Value: 1 vs. 0
  misc_feature: MA Experiment 108461 PARAMETER Experiment Name: At_Germinating_Seeds_cDNA_P Parameter: Tissue Value: Germinating Seeds
  misc_feature: MA Experiment ID: 108462 Result: Up-regulated in Transcription
  misc_feature: MA Experiment 108462 PARAMETER Experiment Name: At_Germinating_Seeds_cDNA_P Parameter: Age (day) Value: 2 vs. 0
  misc_feature: MA Experiment 108462 PARAMETER Experiment Name: At_Germinating_Seeds_cDNA_P Parameter: Tissue Value: Germinating Seeds
  misc_feature: MA Experiment ID: 108463 Result: Up-regulated in Transcription
  misc_feature: MA Experiment 108463 PARAMETER Experiment Name: At_Germinating_Seeds_cDNA_P Parameter: Age (day) Value: 3 vs. 0
  misc_feature: MA Experiment 108463 PARAMETER Experiment Name: At_Germinating_Seeds_cDNA_P Parameter: Tissue Value: Germinating Seeds
  misc_feature: MA Experiment ID: 108464 Result: Up-regulated in Transcription
  misc_feature: MA Experiment 108464 PARAMETER Experiment Name: At_Germinating_Seeds_cDNA_P Parameter: Age (day) Value: 4 vs. 0
  misc_feature: MA Experiment 108464 PARAMETER Experiment Name: At_Germinating_Seeds_cDNA_P Parameter: Tissue Value: Germinating Seeds
  misc_feature: MA Experiment ID: 108579 Result: Down-regulated in Transcription
  misc_feature: MA Experiment 108579 PARAMETER Experiment Name: At_4deg_Cold_cDNA_P Parameter: Temperature (deg C) Value: 4 vs. 22
  misc_feature: MA Experiment 108579 PARAMETER Experiment Name: At_4deg_Cold_cDNA_P Parameter: Timepoint (hr) Value: 6
  misc_feature: MA Experiment 108579 PARAMETER Experiment Name: At_4deg_Cold_cDNA_P Parameter: Tissue Value: Aerial
  misc_feature: MA Experiment ID: 108595 Result: Down-regulated in Transcription
  misc_feature: MA Experiment 108595 PARAMETER Experiment Name: At_Ler-pi_Ovule_cDNA_P Parameter: Plant Line Value: null
attgttcttgaacatctccgaagctaactccgaacatcaaaactgtatcttcttctcctcctcctccttggcccttttcacaaagtttcagggacaaagagtttttgttgtcagtaacttcaagctctaagctatggctgtcaccaagatttatattgtgtactattccttgcacggccacgtcgagacaatggcacgagaggtacttcggggagtaaactctgttccagacgtggaagcaacactttggcaagtgccagagacattaccggagaaaatattggagaaagtgaaggccgttccaagaccggacgatgtgccggatattcgaccagaacaactggcggaagccgacggattcatgtttggctttccttctaggtttggagtgatggcatcacaggtcatgactttctttgacaatacaaatgatctctggactacacaggctctcgctgggaaacctgcaggaatcttctggagtacgggtttccacggtggaggccaagaactaactgcgttgacggcagtgacaaaactggctcatcacgggatgatatttgtaccggtaggatacacattcggtaaaagtatgtacgagatgggagaggtgaaaggtggttcgccttatggctcagggacttatgcagctgatggatcacgcgagccaacagagctggagattcagcaggcaaattaccatggcaagtactttgcaggaatagccaagaaactcaagaaacggtctcctgtctaaattctaaaccatatcaactctgtgtttcctatactaaacaatctgtaaatgtaaaggtgaacactgaaaataagatcgacatatacag

SEQ ID NO: 77448 - protein, 207 aa, Arabidopsis thaliana; identical to SEQ ID NO: 30130
  peptide (1)..(207): Ceres Seq. ID no. 12576464
  misc_feature (1)..(207): Homolog of NCBI NO: 22327957 NR Description: quinone reductase family; protein id: supported by cDNA: gi_17381197, supported by cDNA: gi_20465806
  misc_feature (1)..(202): Homolog of NCBI NO: 21068664 NR Description: putative quinone oxidoreductase [Cicer arietinum]
  misc_feature (4)..(202): Homolog of NCBI NO: 5031275 NR Description: unknown [Prunus armeniaca]
  misc_feature (1)..(202): Homolog of NCBI NO: 34910128 NR Description: putative 1,4-benzoquinone reductase [Oryza sativa
  misc_feature (4)..(202): Homolog of NCBI NO: 30687535 NR Description: quinone reductase family [Arabidopsis thaliana]
  misc_feature (4)..(202): Homolog of NCBI NO: 15239652 NR Description: quinone reductase, putative; protein id:
  misc_feature (5)..(202): Homolog of NCBI NO: 38636776 NR Description: putative quinone-oxidoreductase QR2 [Oryza sativa
  misc_feature (4)..(205): Homolog of NCBI NO: 12484052 NR Description: quinone-oxidoreductase QR2 [Triphysaria
  misc_feature (4)..(202): Homolog of NCBI NO: 7445353 NR Description: hypothetical protein M4I22.80 - Arabidopsis >gi|3269288|emb|CAA19721.1| putative protein [Arabidopsis >gi|7269580|emb|CAB79582.1| putative protein [Arabidopsis
  misc_feature (5)..(201): Homolog of NCBI NO: 15234512 NR Description: quinone reductase family; protein id: supported by cDNA: 35084., supported by cDNA: gi_15529267

SEQ ID NO: 77449 - protein, 188 aa, Arabidopsis thaliana; identical to SEQ ID NO: 30131
  peptide (1)..(188): Ceres Seq. ID no. 12576465
  misc_feature (1)..(188): Homolog of NCBI NO: 22327957 NR Description: quinone reductase family; protein id: supported by cDNA: gi_17381197, supported by cDNA: gi_20465806
  misc_feature (1)..(183): Homolog of NCBI NO: 21068664 NR Description: putative quinone oxidoreductase [Cicer arietinum]
  misc_feature (1)..(183): Homolog of NCBI NO: 5031275 NR Description: unknown [Prunus armeniaca]
  misc_feature (1)..(183): Homolog of NCBI NO: 34910128 NR Description: putative 1,4-benzoquinone reductase [Oryza sativa
  misc_feature (1)..(183): Homolog of NCBI NO: 30687535 NR Description: quinone reductase family [Arabidopsis thaliana]
  misc_feature (1)..(183): Homolog of NCBI NO: 15239652 NR Description: quinone reductase, putative; protein id:
  misc_feature (1)..(183): Homolog of NCBI NO: 38636776 NR Description: putative quinone-oxidoreductase QR2 [Oryza sativa
  misc_feature (1)..(186): Homolog of NCBI NO: 12484052 NR Description: quinone-oxidoreductase QR2 [Triphysaria
  misc_feature (1)..(183): Homolog of NCBI NO: 7445353 NR Description: hypothetical protein M4I22.80 - Arabidopsis >gi|3269288|emb|CAA19721.1| putative protein [Arabidopsis >gi|7269580|emb|CAB79582.1| putative protein [Arabidopsis
  misc_feature (1)..(182): Homolog of NCBI NO: 15234512 NR Description: quinone reductase family; protein id: supported by cDNA: 35084., supported by cDNA: gi_15529267

SEQ ID NO: 77450 - protein, 131 aa, Arabidopsis thaliana; identical to SEQ ID NO: 30132
  peptide (1)..(131): Ceres Seq. ID no. 12576466
  misc_feature (1)..(131): Homolog of NCBI NO: 22327957 NR Description: quinone reductase family; protein id: supported by cDNA: gi_17381197, supported by cDNA: gi_20465806
  misc_feature (1)..(126): Homolog of NCBI NO: 21068664 NR Description: putative quinone oxidoreductase [Cicer arietinum]
  misc_feature (1)..(126): Homolog of NCBI NO: 5031275 NR Description: unknown [Prunus armeniaca]
  misc_feature (1)..(126): Homolog of NCBI NO: 34910128 NR Description: putative 1,4-benzoquinone reductase [Oryza sativa
  misc_feature (1)..(126): Homolog of NCBI NO: 30687535 NR Description: quinone reductase family [Arabidopsis thaliana]
  misc_feature (1)..(126): Homolog of NCBI NO: 15239652 NR Description: quinone reductase, putative; protein id:
  misc_feature (1)..(126): Homolog of NCBI NO: 38636776 NR Description: putative quinone-oxidoreductase QR2 [Oryza sativa
  misc_feature (1)..(129): Homolog of NCBI NO: 12484052 NR Description: quinone-oxidoreductase QR2 [Triphysaria
  misc_feature (1)..(126): Homolog of NCBI NO: 7445353 NR Description: hypothetical protein M4I22.80 - Arabidopsis >gi|3269288|emb|CAA19721.1| putative protein [Arabidopsis >gi|7269580|emb|CAB79582.1| putative protein [Arabidopsis
  misc_feature (1)..(125): Homolog of NCBI NO: 15234512 NR Description: quinone reductase family; protein id: supported by cDNA: 35084., supported by cDNA: gi_15529267

SEQ ID NO: 77451 - DNA, 1023 bp, Arabidopsis thaliana
  misc_feature (1)..(1023): Ceres Seq. ID no. 12576477
  misc_feature: MA Experiment ID: 108435 Result: Down-regulated in Transcription
  misc_feature: MA Experiment 108435 PARAMETER Experiment Name: At_stm_Mutants_cDNA_P Parameter: Plant Line Value: wt Landsburg vs stm
  misc_feature: MA Experiment 108435 PARAMETER Experiment Name: At_stm_Mutants_cDNA_P Parameter: Tissue Value: Shoot Apical Meristem Region
  misc_feature: MA Experiment ID: 108461 Result: Up-regulated in Transcription
  misc_feature: MA Experiment 108461 PARAMETER Experiment Name: At_Germinating_Seeds_cDNA_P Parameter: Age (day) Value: 1 vs. 0
  misc_feature: MA Experiment 108461 PARAMETER Experiment Name: At_Germinating_Seeds_cDNA_P Parameter: Tissue Value: Germinating Seeds
  misc_feature: MA Experiment ID: 108462 Result: Up-regulated in Transcription
  misc_feature: MA Experiment 108462 PARAMETER Experiment Name: At_Germinating_Seeds_cDNA_P Parameter: Age (day) Value: 2 vs. 0
  misc_feature: MA Experiment 108462 PARAMETER Experiment Name: At_Germinating_Seeds_cDNA_P Parameter: Tissue Value: Germinating Seeds
  misc_feature: MA Experiment ID: 108463 Result: Up-regulated in Transcription
  misc_feature: MA Experiment 108463 PARAMETER Experiment Name: At_Germinating_Seeds_cDNA_P Parameter: Age (day) Value: 3 vs. 0
  misc_feature: MA Experiment 108463 PARAMETER Experiment Name: At_Germinating_Seeds_cDNA_P Parameter: Tissue Value: Germinating Seeds
  misc_feature: MA Experiment ID: 108464 Result: Up-regulated in Transcription
  misc_feature: MA Experiment 108464 PARAMETER Experiment Name: At_Germinating_Seeds_cDNA_P Parameter: Age (day) Value: 4 vs. 0
  misc_feature: MA Experiment 108464 PARAMETER Experiment Name: At_Germinating_Seeds_cDNA_P Parameter: Tissue Value: Germinating Seeds
  misc_feature: MA Experiment ID: 108488 Result: Up-regulated in Transcription
  misc_feature: MA Experiment ID: 108489 Result: Down-regulated in Transcription
  misc_feature: MA Experiment ID: 108573 Result: Up-regulated in Transcription
  misc_feature: MA Experiment 108573 PARAMETER Experiment Name: At_Drought_cDNA_P Parameter: Timepoint (hr) Value: 6
  misc_feature: MA Experiment 108573 PARAMETER Experiment Name: At_Drought_cDNA_P Parameter: Tissue Value: Aerial
  misc_feature: MA Experiment 108573 PARAMETER Experiment Name: At_Drought_cDNA_P Parameter: Treatment Value: Drought vs. No Drought
  misc_feature: MA Experiment ID: 20000072 Result: Down-regulated in Transcription
  misc_feature: MA Experiment 20000072 PARAMETER Experiment Name: At_100uM_ABA_Mutants_cDNA_P Parameter: Plant Line Value: CS8105
  misc_feature: MA Experiment 20000072 PARAMETER Experiment Name: At_100uM_ABA_Mutants_cDNA_P Parameter: Timepoint (hr) Value: 6
  misc_feature: MA Experiment 20000072 PARAMETER Experiment Name: At_100uM_ABA_Mutants_cDNA_P Parameter: Tissue Value: Aerial
  misc_feature: MA Experiment 20000072 PARAMETER Experiment Name: At_100uM_ABA_Mutants_cDNA_P Parameter: Treatment Value: 100uM ABA vs. No Treatment
  misc_feature: MA Experiment ID: 20000086 Result: Down-regulated in Transcription
  misc_feature: MA Experiment 20000086 PARAMETER Experiment Name: At_100uM_ABA_Mutants_cDNA_P Parameter: Plant Line Value: CS22
  misc_feature: MA Experiment 20000086 PARAMETER Experiment Name: At_100uM_ABA_Mutants_cDNA_P Parameter: Timepoint (hr) Value: 6
  misc_feature: MA Experiment 20000086 PARAMETER Experiment Name: At_100uM_ABA_Mutants_cDNA_P Parameter: Tissue Value: Aerial
  misc_feature: MA Experiment 20000086 PARAMETER Experiment Name: At_100uM_ABA_Mutants_cDNA_P Parameter: Treatment Value: 100uM ABA vs. No Treatment
  misc_feature: MA Experiment ID: 20000087 Result: Down-regulated in Transcription
  misc_feature: MA Experiment 20000087 PARAMETER Experiment Name: At_100uM_ABA_Mutants_cDNA_P Parameter: Plant Line Value: WS
  misc_feature: MA Experiment 20000087 PARAMETER Experiment Name: At_100uM_ABA_Mutants_cDNA_P Parameter: Timepoint (hr) Value: 6
  misc_feature: MA Experiment 20000087 PARAMETER Experiment Name: At_100uM_ABA_Mutants_cDNA_P Parameter: Tissue Value: Aerial
  misc_feature: MA Experiment 20000087 PARAMETER Experiment Name: At_100uM_ABA_Mutants_cDNA_P Parameter: Treatment Value: 100uM ABA vs. No Treatment
  misc_feature: MA Experiment ID: 20000089 Result: Down-regulated in Transcription
  misc_feature: MA Experiment ID: 20000307 Result: Up-regulated in Transcription
  misc_feature: MA Experiment 20000307 PARAMETER Experiment Name: At_Germinating_Seeds_Sub_P Parameter: Age (hr) Value: 24 vs. 0
  misc_feature: MA Experiment 20000307 PARAMETER Experiment Name: At_Germinating_Seeds_Sub_P Parameter: Organism Value: A. thaliana
  misc_feature: MA Experiment 20000307 PARAMETER Experiment Name: At_Germinating_Seeds_Sub_P Parameter: Plant Line Value: WS
  misc_feature: MA Experiment 20000307 PARAMETER Experiment Name: At_Germinating_Seeds_Sub_P Parameter: Tissue Value: Germinating Seeds
  misc_feature: MA Experiment ID: 20000314 Result: Down-regulated in Transcription
  misc_feature: MA Experiment 20000314 PARAMETER Experiment Name: At_14day_Shoots-Roots_Sub_P Parameter: Age (day) Value: 14
  misc_feature: MA Experiment 20000314 PARAMETER Experiment Name: At_14day_Shoots-Roots_Sub_P Parameter: Organism Value: A. thaliana
  misc_feature: MA Experiment 20000314 PARAMETER Experiment Name: At_14day_Shoots-Roots_Sub_P Parameter: Plant Line Value: WS
  misc_feature: MA Experiment 20000314 PARAMETER Experiment Name: At_14day_Shoots-Roots_Sub_P Parameter: Tissue Value: Roots vs. Whole Plant
  misc_feature: MA Experiment ID: 20000327 Result: Up-regulated in Transcription
  misc_feature: MA Experiment 20000327 PARAMETER Experiment Name: At_42deg_Heat_Sub_P Parameter: Age (day) Value: 14
  misc_feature: MA Experiment 20000327 PARAMETER Experiment Name: At_42deg_Heat_Sub_P Parameter: Organism Value: A. thaliana
  misc_feature: MA Experiment 20000327 PARAMETER Experiment Name: At_42deg_Heat_Sub_P Parameter: Plant Line Value: WS
  misc_feature: MA Experiment 20000327 PARAMETER Experiment Name: At_42deg_Heat_Sub_P Parameter: Temperature (deg C) Value: 42 vs. 22
  misc_feature: MA Experiment 20000327 PARAMETER Experiment Name: At_42deg_Heat_Sub_P Parameter: Timepoint (hr) Value: 1
  misc_feature: MA Experiment 20000327 PARAMETER Experiment Name: At_42deg_Heat_Sub_P Parameter: Tissue Value: Aerial
  misc_feature: MA Experiment ID: 20000328 Result: Up-regulated in Transcription
  misc_feature: MA Experiment 20000328 PARAMETER Experiment Name: At_42deg_Heat_Sub_P Parameter: Age (day) Value: 14
  misc_feature: MA Experiment 20000328 PARAMETER Experiment Name: At_42deg_Heat_Sub_P Parameter: Organism Value: A. thaliana
  misc_feature: MA Experiment 20000328 PARAMETER Experiment Name: At_42deg_Heat_Sub_P Parameter: Plant Line Value: WS
  misc_feature: MA Experiment 20000328 PARAMETER Experiment Name: At_42deg_Heat_Sub_P Parameter: Temperature (deg C) Value: 42 vs. 22
  misc_feature: MA Experiment 20000328 PARAMETER Experiment Name: At_42deg_Heat_Sub_P Parameter: Timepoint (hr) Value: 6
  misc_feature: MA Experiment 20000328 PARAMETER Experiment Name: At_42deg_Heat_Sub_P Parameter: Tissue Value: Aerial
  misc_feature: MA Experiment ID: 20000355 Result: Down-regulated in Transcription
  misc_feature: MA Experiment 20000355 PARAMETER Experiment Name: At_Siliques_Sub_P Parameter: Age (day) Value: 21
  misc_feature: MA Experiment 20000355 PARAMETER Experiment Name: At_Siliques_Sub_P Parameter: Organism Value: A. thaliana
  misc_feature: MA Experiment 20000355 PARAMETER Experiment Name: At_Siliques_Sub_P Parameter: Plant Line Value: WS
  misc_feature: MA Experiment 20000355 PARAMETER Experiment Name: At_Siliques_Sub_P Parameter: Tissue Value: Less Than 5mm Siliques vs. Whole Plant
  misc_feature: MA Experiment ID: 20000440 Result: Down-regulated in Transcription
  misc_feature: MA Experiment 20000440 PARAMETER Experiment Name: At_Closed-Flower__Sub_P Parameter: Tissue Value: Closed Flower vs. Whole Plant
acaaaccgcaaacgcgacagaactaactaacgacgccggagatggccgccacttcaaccgccgctgctgcttcttcaatcatgggtacccgggtggtttccgacattagctccaattcaagccggttcacagcccggttcggattcggaaccaagaaagcatctcccaaaaaggctaagacggttatctcagaccggcctctatggttcccaggcgcaaaatcacccgaatatctcgacggttcacttgtcggggactacgggttcgatccttttggtttaggcaaaccggcggagtatctccaattcgatttggattccttggaccagaacttagccaagaacttatacggagaagtgatcgggactcgtaccgaggcggtggaccccaaatcgacgccgtttcagccatatagtgaagtcttcgggctacaaagattcagagaatgtgagctgattcacggtcggtgggcaatgctcgccactcttggcgctatcaccgtcgaatggctcaccggtgttacttggcaagacgccggcaaggtagagctagtggatggatcatcttacttaggacagccattgccgttctctatctcgacattgatatggatcgaagtgttagtgatcggctacattgagttccaacgaaacgctgaactggactcggagaagcgtttgtatccaggaggcaagttctttgacccgttaggactagcgtctgacccggtgaagaaggctcagcttcagctagctgagatcaaacatgctcgtttagccatggttggattcttgggttttgcggttcaggcggctgcaaccggtaaaggaccgctcaacaactgggcgactcaccttagtgacccacttcacaccaccattatcgataccttctcttcctcctgatgtggtggcttttagcttctactggtgtcatgtaatgatgtggtggcttttagcttctactggtgtcatgtaatgatgtaacgtcgttattttaaagaaaatttggcaccttttgtat

SEQ ID NO: 77452 - protein, 287 aa, Arabidopsis thaliana; identical to SEQ ID NO: 34996
  peptide (1)..(287): Ceres Seq. ID no. 12576478
  misc_feature (60)..(258): Pfam Name: Chlorophyll A-B binding protein Pfam Description: Chlorophyll A-B binding protein
  misc_feature (1)..(287): Homolog of NCBI NO: 15231990 NR Description: putative chlorophyll a/b-binding protein; protein At3g08940.1, supported by cDNA: gi_17473744, supported by cDNA:
  misc_feature (1)..(287): Homolog of NCBI NO: 15241005 NR Description: light-harvesting chlorophyll a/b binding protein; id: At5g01530.1, supported by cDNA: gi_13877546, supported by gi_15081738, supported by cDNA: gi_15081814, supported by cDNA:
  misc_feature (1)..(287): Homolog of NCBI NO: 20260162 NR Description: chlorophyll a/b-binding protein CP29 [Arabidopsis
  misc_feature (1)..(287): Homolog of NCBI NO: 13877547 NR Description: chlorophyll a/b-binding protein CP29 [Arabidopsis
  misc_feature (1)..(287): Homolog of NCBI NO: 15081739 NR Description: AT5g01530/F7A7_50 [Arabidopsis thaliana]
  misc_feature (3)..(287): Homolog of NCBI NO: 4689382 NR Description: chlorophyll a/b binding protein CP29 [Vigna
  misc_feature (3)..(287): Homolog of NCBI NO: 445116 NR Description: light-harvesting complex IIa protein;
  misc_feature (3)..(287): Homolog of NCBI NO: 7443230 NR Description: probable chlorophyll a/b-binding protein - rice
  misc_feature (3)..(287): Homolog of NCBI NO: 7443231 NR Description: chlorophyll a/b-binding protein CP29 precursor -
  misc_feature (1)..(183): Homolog of NCBI NO: 30680697 NR Description: chlorophyll a/b-binding protein -related

SEQ ID NO: 77453 - protein, 274 aa, Arabidopsis thaliana; identical to SEQ ID NO: 34997
  peptide (1)..(274): Ceres Seq. ID no. 12576479
  misc_feature (47)..(245): Pfam Name: Chlorophyll A-B binding protein Pfam Description: Chlorophyll A-B binding protein
  misc_feature (1)..(274): Homolog of NCBI NO: 15231990 NR Description: putative chlorophyll a/b-binding protein; protein At3g08940.1, supported by cDNA: gi_17473744, supported by cDNA:
  misc_feature (1)..(274): Homolog of NCBI NO: 15241005 NR Description: light-harvesting chlorophyll a/b binding protein; id: At5g01530.1, supported by cDNA: gi_13877546, supported by gi_15081738, supported by cDNA: gi_15081814, supported by cDNA:
  misc_feature (1)..(274): Homolog of NCBI NO: 20260162 NR Description: chlorophyll a/b-binding protein CP29 [Arabidopsis
  misc_feature (1)..(274): Homolog of NCBI NO: 13877547 NR Description: chlorophyll a/b-binding protein CP29 [Arabidopsis
  misc_feature (1)..(274): Homolog of NCBI NO: 15081739 NR Description: AT5g01530/F7A7_50 [Arabidopsis thaliana]
  misc_feature (1)..(274): Homolog of NCBI NO: 4689382 NR Description: chlorophyll a/b binding protein CP29 [Vigna
  misc_feature (1)..(274): Homolog of NCBI NO: 445116 NR Description: light-harvesting complex IIa protein;
  misc_feature (1)..(274): Homolog of NCBI NO: 7443230 NR Description: probable chlorophyll a/b-binding protein - rice
  misc_feature (1)..(274): Homolog of NCBI NO: 7443231 NR Description: chlorophyll a/b-binding protein CP29 precursor -
  misc_feature (1)..(170): Homolog of NCBI NO: 30680697 NR Description: chlorophyll a/b-binding protein -related

SEQ ID NO: 77454 - protein, 143 aa, Arabidopsis thaliana; identical to SEQ ID NO: 34998
  peptide (1)..(143): Ceres Seq. ID no. 12576480
  misc_feature (1)..(114): Pfam Name: Chlorophyll A-B binding protein Pfam Description: Chlorophyll A-B binding protein
  misc_feature (1)..(143): Homolog of NCBI NO: 15231990 NR Description: putative chlorophyll a/b-binding protein; protein At3g08940.1, supported by cDNA: gi_17473744, supported by cDNA:
  misc_feature (1)..(143): Homolog of NCBI NO: 15241005 NR Description: light-harvesting chlorophyll a/b binding protein; id: At5g01530.1, supported by cDNA: gi_13877546, supported by gi_15081738, supported by cDNA: gi_15081814, supported by cDNA:
  misc_feature (1)..(143): Homolog of NCBI NO: 20260162 NR Description: chlorophyll a/b-binding protein CP29 [Arabidopsis
  misc_feature (1)..(143): Homolog of NCBI NO: 13877547 NR Description: chlorophyll a/b-binding protein CP29 [Arabidopsis
  misc_feature (1)..(143): Homolog of NCBI NO: 15081739 NR Description: AT5g01530/F7A7_50 [Arabidopsis thaliana]
  misc_feature (1)..(143): Homolog of NCBI NO: 4689382 NR Description: chlorophyll a/b binding protein CP29 [Vigna
  misc_feature (1)..(143): Homolog of NCBI NO: 445116 NR Description: light-harvesting complex IIa protein;
  misc_feature (1)..(143): Homolog of NCBI NO: 7443230 NR Description: probable chlorophyll a/b-binding protein - rice
  misc_feature (1)..(143): Homolog of NCBI NO: 7443231 NR Description: chlorophyll a/b-binding protein CP29 precursor -
  misc_feature (1)..(39): Homolog of NCBI NO: 30680697 NR Description: chlorophyll a/b-binding protein -related

SEQ ID NO: 77455 - DNA, 2217 bp, Arabidopsis thaliana
  misc_feature (1)..(2217): Ceres Seq. ID no. 12576507
  misc_feature: MA Experiment ID: 20000184 Result: Down-regulated in Transcription
  misc_feature: MA Experiment 20000184 PARAMETER Experiment Name: At_Shoots__P Parameter: Age (day) Value: 7
  misc_feature: MA Experiment 20000184 PARAMETER Experiment Name: At_Shoots__P Parameter: Tissue Value: Shoots vs. Whole Plant
  misc_feature: MA Experiment ID: 20000265 Result: Down-regulated in Transcription
  misc_feature: MA Experiment 20000265 PARAMETER Experiment Name: At_Open_Flower_P Parameter: Age (day) Value: 21
  misc_feature: MA Experiment 20000265 PARAMETER Experiment Name: At_Open_Flower_P Parameter: Plant Line Value: WS
  misc_feature: MA Experiment 20000265 PARAMETER Experiment Name: At_Open_Flower_P Parameter: Tissue Value: Closed Flower vs. Whole Plant
  misc_feature: MA Experiment ID: 20001247 Result: Up-regulated in Transcription
  misc_feature: MA Experiment 20001247 PARAMETER Experiment Name: At_Far-red-induction_P Parameter: Age (day) Value: 7
  misc_feature: MA Experiment 20001247 PARAMETER Experiment Name: At_Far-red-induction_P Parameter: Light Value: Far-red vs. White
  misc_feature: MA Experiment 20001247 PARAMETER Experiment Name: At_Far-red-induction_P Parameter: Organism Value: A. thaliana
  misc_feature: MA Experiment 20001247 PARAMETER Experiment Name: At_Far-red-induction_P Parameter: Plant Line Value: Columbia
  misc_feature: MA Experiment 20001247 PARAMETER Experiment Name: At_Far-red-induction_P Parameter: Timepoint (hr) Value: 1
  misc_feature: MA Experiment 20001247 PARAMETER Experiment Name: At_Far-red-induction_P Parameter: Tissue Value: Whole Plant
  misc_feature: MA Experiment ID: 20001557 Result: Up-regulated in Transcription
  misc_feature: MA Experiment 20001557 PARAMETER Experiment Name: At_Drought_Soil_Dry_P Parameter: Age (day) Value: 27
  misc_feature: MA Experiment 20001557 PARAMETER Experiment Name: At_Drought_Soil_Dry_P Parameter: Organism Value: A. thaliana
  misc_feature: MA Experiment 20001557 PARAMETER Experiment Name: At_Drought_Soil_Dry_P Parameter: Plant Line Value: WS
  misc_feature: MA Experiment 20001557 PARAMETER Experiment Name: At_Drought_Soil_Dry_P Parameter: Post Timepoint (hr) Value: 3
  misc_feature: MA Experiment 20001557 PARAMETER Experiment Name: At_Drought_Soil_Dry_P Parameter: Post-Treatment Value: Re-Water vs. No Drought
  misc_feature: MA Experiment 20001557 PARAMETER Experiment Name: At_Drought_Soil_Dry_P Parameter: Timepoint (day) Value: 13
  misc_feature: MA Experiment 20001557 PARAMETER Experiment Name: At_Drought_Soil_Dry_P Parameter: Treatment Value: Drought vs. No Drought
  misc_feature: MA Experiment ID: 20001558 Result: Up-regulated in Transcription
  misc_feature: MA Experiment 20001558 PARAMETER Experiment Name: At_Drought_Soil_Dry_P Parameter: Age (day) Value: 27
  misc_feature: MA Experiment 20001558 PARAMETER Experiment Name: At_Drought_Soil_Dry_P Parameter: Organism Value: A. thaliana
  misc_feature: MA Experiment 20001558 PARAMETER Experiment Name: At_Drought_Soil_Dry_P Parameter: Plant Line Value: WS
  misc_feature: MA Experiment 20001558 PARAMETER Experiment Name: At_Drought_Soil_Dry_P Parameter: Post Timepoint (hr) Value: 6
  misc_feature: MA Experiment 20001558 PARAMETER Experiment Name: At_Drought_Soil_Dry_P Parameter: Post-Treatment Value: Re-Water vs. No Drought
  misc_feature: MA Experiment 20001558 PARAMETER Experiment Name: At_Drought_Soil_Dry_P Parameter: Timepoint (day) Value: 13
  misc_feature: MA Experiment 20001558 PARAMETER Experiment Name: At_Drought_Soil_Dry_P Parameter: Treatment Value: Drought vs. No Drought
  misc_feature: MA Experiment ID: 20001560 Result: Up-regulated in Transcription
  misc_feature: MA Experiment 20001560 PARAMETER Experiment Name: At_Drought_Soil_Dry_P Parameter: Age (day) Value: 28
  misc_feature: MA Experiment 20001560 PARAMETER Experiment Name: At_Drought_Soil_Dry_P Parameter: Organism Value: A. thaliana
  misc_feature: MA Experiment 20001560 PARAMETER Experiment Name: At_Drought_Soil_Dry_P Parameter: Plant Line Value: WS
  misc_feature: MA Experiment 20001560 PARAMETER Experiment Name: At_Drought_Soil_Dry_P Parameter: Post Timepoint (hr) Value: None
  misc_feature: MA Experiment 20001560 PARAMETER Experiment Name: At_Drought_Soil_Dry_P Parameter: Post-Treatment Value: None
  misc_feature: MA Experiment 20001560 PARAMETER Experiment Name: At_Drought_Soil_Dry_P Parameter: Timepoint (day) Value: 14
  misc_feature: MA Experiment 20001560 PARAMETER Experiment Name: At_Drought_Soil_Dry_P Parameter: Treatment Value: Drought vs. No Drought
  misc_feature: MA Experiment ID: 20001906 Result: Down-regulated in Transcription
  misc_feature: MA Experiment 20001906 PARAMETER Experiment Name: At_Drought_Reproduction_P Parameter: Age (day) Value: 35
  misc_feature: MA Experiment 20001906 PARAMETER Experiment Name: At_Drought_Reproduction_P Parameter: Organism Value: A. thaliana
  misc_feature: MA Experiment 20001906 PARAMETER Experiment Name: At_Drought_Reproduction_P Parameter: Plant Line Value: WS
  misc_feature: MA Experiment 20001906 PARAMETER Experiment Name: At_Drought_Reproduction_P Parameter: Timepoint (day) Value: 5
  misc_feature: MA Experiment 20001906 PARAMETER Experiment Name: At_Drought_Reproduction_P Parameter: Tissue Value: Siliques
  misc_feature: MA Experiment 20001906 PARAMETER Experiment Name: At_Drought_Reproduction_P Parameter: Treatment Value: Drought vs. No Drought
atctcgtttcagtgactcctgcaaaccgtccactccatgtggattgcacaaaaagttctataaagaaaatatagcttttagactttggtcctagattcaactaatctctttttctatttcttctgtgttcttctctgaagcttccattgtgtaggacttatgctcttttctcctacttagggaaagtgcattaattcgtatctatctaggcacagagattgttgataacttatcgtactttaaatggaaaattctatgaacaacagaggacatggacacaatcaagaacatgcagacaacttgccagaatcaaagagacagaagcttcctgctttggcaagtgtcatagtggaagctgtcaaggtagatagtctgcagaggctatgctcgtctttggaaccattatttcgaagaattgtcagtgaagaggtggaacgtgccatatcaaggttggagaactcgaaatctacttcaagatctacagaaccgaataagattcaaggcctcgatggaagaaatctgcaacttcggttcagaacacgaatgcctcctcatttattcacaggtgggaaagtcgagggagagcaaggctcagccattcacgtggttcttatagatgcaaacaccggaaatgtaatccaaacaggagaagaatcaatgacaaagctgaatattgtcgtgttagatggagacttcaatgatgaagacgacaaagattggacgagagaacattttgagagctttgaagtgaaggaacgcgaaggaaaacgtcccatcttgactggtgacagacatgtgataattaaagaaggtgtaggaactcttggaaaacttactttcactgacaattcgagctggattaggagcagaaagtttagacttggtgttaagcctgcaacgggatttcacatccgtgaagctaaaacagaaccatttgctgttaaagatcacagaggagaacatgagtatcttaaaactttggactgacttgataagcagagagagatagagtttcttggattgtctaccttaatcttggattattttttggcggtgttttttgcagtatacaagaaacattatccaccggttttacatgatgaagtctggagattggataaaatagcgaaagatggagcgctacacaagaagctactaaaatctaacattgtgactgttgaagacttcctacagatactcatgaaggatccgcagaaactaagaagcttacttgggagtggaatgtcaaatagaatgtgggataacacggtagagcacgcaaagacttgtgtcttaggtgggaaactttacgcctattacacagatcaaacacaccagacagctgttgtctttaatcatatatatgaatttcaaggcctaattgccaatggccacttcttgtcttcggaatctcttaaccatgaccaaaagatttctgcagacactttggtgaagactgcttacgagaactggcataaagtggttgagtatggcggtaagctcttgaattgcttaccagttgctaagaagggaataaaaagcttgccagagccaaaaatggctcagaaccatcaaacgcagcagaaggctctgcaatgccaacagactgtgaatggctactcatcagatcctcagcatctgatagagtatccttttgtccaacaaccttgctatcagttacgagactacacatcgatggagagttcttcagtttcaggctcatataatggaggccttgaagatattttcacggaggaaattcgagcgaggagttctgagatgctcgagacggataacatgcagagattgctcaagacatttgggatatcaggcgggtttggtaacagggatgagtccatttacggtttcagtgatcagtacgaagctcagatagacaagggttatatgagagaaggaggtagaggcgcagggaaagctgtagtgggatggcttaagctcaaagctgcattgagatggggtatctttatacgcaagaaagctgcagagaggaggcctcaaattgtggagatcgactaagaaagtactacaaaaaaattccgagagcttttcttttgtataaataaacttgaagcaattacttttttaaagaggatcaaccagtatatccttccatatctaagcattggagaaaaaggttaaacgactggttatcagtcagacaaagagtcttaataccgaaagtctcagtattcgtcc

SEQ ID NO: 77456 - protein, 278 aa, Arabidopsis thaliana
  peptide (1)..(278): Ceres Seq. ID no. 12576508
  misc_feature (1)..(278): Homolog of NCBI NO: 22329041 NR Description: calmodulin-binding protein; protein id:
  misc_feature (1)..(278): Homolog of NCBI NO: 25354643 NR Description: probable calmodulin-binding protein [imported] -
  misc_feature (1)..(160): Homolog of NCBI NO: 15224117 NR Description: calmodulin-binding protein; protein id:
  misc_feature (178)..(278): Homolog of NCBI NO: 15224117 NR Description: calmodulin-binding protein; protein id:
  misc_feature (1)..(278): Homolog of NCBI NO: 17065560 NR Description: putative calmodulin-binding protein [Arabidopsis
  misc_feature (1)..(103): Homolog of NCBI NO: 30687005 NR Description: calmodulin-binding protein [Arabidopsis thaliana]
  misc_feature (181)..(277): Homolog of NCBI NO: 30687005 NR Description: calmodulin-binding protein [Arabidopsis thaliana]
  misc_feature (1)..(144): Homolog of NCBI NO: 25354646 NR Description: probable calmodulin-binding protein [imported] -
  misc_feature (172)..(278): Homolog of NCBI NO: 25354646 NR Description: probable calmodulin-binding protein [imported] -
  misc_feature (1)..(148): Homolog of NCBI NO: 7489107 NR Description: calmodulin-binding protein TCB60 - common tobacco
MKDPQKLRSLLGSGMSNRMWDNTVEHAKTCVLGGKLYAYYTDQTHQTAVVFNHIYEFQGLIANGHFLSSESLNHDQKISADTLVKTAYENWHKVVEYGGKLLNCLPVAKKGIKSLPEPKMAQNHQTQQKALQCQQTVNGYSSDPQHLIEYPFVQQPCYQLRDYTSMESSSVSGSYNGGLEDIFTEEIRARSSEMLETDNMQRLLKTFGISGGFGNRDESIYGFSDQYEAQIDKGYMREGGRGAGKAVVGWLKLKAALRWGIFIRKKAAERRPQIVEID

SEQ ID NO: 77457 - protein, 264 aa, Arabidopsis thaliana
  peptide (1)..(264): Ceres Seq. ID no. 12576509
  misc_feature (1)..(264): Homolog of NCBI NO: 22329041 NR Description: calmodulin-binding protein; protein id:
  misc_feature (1)..(264): Homolog of NCBI NO: 25354643 NR Description: probable calmodulin-binding protein [imported] -
  misc_feature (1)..(146): Homolog of NCBI NO: 15224117 NR Description: calmodulin-binding protein; protein id:
  misc_feature (164)..(264): Homolog of NCBI NO: 15224117 NR Description: calmodulin-binding protein; protein id:
  misc_feature (1)..(264): Homolog of NCBI NO: 17065560 NR Description: putative calmodulin-binding protein [Arabidopsis
  misc_feature (1)..(89): Homolog of NCBI NO: 30687005 NR Description: calmodulin-binding protein [Arabidopsis thaliana]
  misc_feature (167)..(263): Homolog of NCBI NO: 30687005 NR Description: calmodulin-binding protein [Arabidopsis thaliana]
  misc_feature (1)..(130): Homolog of NCBI NO: 25354646 NR Description: probable calmodulin-binding protein [imported] -
  misc_feature (158)..(264): Homolog of NCBI NO: 25354646 NR Description: probable calmodulin-binding protein [imported] -
  misc_feature (1)..(134): Homolog of NCBI NO: 7489107 NR Description: calmodulin-binding protein TCB60 - common tobacco
MSNRMWDNTVEHAKTCVLGGKLYAYYTDQTHQTAVVFNHIYEFQGLIANGHFLSSESLNHDQKISADTLVKTAYENWHKVVEYGGKLLNCLPVAKKGIKSLPEPKMAQNHQTQQKALQCQQTVNGYSSDPQHLIEYPFVQQPCYQLRDYTSMESSSVSGSYNGGLEDIFTEEIRARSSEMLETDNMQRLLKTFGISGGFGNRDESIYGFSDQYEAQIDKGYMREGGRGAGKAVVGWLKLKAALRWGIFIRKKAAERRPQIVEID

SEQ ID NO: 77458 - protein, 260 aa, Arabidopsis thaliana
  peptide (1)..(260): Ceres Seq. ID no. 12576510
  misc_feature (1)..(260): Homolog of NCBI NO: 22329041 NR Description: calmodulin-binding protein; protein id:
  misc_feature (1)..(260): Homolog of NCBI NO: 25354643 NR Description: probable calmodulin-binding protein [imported] -
  misc_feature (1)..(142): Homolog of NCBI NO: 15224117 NR Description: calmodulin-binding protein; protein id:
  misc_feature (160)..(260): Homolog of NCBI NO: 15224117 NR Description: calmodulin-binding protein; protein id:
  misc_feature (1)..(260): Homolog of NCBI NO: 17065560 NR Description: putative calmodulin-binding protein [Arabidopsis
  misc_feature (1)..(85): Homolog of NCBI NO: 30687005 NR Description: calmodulin-binding protein [Arabidopsis thaliana]
  misc_feature (163)..(259): Homolog of NCBI NO: 30687005 NR Description: calmodulin-binding protein [Arabidopsis thaliana]
  misc_feature (1)..(126): Homolog of NCBI NO: 25354646 NR Description: probable calmodulin-binding protein [imported] -
  misc_feature (154)..(260): Homolog of NCBI NO: 25354646 NR Description: probable calmodulin-binding protein [imported] -
  misc_feature (1)..(130): Homolog of NCBI NO: 7489107 NR Description: calmodulin-binding protein TCB60 - common tobacco
MWDNTVEHAKTCVLGGKLYAYYTDQTHQTAVVFNHIYEFQGLIANGHFLSSESLNHDQKISADTLVKTAYENWHKVVEYGGKLLNCLPVAKKGIKSLPEPKMAQNHQTQQKALQCQQTVNGYSSDPQHLIEYPFVQQPCYQLRDYTSMESSSVSGSYNGGLEDIFTEEIRARSSEMLETDNMQRLLKTFGISGGFGNRDESIYGFSDQYEAQIDKGYMREGGRGAGKAVVGWLKLKAALRWGIFIRKKAAERRPQIVEID

SEQ ID NO: 77459 - DNA, 1390 bp, Arabidopsis thaliana
  misc_feature (1)..(1390): Ceres Seq. ID no. 12576511
  misc_feature: MA Experiment ID: 108434 Result: Up-regulated in Transcription
  misc_feature: MA Experiment 108434 PARAMETER Experiment Name: At_Root_Tips_cDNA_P Parameter: Tissue Value: Root Tips
  misc_feature: MA Experiment ID: 108435 Result: Up-regulated in Transcription
  misc_feature: MA Experiment 108435 PARAMETER Experiment Name: At_stm_Mutants_cDNA_P Parameter: Plant Line Value: wt Landsburg vs stm
  misc_feature: MA Experiment 108435 PARAMETER Experiment Name: At_stm_Mutants_cDNA_P Parameter: Tissue Value: Shoot Apical Meristem Region
  misc_feature: MA Experiment ID: 108461 Result: Down-regulated in Transcription
  misc_feature: MA Experiment 108461 PARAMETER Experiment Name: At_Germinating_Seeds_cDNA_P Parameter: Age (day) Value: 1 vs. 0
  misc_feature: MA Experiment 108461 PARAMETER Experiment Name: At_Germinating_Seeds_cDNA_P Parameter: Tissue Value: Germinating Seeds
  misc_feature: MA Experiment ID: 108462 Result: Down-regulated in Transcription
  misc_feature: MA Experiment 108462 PARAMETER Experiment Name: At_Germinating_Seeds_cDNA_P Parameter: Age (day) Value: 2 vs. 0
  misc_feature: MA Experiment 108462 PARAMETER Experiment Name: At_Germinating_Seeds_cDNA_P Parameter: Tissue Value: Germinating Seeds
  misc_feature: MA Experiment ID: 108463 Result: Down-regulated in Transcription
  misc_feature: MA Experiment 108463 PARAMETER Experiment Name: At_Germinating_Seeds_cDNA_P Parameter: Age (day) Value: 3 vs. 0
  misc_feature: MA Experiment 108463 PARAMETER Experiment Name: At_Germinating_Seeds_cDNA_P Parameter: Tissue Value: Germinating Seeds
  misc_feature: MA Experiment ID: 108464 Result: Down-regulated in Transcription
  misc_feature: MA Experiment 108464 PARAMETER Experiment Name: At_Germinating_Seeds_cDNA_P Parameter: Age (day) Value: 4 vs. 0
  misc_feature: MA Experiment 108464 PARAMETER Experiment Name: At_Germinating_Seeds_cDNA_P Parameter: Tissue Value: Germinating Seeds
  misc_feature: MA Experiment ID: 20000093 Result: Up-regulated in Transcription
  misc_feature: MA Experiment 20000093 PARAMETER Experiment Name: At_42deg_Heat_cDNA_P Parameter: Temperature (deg C) Value: 42 vs. 22
  misc_feature: MA Experiment 20000093 PARAMETER Experiment Name: At_42deg_Heat_cDNA_P Parameter: Timepoint (hr) Value: 0.5
  misc_feature: MA Experiment 20000093 PARAMETER Experiment Name: At_42deg_Heat_cDNA_P Parameter: Tissue Value: Aerial
  misc_feature: MA Experiment ID: 20000111 Result: Up-regulated in Transcription
  misc_feature: MA Experiment 20000111 PARAMETER Experiment Name: At_42deg_Heat_cDNA_P Parameter: Temperature (deg C) Value: 42 vs. 22
  misc_feature: MA Experiment 20000111 PARAMETER Experiment Name: At_42deg_Heat_cDNA_P Parameter: Timepoint (hr) Value: 6
  misc_feature: MA Experiment 20000111 PARAMETER Experiment Name: At_42deg_Heat_cDNA_P Parameter: Tissue Value: Aerial
  misc_feature: MA Experiment ID: 20000112 Result: Up-regulated in Transcription
  misc_feature: MA Experiment 20000112 PARAMETER Experiment Name: At_42deg_Heat_cDNA_P Parameter: Temperature (deg C) Value: 42 vs. 22
  misc_feature: MA Experiment 20000112 PARAMETER Experiment Name: At_42deg_Heat_cDNA_P Parameter: Timepoint (hr) Value: 2
  misc_feature: MA Experiment 20000112 PARAMETER Experiment Name: At_42deg_Heat_cDNA_P Parameter: Tissue Value: Aerial
  misc_feature: MA Experiment ID: 20000113 Result: Up-regulated in Transcription
  misc_feature: MA Experiment 20000113 PARAMETER Experiment Name: At_42deg_Heat_cDNA_P Parameter: Temperature (deg C) Value: 42 vs. 22
  misc_feature: MA Experiment 20000113 PARAMETER Experiment Name: At_42deg_Heat_cDNA_P Parameter: Timepoint (hr) Value: 8
  misc_feature: MA Experiment 20000113 PARAMETER Experiment Name: At_42deg_Heat_cDNA_P Parameter: Tissue Value: Aerial
  misc_feature: MA Experiment ID: 20000144 Result: Up-regulated in Transcription
  misc_feature: MA Experiment 20000144 PARAMETER Experiment Name: At_42deg_Heat_cDNA_P Parameter: Temperature (deg C) Value: 42 vs. 22
  misc_feature: MA Experiment 20000144 PARAMETER Experiment Name: At_42deg_Heat_cDNA_P Parameter: Timepoint (hr) Value: 1
  misc_feature: MA Experiment 20000144 PARAMETER Experiment Name: At_42deg_Heat_cDNA_P Parameter: Tissue Value: Aerial
  misc_feature: MA Experiment ID: 20000179 Result: Down-regulated in Transcription
  misc_feature: MA Experiment 20000179 PARAMETER Experiment Name: At_Germinating_Seeds_P Parameter: Age (hr) Value: 6 vs. 0
  misc_feature: MA Experiment 20000179 PARAMETER Experiment Name: At_Germinating_Seeds_P Parameter: Tissue Value: Germinating Seeds
  misc_feature: MA Experiment ID: 20000180 Result: Down-regulated in Transcription
  misc_feature: MA Experiment 20000180 PARAMETER Experiment Name: At_Germinating_Seeds_P Parameter: Age (hr) Value: 24 vs. 0
  misc_feature: MA Experiment 20000180 PARAMETER Experiment Name: At_Germinating_Seeds_P Parameter: Tissue Value: Germinating Seeds
aacctaatttcacttcgtctctctctcgcgctcccaatttctccgccggcgggaaaaccatgtcgcacttcggaaggtcaggtccaccggatatcagcgacacctactcacttctcgtccttaacatcaccttccgtacgactgctgatgatctctatcctctattcgcaaagtatggaaaggtcgttgatgtgtttattcccagagatcgaaggactggtgattcgcgtggttttgcgtttgttcggtataagtataaagacgaagctcacaaagcagtggaaaggcttgatggaagagttgttgatggcagagaaataactgttcagtttgcgaaatatgggccaaatgctgaaaaaatttccaaaggaagagttgtggaaccaccgccgaagtcacgaagatctagaagccgtagtcctaggcggagtcgtagtcctaggaggagccgtagcccgcctagacgtcgtagtcccagaagaagccgcagtcctcgtaggaggtcccgagatgactatagggaaaaagactaccggaagcggagcaggagcagaagctatgacaggcgtgaaaggcatgaggagaaggatagagatcatcgtcgtcgcactaggtctcgtagtgccagcccagatgaaaaacgcagagtcagaggccgttatgataatgagagccgcagtcacagtcgttccttgagtgcatctcctgctcgccgcagccctagaagttcctccccacagaaaacctctcctgctagagaagtttctcctgataagcgtagcaatgagaggtctccatctcctcgtcgcagcctcagcccaagaagccctgctttgcaaaaggcctctccttctaaggagatgtctcctgaaaggcgtagcaatgagaggtccccatctcctggtagccctgctcctctgcgcaaagttgatgctgcttctcgaagtcaatctccttatgctgcggaatgactgcagccacttgtgaaagtgatacggtgtatgatgaaaaacacgtttgcttgtactgatgatgtttcatcattaagcactggaacgtctaccctctgtagtattacttgctttcctctggttcgagaaaagaattgactgggaagatggcacaaccatgttgagattgtagctgttgatggctgtttatgaaactgtagatgatcgatgctgtttatgaaaccgtagatgatcgatgctggtcacagctatctgctttaactagtatcatccttgtgtcgctaatgcttagaagggctggttcgttgagttttcaatcttaagttgagaaatcaaagttcagttgagtttcacttatctcttgtctatcttctgtttaagattcttatcaaaagtacctaatgcaaagataaattacc

SEQ ID NO: 77460 - protein, 322 aa, Arabidopsis thaliana
  peptide (1)..(322): Ceres Seq. ID no. 12576512
  misc_feature (37)..(108): Pfam Name: RNA recognition motif. (a.k.a. RRM, RBD, or RNP domain) Pfam Description: RNA recognition motif. (a.k.a. RRM, RBD, or RNP
  misc_feature (20)..(322): Homolog of NCBI NO: 15237641 NR Description: arginine/serine-rich splicing factor SC35; id: At5g64200.1, supported by cDNA: gi_17380867 [Arabidopsis >gi|17380868|gb|AAL36246.1| unknown protein [Arabidopsis
  misc_feature (20)..(322): Homolog of NCBI NO: 9843653 NR Description: splicing factor SC35 [Arabidopsis thaliana]
  misc_feature (20)..(299): Homolog of NCBI NO: 33146621 NR Description: putative splicing factor, arginine/serine-rich 2
  misc_feature (20)..(307): Homolog of NCBI NO: 7446336 NR Description: probable arginine/serine-rich splicing factor -
  misc_feature (23)..(235): Homolog of NCBI NO: 28279759 NR Description: Similar to splicing factor, arginine/serine-rich
  misc_feature (23)..(253): Homolog of NCBI NO: 266991 NR Description: Splicing factor, arginine/serine-rich 2 (Splicing
  misc_feature (23)..(253): Homolog of NCBI NO: 6755478 NR Description: splicing factor, arginine/serine-rich 2; DNA Chr 11, Wayne State University 175, expressed; splicing factor [Mus musculus] >gi|27691222|ref|XP_213556.1| similar to
  misc_feature (23)..(253): Homolog of NCBI NO: 4506899 NR Description: splicing factor, arginine/serine-rich 2 [Homo
  misc_feature (24)..(298): Homolog of NCBI NO: 15055543 NR Description: 46kD arginine/serine-rich splicing factor [Homo
  misc_feature (23)..(240): Homolog of NCBI NO: 39794351 NR Description: Unknown (protein for MGC:75633) [Silurana
PNFTSSLSRAPNFSAGGKTMSHFGRSGPPDISDTYSLLVLNITFRTTADDLYPLFAKYGKVVDVFIPRDRRTGDSRGFAFVRYKYKDEAHKAVERLDGRVVDGREITVQFAKYGPNAEKISKGRVVEPPPKSRRSRSRSPRRSRSPRRSRSPPRRRSPRRSRSPRRRSRDDYREKDYRKRSRSRSYDRRERHEEKDRDHRRRTRSRSASPDEKRRVRGRYDNESRSHSRSLSASPARRSPRSSSPQKTSPAREVSPDKRSNERSPSPRRSLSPRSPALQKASPSKEMSPERRSNERSPSPGSPAPLRKVDAASRSQSPYAAE

SEQ ID NO: 77461 - protein, 303 aa, Arabidopsis thaliana; identical to SEQ ID NO: 35347
  peptide (1)..(303): Ceres Seq. ID no. 12576513
  misc_feature (18)..(89): Pfam Name: RNA recognition motif. (a.k.a. RRM, RBD, or RNP domain) Pfam Description: RNA recognition motif. (a.k.a. RRM, RBD, or RNP
  misc_feature (1)..(303): Homolog of NCBI NO: 15237641 NR Description: arginine/serine-rich splicing factor SC35; id: At5g64200.1, supported by cDNA: gi_17380867 [Arabidopsis >gi|17380868|gb|AAL36246.1| unknown protein [Arabidopsis
  misc_feature (1)..(303): Homolog of NCBI NO: 9843653 NR Description: splicing factor SC35 [Arabidopsis thaliana]
  misc_feature (1)..(280): Homolog of NCBI NO: 33146621 NR Description: putative splicing factor, arginine/serine-rich 2
  misc_feature (1)..(288): Homolog of NCBI NO: 7446336 NR Description: probable arginine/serine-rich splicing factor -
  misc_feature (4)..(216): Homolog of NCBI NO: 28279759 NR Description: Similar to splicing factor, arginine/serine-rich
  misc_feature (4)..(234): Homolog of NCBI NO: 266991 NR Description: Splicing factor, arginine/serine-rich 2 (Splicing
  misc_feature (4)..(234): Homolog of NCBI NO: 6755478 NR Description: splicing factor, arginine/serine-rich 2; DNA Chr 11, Wayne State University 175, expressed; splicing factor [Mus musculus] >gi|27691222|ref|XP_213556.1| similar to
  misc_feature (4)..(234): Homolog of NCBI NO: 4506899 NR Description: splicing factor, arginine/serine-rich 2 [Homo
  misc_feature (5)..(279): Homolog of NCBI NO: 15055543 NR Description: 46kD arginine/serine-rich splicing factor [Homo
  misc_feature (4)..(221): Homolog of NCBI NO: 39794351 NR Description: Unknown (protein for MGC:75633) [Silurana

SEQ ID NO: 77462 - DNA, 1705 bp, Arabidopsis thaliana
  misc_feature (1)..(1705): Ceres Seq. ID no. 12576546
  misc_feature: MA Experiment ID: 20000794 Result: Up-regulated in Transcription
  misc_feature: MA Experiment 20000794 PARAMETER Experiment Name: At_Petals_P Parameter: Age (day) Value: 23-25 days
  misc_feature: MA Experiment 20000794 PARAMETER Experiment Name: At_Petals_P Parameter: Plant Line Value: WS
  misc_feature: MA Experiment 20000794 PARAMETER Experiment Name: At_Petals_P Parameter: Tissue Value: Petals vs. Whole plant
atacacacaattcaatatttgacttcacatagagagagatagagagatggcgacggaaacggaagttgtagctccggtaacggtaagcaacggcggaagcaaaggatgttgcaagtacggtggtcctggttacgcgactcctctcgccgctatgtctggtccatcggagaaacttatctacgtaaccgccgtctacaccggaactggaatagataaaccggattatttggcgacggtggatgtagatccaagctcgccttcgtattcaagtgttattcatagattaccaatgccttttgttggtgatgagcttcatcattctggttggaactcttgtagttcttgccatggtgatgcttctgttgatagacgttatctcgtgttaccgtctcttatatctggtcgcatttatgcgattgatactaaggaaaacccgagggctccgtctttgtataagtatgttgatcctaaagagattgctgataagactggattggcgtttcctcacacggctcattgcctcgccacgggcgagatcttggtgtcctgtcttggagatgaagaggggaatgctaaggggaatgggtttcttcttcttgactctgattttaacatcaagaataggtgggagaaaccaggacatagtcctttgtatgggtatgatttttggtaccaacctcggcacaagaccatgatcagcacatcttggggagcacctaaagccttctctaaaggtttcaatcttcagcacgttgctgatggcttgtatggaagtcatctacatgtttatagttggccaggaggtgaaataaaacaattaattgaccttggaccgactggtctcttacctttggagattagattcttgcatgatccatctaaagatacagggtttgttgggagtgccttgtcgagtaatatgataagatttttcaagaacagtgatgaaacatggagccatgaggttgttatatcggttaaaccgttgaaagtcgaaaactggatacttccagaaatgccggggctaatcaccgacttcttgatctccctcgatgaccgatttatttactttgtgaactggctccatggagacattcgtcagtacaacatagaggaccctaaaaaccctgtattaacagggcaaatttgggttggaggattactacaaaagggcagtcctgttaaggcggttggagaagacggaaacactttccaattcgaggttcctcagatcaaggggaaatctttacgaggtggacctcaaatgattcagctgagcctcgatgggaaacgattgtatgcaacaaactcgctgtttagcgcatgggatcgtcagttttatcctgaaatcatggagaaaggctcacacataattcagattgatgttgatacagaaaaaggtggtctcaccataaaccctgatttctttgtggactttggtgatgaaccagacggtccttcactagcccacgagatgagatatccaggtggagactgcacttccgatatctggatttgaatttggctttgtttagagtgtgttttgtgttaagtttaaattgagttttattatttgttgtgtgtttagtagagttgaataaaaaagggagtaagatgactcagacaattaacacttgtttgtacattttgactcctatgtgtcttaagtaataaaactttctacaattcgacttaacacttggtt

SEQ ID NO: 77463 - protein, 490 aa, Arabidopsis thaliana
  peptide (1)..(490): Ceres Seq. ID no. 12576547
  misc_feature (22)..(490): Pfam Name: 56kDa selenium binding protein (SBP56) Pfam Description: 56kDa selenium binding protein (SBP56)
  misc_feature (1)..(490): Homolog of NCBI NO: 15236385 NR Description: selenium-binding protein like; protein id:
  misc_feature (25)..(490): Homolog of NCBI NO: 15485232 NR Description: selenium binding protein [Arabidopsis thaliana]
  misc_feature (1)..(490): Homolog of NCBI NO: 15236386 NR Description: selenium-binding protein like; protein id: supported by cDNA: gi_13605824, supported by cDNA: gi_13877734, by cDNA: gi_17473633, supported by cDNA: gi_17473651 [Arabidopsis
  misc_feature (5)..(490): Homolog of NCBI NO: 13605825 NR Description: AT4g14040/dl3061c [Arabidopsis thaliana]
  misc_feature (1)..(490): Homolog of NCBI NO: 22530900 NR Description: selenium-binding protein-like protein
  misc_feature (1)..(490): Homolog of NCBI NO: 25348077 NR Description: selenium-binding protein like [imported] -
  misc_feature (9)..(490): Homolog of NCBI NO: 15485720 NR Description: selenium binding protein [Medicago sativa]
  misc_feature (82)..(490): Homolog of NCBI NO: 20340239 NR Description: putative selenium-binding protein [Thellungiella
  misc_feature (20)..(490): Homolog of NCBI NO: 15485716 NR Description: selenium binding protein [Lotus japonicus]
  misc_feature (15)..(490): Homolog of NCBI NO: 15229520 NR Description: selenium binding protein, putative; protein id:
MATETEVVAPVTVSNGGSKGCCKYGGPGYATPLAAMSGPSEKLIYVTAVYTGTGIDKPDYLATVDVDPSSPSYSSVIHRLPMPFVGDELHHSGWNSCSSCHGDASVDRRYLVLPSLISGRIYAIDTKENPRAPSLYKYVDPKEIADKTGLAFPHTAHCLATGEILVSCLGDEEGNAKGNGFLLLDSDFNIKNRWEKPGHSPLYGYDFWYQPRHKTMISTSWGAPKAFSKGFNLQHVADGLYGSHLHVYSWPGGEIKQLIDLGPTGLLPLEIRFLHDPSKDTGFVGSALSSNMIRFFKNSDETWSHEVVISVKPLKVENWILPEMPGLITDFLISLDDRFIYFVNWLHGDIRQYNIEDPKNPVLTGQIWVGGLLQKGSPVKAVGEDGNTFQFEVPQIKGKSLRGGPQMIQLSLDGKRLYATNSLFSAWDRQFYPEIMEKGSHIIQIDVDTEKGGLTINPDFFVDFGDEPDGPSLAHEMRYPGGDCTSDIWI

SEQ ID NO: 77464 - protein, 455 aa, Arabidopsis thaliana
  peptide (1)..(455): Ceres Seq. ID no. 12576548
  misc_feature (1)..(455): Pfam Name: 56kDa selenium binding protein (SBP56) Pfam Description: 56kDa selenium binding protein (SBP56)
  misc_feature (1)..(455): Homolog of NCBI NO: 15236385 NR Description: selenium-binding protein like; protein id:
  misc_feature (1)..(455): Homolog of NCBI NO: 15485232 NR Description: selenium binding protein [Arabidopsis thaliana]
  misc_feature (1)..(455): Homolog of NCBI NO: 15236386 NR Description: selenium-binding protein like; protein id: supported by cDNA: gi_13605824, supported by cDNA: gi_13877734, by cDNA: gi_17473633, supported by cDNA: gi_17473651 [Arabidopsis
  misc_feature (1)..(455): Homolog of NCBI NO: 13605825 NR Description: AT4g14040/dl3061c [Arabidopsis thaliana]
  misc_feature (1)..(455): Homolog of NCBI NO: 22530900 NR Description: selenium-binding protein-like protein
  misc_feature (1)..(455): Homolog of NCBI NO: 25348077 NR Description: selenium-binding protein like [imported] -
  misc_feature (1)..(455): Homolog of NCBI NO: 15485720 NR Description: selenium binding protein [Medicago sativa]
  misc_feature (47)..(455): Homolog of NCBI NO: 20340239 NR Description: putative selenium-binding protein [Thellungiella
  misc_feature (1)..(455): Homolog of NCBI NO: 15485716 NR Description: selenium binding protein [Lotus japonicus]
  misc_feature (1)..(455): Homolog of NCBI NO: 15229520 NR Description: selenium binding protein, putative; protein id:
MSGPSEKLIYVTAVYTGTGIDKPDYLATVDVDPSSPSYSSVIHRLPMPFVGDELHHSGWNSCSSCHGDASVDRRYLVLPSLISGRIYAIDTKENPRAPSLYKYVDPKEIADKTGLAFPHTAHCLATGEILVSCLGDEEGNAKGNGFLLLDSDFNIKNRWEKPGHSPLYGYDFWYQPRHKTMISTSWGAPKAFSKGFNLQHVADGLYGSHLHVYSWPGGEIKQLIDLGPTGLLPLEIRFLHDPSKDTGFVGSALSSNMIRFFKNSDETWSHEVVISVKPLKVENWILPEMPGLITDFLISLDDRFIYFVNWLHGDIRQYNIEDPKNPVLTGQIWVGGLLQKGSPVKAVGEDGNTFQFEVPQIKGKSLRGGPQMIQLSLDGKRLYATNSLFSAWDRQFYPEIMEKGSHIIQIDVDTEKGGLTINPDFFVDFGDEPDGPSLAHEMRYPGGDCTSDIWI

SEQ ID NO: 77465 - protein, 409 aa, Arabidopsis thaliana
  peptide (1)..(409): Ceres Seq. ID no. 12576549
  misc_feature (1)..(409): Pfam Name: 56kDa selenium binding protein (SBP56) Pfam Description: 56kDa selenium binding protein (SBP56)
  misc_feature (1)..(409): Homolog of NCBI NO: 15236385 NR Description: selenium-binding protein like; protein id:
  misc_feature (1)..(409): Homolog of NCBI NO: 15485232 NR Description: selenium binding protein [Arabidopsis thaliana]
  misc_feature (1)..(409): Homolog of NCBI NO: 15236386 NR Description: selenium-binding protein like; protein id: supported by cDNA: gi_13605824, supported by cDNA: gi_13877734, by cDNA: gi_17473633, supported by cDNA: gi_17473651 [Arabidopsis
  misc_feature (1)..(409): Homolog of NCBI NO: 13605825 NR Description: AT4g14040/dl3061c [Arabidopsis thaliana]
  misc_feature (1)..(409): Homolog of NCBI NO: 22530900 NR Description: selenium-binding protein-like protein
  misc_feature (1)..(409): Homolog of NCBI NO: 25348077 NR Description: selenium-binding protein like [imported] -
  misc_feature (1)..(409): Homolog of NCBI NO: 15485720 NR Description: selenium binding protein [Medicago sativa]
  misc_feature (1)..(409): Homolog of NCBI NO: 20340239 NR Description: putative selenium-binding protein [Thellungiella
  misc_feature (1)..(409): Homolog of NCBI NO: 15485716 NR Description: selenium binding protein [Lotus japonicus]
  misc_feature (1)..(409): Homolog of NCBI NO: 15229520 NR Description: selenium binding protein, putative; protein id:
MPFVGDELHHSGWNSCSSCHGDASVDRRYLVLPSLISGRIYAIDTKENPRAPSLYKYVDPKEIADKTGLAFPHTAHCLATGEILVSCLGDEEGNAKGNGFLLLDSDFNIKNRWEKPGHSPLYGYDFWYQPRHKTMISTSWGAPKAFSKGFNLQHVADGLYGSHLHVYSWPGGEIKQLIDLGPTGLLPLEIRFLHDPSKDTGFVGSALSSNMIRFFKNSDETWSHEVVISVKPLKVENWILPEMPGLITDFLISLDDRFIYFVNWLHGDIRQYNIEDPKNPVLTGQIWVGGLLQKGSPVKAVGEDGNTFQFEVPQIKGKSLRGGPQMIQLSLDGKRLYATNSLFSAWDRQFYPEIMEKGSHIIQIDVDTEKGGLTINPDFFVDFGDEPDGPSLAHEMRYPGGDCTSDIWI

SEQ ID NO: 77466 - DNA, 1465 bp, Arabidopsis thaliana
  misc_feature (1)..(1465): Ceres Seq. ID no. 12576558
  misc_feature: MA Experiment ID: 108434 Result: Up-regulated in Transcription
  misc_feature: MA Experiment 108434 PARAMETER Experiment Name: At_Root_Tips_cDNA_P Parameter: Tissue Value: Root Tips
  misc_feature: MA Experiment ID: 108461 Result: Down-regulated in Transcription
  misc_feature: MA Experiment 108461 PARAMETER Experiment Name: At_Germinating_Seeds_cDNA_P Parameter: Age (day) Value: 1 vs. 0
  misc_feature: MA Experiment 108461 PARAMETER Experiment Name: At_Germinating_Seeds_cDNA_P Parameter: Tissue Value: Germinating Seeds
  misc_feature: MA Experiment ID: 108462 Result: Down-regulated in Transcription
  misc_feature: MA Experiment 108462 PARAMETER Experiment Name: At_Germinating_Seeds_cDNA_P Parameter: Age (day) Value: 2 vs. 0
  misc_feature: MA Experiment 108462 PARAMETER Experiment Name: At_Germinating_Seeds_cDNA_P Parameter: Tissue Value: Germinating Seeds
  misc_feature: MA Experiment ID: 108464 Result: Down-regulated in Transcription
  misc_feature: MA Experiment 108464 PARAMETER Experiment Name: At_Germinating_Seeds_cDNA_P Parameter: Age (day) Value: 4 vs. 0
  misc_feature: MA Experiment 108464 PARAMETER Experiment Name: At_Germinating_Seeds_cDNA_P Parameter: Tissue Value: Germinating Seeds
  misc_feature: MA Experiment ID: 108595 Result: Down-regulated in Transcription
  misc_feature: MA Experiment 108595 PARAMETER Experiment Name: At_Ler-pi_Ovule_cDNA_P Parameter: Plant Line Value: null
  misc_feature: MA Experiment ID: 20000113 Result: Down-regulated in Transcription
  misc_feature: MA Experiment 20000113 PARAMETER Experiment Name: At_42deg_Heat_cDNA_P Parameter: Temperature (deg C) Value: 42 vs. 22
  misc_feature: MA Experiment 20000113 PARAMETER Experiment Name: At_42deg_Heat_cDNA_P Parameter: Timepoint (hr) Value: 8
  misc_feature: MA Experiment 20000113 PARAMETER Experiment Name: At_42deg_Heat_cDNA_P Parameter: Tissue Value: Aerial
aagaaaacaaaattactttaaaacagaaaaaaagttgataaattgcttcagtgtcaaattctgagatctgtaaaagatgagcgacggagacgacgctgctagacgccgtaccgcggcggtgactgattaccggaagaagctccttcatcacaaggagctcgaatcccgtgtccgaacagctagggagaatttaagagcagctaagaaggaattcaacaaaactgaggatgatttgaagtctcttcaaagcgttggccagattattggagaagtactacgtcctcttgataacgagcgattgattgttaaggcaagtagtggccctcgttatgtggtgggttgtcgtagcaaggtggacaaggaaaagcttacttctggaactcgagttgtcctggatatgactacgctgacaattatgcgagcccttcctcgtgaagttgatcctgttgtttataacatgttgcatgaagatccaggcaacattagttactcagctgtgggtggtttaggtgatcagatcagagaacttagggaatctattgagctgcctctcatgaatcctgaacttttccttagagttgggattaaacctcctaagggtgtccttctgtatggacctccgggtactggaaaaactctactagctagggctattgccagcaatatcgacgccaacttcttgaaggttgtatctagtgcaatcatagacaaatacattggagaaagtgctaggttgattcgagaaatgtttaactatgctcgtgaacatcagccttgtatcattttcatggatgaaatcgatgctattggtggacgccgttttagtgaaggaactagtgctgatcgtgaaattcaaagaacacttatggagttacttaaccagcttgatgggtttgaccaacttggaaaggtgaaaatgataatggccaccaacaggccggatgttcttgatccagcacttctccgtccgggtaggttagatagaaagatcgagatcccgttgccaaatgaacaatcaagaatggaaatcctcaagatccacgcatctggcattgccaagcatggagaaatagactatgaggctatcgtgaaacttggagagggtttcaatggtgccgatctgcgtaacatatgcactgaagctggaatgttcgcaatcagagcagagcgtgactatgtaatacatgaagacttcatgaaggctgtgagaaagctgagcgaggccaagaagcttgagtcgagctctcactataacgcggattttgggaaagagtaagaaaagaataagctcagagaagaagagagggcctaaagggcagtgaaaaactctgttattcactttgaaaaaacaagctgatgattctgtttcagtttctcaatgttttgttttgaggttctagtaaacacaaaaattcttgttttagtaatgacaactattttctgtttgtcctatatttttttattt

SEQ ID NO: 77467 - protein, 399 aa, Arabidopsis thaliana; identical to SEQ ID NO: 23999
  peptide (1)..(399): Ceres Seq. ID no. 12576559
  misc_feature (175)..(362): Pfam Name: ATPase family associated with various cellular Pfam Description: ATPase family associated with various cellular
  misc_feature (1)..(399): Homolog of NCBI NO: 15219503 NR Description: 26S proteasome regulatory particle triple-A subunit4, putative; protein id: At1g45000.1, supported by cDNA:
  misc_feature (1)..(399): Homolog of NCBI NO: 15239140 NR Description: 26S proteasome AAA-ATPase subunit RPT4a; protein At5g43010.1, supported by cDNA: gi_13937182, supported by cDNA: supported by cDNA: gi_6652883 [Arabidopsis thaliana]
  misc_feature (1)..(399): Homolog of NCBI NO: 24745880 NR Description: 26S proteasome AAA-ATPase subunit RPT4a [Solanum
  misc_feature (1)..(399): Homolog of NCBI NO: 11094192 NR Description: 26S proteasome regulatory particle triple-A
  misc_feature (26)..(399): Homolog of NCBI NO: 17298147 NR Description: 26S proteasome regulatory particle triple-A
  misc_feature (11)..(392): Homolog of NCBI NO: 24640100 NR Description: CG3455-PA [Drosophila melanogaster]
  misc_feature (11)..(392): Homolog of NCBI NO: 17945503 NR Description: RE23388p [Drosophila melanogaster]
  misc_feature (11)..(392): Homolog of NCBI NO: 6434958 NR Description: 26S proteasome regulatory complex subunit p42D
  misc_feature (11)..(392): Homolog of NCBI NO: 2960216 NR Description: 26S proteasome regulatory ATPase subunit 10b
  misc_feature (27)..(383): Homolog of NCBI NO: 20093057 NR Description: proteasome-activating nucleotidase [Methanosarcina

SEQ ID NO: 77468 - protein, 292 aa, Arabidopsis thaliana; identical to SEQ ID NO: 24000
  peptide (1)..(292): Ceres Seq. ID no. 12576560
  misc_feature (68)..(255): Pfam Name: ATPase family associated with various cellular Pfam Description: ATPase family associated with various cellular
  misc_feature (1)..(292): Homolog of NCBI NO: 15219503 NR Description: 26S proteasome regulatory particle triple-A subunit4, putative; protein id: At1g45000.1, supported by cDNA:
  misc_feature (1)..(292): Homolog of NCBI NO: 15239140 NR Description: 26S proteasome AAA-ATPase subunit RPT4a; protein At5g43010.1, supported by cDNA: gi_13937182, supported by cDNA: supported by cDNA: gi_6652883 [Arabidopsis thaliana]
  misc_feature (1)..(292): Homolog of NCBI NO: 24745880 NR Description: 26S proteasome AAA-ATPase subunit RPT4a [Solanum
  misc_feature (1)..(292): Homolog of NCBI NO: 11094192 NR Description: 26S proteasome regulatory particle triple-A
  misc_feature (1)..(292): Homolog of NCBI NO: 17298147 NR Description: 26S proteasome regulatory particle triple-A
  misc_feature (1)..(285): Homolog of NCBI NO: 24640100 NR Description: CG3455-PA [Drosophila melanogaster]
  misc_feature (1)..(285): Homolog of NCBI NO: 17945503 NR Description: RE23388p [Drosophila melanogaster]
  misc_feature (1)..(285): Homolog of NCBI NO: 6434958 NR Description: 26S proteasome regulatory complex subunit p42D
  misc_feature (1)..(285): Homolog of NCBI NO: 2960216 NR Description: 26S proteasome regulatory ATPase subunit 10b
  misc_feature (1)..(276): Homolog of NCBI NO: 20093057 NR Description: proteasome-activating nucleotidase [Methanosarcina

SEQ ID NO: 77469 - protein, 286 aa, Arabidopsis thaliana; identical to SEQ ID NO: 24001
  peptide (1)..(286): Ceres Seq. ID no. 12576561
  misc_feature (62)..(249): Pfam Name: ATPase family associated with various cellular Pfam Description: ATPase family associated with various cellular
  misc_feature (1)..(286): Homolog of NCBI NO: 15219503 NR Description: 26S proteasome regulatory particle triple-A subunit4, putative; protein id: At1g45000.1, supported by cDNA:
  misc_feature (1)..(286): Homolog of NCBI NO: 15239140 NR Description: 26S proteasome AAA-ATPase subunit RPT4a; protein At5g43010.1, supported by cDNA: gi_13937182, supported by cDNA: supported by cDNA: gi_6652883 [Arabidopsis thaliana]
  misc_feature (1)..(286): Homolog of NCBI NO: 24745880 NR Description: 26S proteasome AAA-ATPase subunit RPT4a [Solanum
  misc_feature (1)..(286): Homolog of NCBI NO: 11094192 NR Description: 26S proteasome regulatory particle triple-A
  misc_feature (1)..(286): Homolog of NCBI NO: 17298147 NR Description: 26S proteasome regulatory particle triple-A
  misc_feature (1)..(279): Homolog of NCBI NO: 24640100 NR Description: CG3455-PA [Drosophila melanogaster]
  misc_feature (1)..(279): Homolog of NCBI NO: 17945503 NR Description: RE23388p [Drosophila melanogaster]
  misc_feature (1)..(279): Homolog of NCBI NO: 6434958 NR Description: 26S proteasome regulatory complex subunit p42D
  misc_feature (1)..(279): Homolog of NCBI NO: 2960216 NR Description: 26S proteasome regulatory ATPase subunit 10b
  misc_feature (1)..(270): Homolog of NCBI NO: 20093057 NR Description: proteasome-activating nucleotidase [Methanosarcina

SEQ ID NO: 77470 - DNA, 1612 bp, Arabidopsis thaliana
  misc_feature (1)..(1612): Ceres Seq. ID no. 12576586
  misc_feature: MA Experiment ID: 20000437 Result: Up-regulated in Transcription
  misc_feature: MA Experiment 20000437 PARAMETER Experiment Name: At_Drought_P Parameter: Age (day) Value: 8
  misc_feature: MA Experiment 20000437 PARAMETER Experiment Name: At_Drought_P Parameter: Organism Value: A. thaliana
  misc_feature: MA Experiment 20000437 PARAMETER Experiment Name: At_Drought_P Parameter: Plant Line Value: WS
  misc_feature: MA Experiment 20000437 PARAMETER Experiment Name: At_Drought_P Parameter: Timepoint (hr) Value: 24
  misc_feature: MA Experiment 20000437 PARAMETER Experiment Name: At_Drought_P Parameter: Tissue Value: Whole Plant
  misc_feature: MA Experiment 20000437 PARAMETER Experiment Name: At_Drought_P Parameter: Treatment Value: Drought vs. No Drought
  misc_feature: MA Experiment ID: 20000495 Result: Up-regulated in Transcription
  misc_feature: MA Experiment 20000495 PARAMETER Experiment Name: At_Guard_Cells_P Parameter: Harvest Date Value: 8/2/2002
  misc_feature: MA Experiment 20000495 PARAMETER Experiment Name: At_Guard_Cells_P Parameter: Organism Value: A. thaliana
  misc_feature: MA Experiment 20000495 PARAMETER Experiment Name: At_Guard_Cells_P Parameter: Tissue Value: Guard Cells vs. Leaves
  misc_feature: MA Experiment ID: 20000794 Result: Up-regulated in Transcription
  misc_feature: MA Experiment 20000794 PARAMETER Experiment Name: At_Petals_P Parameter: Age (day) Value: 23-25 days
  misc_feature: MA Experiment 20000794 PARAMETER Experiment Name: At_Petals_P Parameter: Plant Line Value: WS
  misc_feature: MA Experiment 20000794 PARAMETER Experiment Name: At_Petals_P Parameter: Tissue Value: Petals vs. Whole plant
  misc_feature: MA Experiment ID: 20001451 Result: Up-regulated in Transcription
  misc_feature: MA Experiment 20001451 PARAMETER Experiment Name: At_Far-red-induction_P Parameter: Age (day) Value: 7
  misc_feature: MA Experiment 20001451 PARAMETER Experiment Name: At_Far-red-induction_P Parameter: Light Value: Far-red vs. White
  misc_feature: MA Experiment 20001451 PARAMETER Experiment Name: At_Far-red-induction_P Parameter: Organism Value: A. thaliana
  misc_feature: MA Experiment 20001451 PARAMETER Experiment Name: At_Far-red-induction_P Parameter: Plant Line Value: Columbia
  misc_feature: MA Experiment 20001451 PARAMETER Experiment Name: At_Far-red-induction_P Parameter: Timepoint (hr) Value: 24
  misc_feature: MA Experiment 20001451 PARAMETER Experiment Name: At_Far-red-induction_P Parameter: Tissue Value: Whole Plant
  misc_feature: MA Experiment ID: 20001911 Result: Up-regulated in Transcription
  misc_feature: MA Experiment 20001911 PARAMETER Experiment Name: At_Drought_Reproduction_P Parameter: Age (day) Value: 40
  misc_feature: MA Experiment 20001911 PARAMETER Experiment Name: At_Drought_Reproduction_P Parameter: Organism Value: A. thaliana
  misc_feature: MA Experiment 20001911 PARAMETER Experiment Name: At_Drought_Reproduction_P Parameter: Plant Line Value: WS
  misc_feature: MA Experiment 20001911 PARAMETER Experiment Name: At_Drought_Reproduction_P Parameter: Timepoint (day) Value: 10
  misc_feature: MA Experiment 20001911 PARAMETER Experiment Name: At_Drought_Reproduction_P Parameter: Tissue Value: Flowers
  misc_feature: MA Experiment 20001911 PARAMETER Experiment Name: At_Drought_Reproduction_P Parameter: Treatment Value: Drought vs. No Drought
gaccgctcctctcgatctctgatctccctgtcttctgtctacgcttcgtcgccggccgatttctcccagactcgtcttaccgcctccggtcgaaaccctagattcccggaggacgaaattcgttttttcgccggaactaaattaaggagatttgagaggctatgggtacaacaacgacaacaagcgctgtgtatatccatgttatcgaggatgtcgtcaacaaagttcgtgaggagttcattaacaacggaggtcctggcgagagtgttctcagcgagcttcaaggaatttgggagacgaagatgatgcaagccggagtcttgaatggaccaatagagaggtcatcggctcagaagccaacacctggtggtccactgactcatgatttgaatgttccttatgaaggtacagaggagtacgagactcccactgctgaaatgctcttccctcctacaccattgcagactccccttccaacgccgcttcccggtactgctgataactcatccatgtataacatccctaccggctcaagtgattatcccactcctggaactgagaatggagtcaacattgatgttaaagcaagacctagtccttatatgccaccgccttctccgtggacaaatcctagacttgatgtcaatgttggtaagtactagttttaccagtactttatgtctccgtgaaaagaaaaatgtctcagtttcttgtttggggtataaatgtctggcctgctgctagcttatgtggatggccgtgatgagcctgagagaggaaactctaaccagcagtttacgcaggatttatttgtgccatcctctgggaaacgaaaacgtgatgattcttctggacattatcaaaatggtggatctatacctcaacaggatggtgcaggcgatgctatccctgaggcaaactttgagtgtgatgcattccgcataacctctattggcgatagaaaggtaccacgagacttcttcagctcatcatcgaagattcctcaggttgatgggccaatgcctgacccttatgatgaaatgctctctacaccaaatatatatagttatcaaggacccagtgaagagtttaacgaggccagaactcctgctccaaacgagatccaaacgagcactcctgttgctgtacaaaacgatatcattgaagatgatgaagagctgttgaacgaagatgatgatgatgacgagttggacgacctagaaagtggcgaggatatgaacacacaacacctggttttagctcaatttgacaaggtgacgcgcacaaagagcaggtggaagtgcagtctgaaagacgggatcatgcatataaacgataaggacattctcttcaacaaagcagcaggcgagtttgacttctgatcttaacactagcaatgatgcttctaggaaagtccttcaaatgtccagtgtctttctttttaccttatgatttaagaccgaccgagagagacatgagtattcatgggaaagtgtactctggttggcttgttgtacaaaaagaaaagttttttctgtcgaagaaggcgtatcaactttcaccttgtttcatgaactcttattgtctttcacgcaatggaaaattaacttcc

SEQ ID NO: 77471 - protein, 218 aa, Arabidopsis thaliana
  peptide (1)..(218): Ceres Seq. ID no. 12576587
  misc_feature (65)..(218): Pfam Name: Transcription factor IIA, alpha/beta subunit Pfam Description: Transcription factor IIA, alpha/beta subunit
  misc_feature (6)..(217): Homolog of NCBI NO: 25406976 NR Description: protein F22G5.18 [imported] - Arabidopsis >gi|8778565|gb|AAF79573.1|AC022464_31 F22G5.18 [Arabidopsis
  misc_feature (65)..(218): Homolog of NCBI NO: 1429226 NR Description: TFIIA [Arabidopsis thaliana]
  misc_feature (1)..(211): Homolog of NCBI NO: 25406978 NR Description: protein F22G5.14 [imported] - Arabidopsis >gi|8778543|gb|AAF79551.1|AC022464_9 F22G5.14 [Arabidopsis
  misc_feature (1)..(218): Homolog of NCBI NO: 17065294 NR Description: similar to TFIIA [Arabidopsis thaliana]
  misc_feature (1)..(218): Homolog of NCBI NO: 30680148 NR Description: transcription factor IIA large subunit thaliana] >gi|30680153|ref|NP_172228.3| transcription factor IIA subunit [Arabidopsis thaliana] >gi|11358887|pir||T51333
  misc_feature (1)..(218): Homolog of NCBI NO: 18390773 NR Description: transcription factor IIA large subunit; protein At1g07470.1, supported by cDNA: 19512., supported by cDNA: supported by cDNA: gi_15146225, supported by cDNA: gi_15983369
  misc_feature (146)..(218): Homolog of NCBI NO: 15237841 NR Description: putative protein; protein id: At5g59230.1 thaliana] >gi|9759244|dbj|BAB09768.1| gene_id:MNC17.14~unknown
  misc_feature (149)..(218): Homolog of NCBI NO: 34099900 NR Description: transcription factor IIA large subunit-1 [Xenopus
  misc_feature (148)..(218): Homolog of NCBI NO: 1633309 NR Description: Chain C, Yeast TfiiaTBPDNA COMPLEX
  misc_feature (149)..(218): Homolog of NCBI NO: 38492544 NR Description: Chain C, Human TfiiaTBPDNA COMPLEX
MSGLLLAYVDGRDEPERGNSNQQFTQDLFVPSSGKRKRDDSSGHYQNGGSIPQQDGAGDAIPEANFECDAFRITSIGDRKVPRDFFSSSSKIPQVDGPMPDPYDEMLSTPNIYSYQGPSEEFNEARTPAPNEIQTSTPVAVQNDIIEDDEELLNEDDDDDELDDLESGEDMNTQHLVLAQFDKVTRTKSRWKCSLKDGIMHINDKDILFNKAAGEFDF

SEQ ID NO: 77472 - protein, 166 aa, Arabidopsis thaliana
  peptide (1)..(166): Ceres Seq. ID no. 12576588
  misc_feature (1)..(163): Pfam Name: Transcription factor IIA, alpha/beta subunit Pfam Description: Transcription factor IIA, alpha/beta subunit
  misc_feature (1)..(148): Homolog of NCBI NO: 25406976 NR Description: protein F22G5.18 [imported] - Arabidopsis >gi|8778565|gb|AAF79573.1|AC022464_31 F22G5.18 [Arabidopsis
  misc_feature (1)..(163): Homolog of NCBI NO: 1429226 NR Description: TFIIA [Arabidopsis thaliana]
  misc_feature (87)..(166): Homolog of NCBI NO: 25406978 NR Description: protein F22G5.14 [imported] - Arabidopsis >gi|8778543|gb|AAF79551.1|AC022464_9 F22G5.14 [Arabidopsis
  misc_feature (59)..(163): Homolog of NCBI NO: 25406976 NR Description: protein F22G5.18 [imported] - Arabidopsis >gi|8778565|gb|AAF79573.1|AC022464_31 F22G5.18 [Arabidopsis
  misc_feature (1)..(163): Homolog of NCBI NO: 25406978 NR Description: protein F22G5.14 [imported] - Arabidopsis >gi|8778543|gb|AAF79551.1|AC022464_9 F22G5.14 [Arabidopsis
  misc_feature (87)..(166): Homolog of NCBI NO: 30680148 NR Description: transcription factor IIA large subunit thaliana] >gi|30680153|ref|NP_172228.3| transcription factor IIA subunit [Arabidopsis thaliana] >gi|11358887|pir||T51333
  misc_feature (87)..(166): Homolog of NCBI NO: 18390773 NR Description: transcription factor IIA large subunit; protein At1g07470.1, supported by cDNA: 19512., supported by cDNA: supported by cDNA: gi_15146225, supported by cDNA: gi_15983369
  misc_feature (1)..(163): Homolog of NCBI NO: 18390773 NR Description: transcription factor IIA large subunit; protein At1g07470.1, supported by cDNA: 19512., supported by cDNA: supported by cDNA: gi_15146225, supported by cDNA: gi_15983369
  misc_feature (1)..(163): Homolog of NCBI NO: 30680148 NR Description: transcription factor IIA large subunit thaliana] >gi|30680153|ref|NP_172228.3| transcription factor IIA subunit [Arabidopsis thaliana] >gi|11358887|pir||T51333
  misc_feature (3)..(67): Homolog of NCBI NO: 15237841 NR Description: putative protein; protein id: At5g59230.1 thaliana] >gi|9759244|dbj|BAB09768.1| gene_id:MNC17.14~unknown
MGTTTTTSAVYIHVIEDVVNKVREEFINNGGPGESVLSELQGIWETKMMQAGVLNGPIERSSAQKPTPGGPLTHDLNVPYEGTEEYETPTAEMLFPPTPLQTPLPTPLPGTADNSSMYNIPTGSSDYPTPGTENGVNIDVKARPSPYMPPPSPWTNPRLDVNVGKY

SEQ ID NO: 77473 - protein, 120 aa, Arabidopsis thaliana
  peptide (1)..(120): Ceres Seq. ID no. 12576589
  misc_feature (1)..(120): Pfam Name: Transcription factor IIA, alpha/beta subunit Pfam Description: Transcription factor IIA, alpha/beta subunit
  misc_feature (1)..(119): Homolog of NCBI NO: 25406976 NR Description: protein F22G5.18 [imported] - Arabidopsis >gi|8778565|gb|AAF79573.1|AC022464_31 F22G5.18 [Arabidopsis
  misc_feature (1)..(120): Homolog of NCBI NO: 1429226 NR Description: TFIIA [Arabidopsis thaliana]
  misc_feature (1)..(113): Homolog of NCBI NO: 25406978 NR Description: protein F22G5.14 [imported] - Arabidopsis >gi|8778543|gb|AAF79551.1|AC022464_9 F22G5.14 [Arabidopsis
  misc_feature (1)..(120): Homolog of NCBI NO: 17065294 NR Description: similar to TFIIA [Arabidopsis thaliana]
  misc_feature (1)..(120): Homolog of NCBI NO: 30680148 NR Description: transcription factor IIA large subunit thaliana] >gi|30680153|ref|NP_172228.3| transcription factor IIA subunit [Arabidopsis thaliana] >gi|11358887|pir||T51333
  misc_feature (1)..(120): Homolog of NCBI NO: 18390773 NR Description: transcription factor IIA large subunit; protein At1g07470.1, supported by cDNA: 19512., supported by cDNA: supported by cDNA: gi_15146225, supported by cDNA: gi_15983369
  misc_feature (48)..(120): Homolog of NCBI NO: 15237841 NR Description: putative protein; protein id: At5g59230.1 thaliana] >gi|9759244|dbj|BAB09768.1| gene_id:MNC17.14~unknown
  misc_feature (51)..(120): Homolog of NCBI NO: 34099900 NR Description: transcription factor IIA large subunit-1 [Xenopus
  misc_feature (50)..(120): Homolog of NCBI NO: 1633309 NR Description: Chain C, Yeast TfiiaTBPDNA COMPLEX
  misc_feature (51)..(120): Homolog of NCBI NO: 38492544 NR Description: Chain C, Human TfiiaTBPDNA COMPLEX
MPDPYDEMLSTPNIYSYQGPSEEFNEARTPAPNEIQTSTPVAVQNDIIEDDEELLNEDDDDDELDDLESGEDMNTQHLVLAQFDKVTRTKSRWKCSLKDGIMHINDKDILFNKAAGEFDF

SEQ ID NO: 77474 - DNA, 1773 bp, Arabidopsis thaliana
  misc_feature (1)..(1773): Ceres Seq. ID no. 12576590
  misc_feature: MA Experiment ID: 108574 Result: Down-regulated in Transcription
  misc_feature: MA Experiment 108574 PARAMETER Experiment Name: At_Wounding__cDNA_P Parameter: Timepoint (hr) Value: 1
  misc_feature: MA Experiment 108574 PARAMETER Experiment Name: At_Wounding__cDNA_P Parameter: Tissue Value: Aerial
  misc_feature: MA Experiment 108574 PARAMETER Experiment Name: At_Wounding__cDNA_P Parameter: Treatment Value: Wounding vs. No Wounding
  misc_feature: MA Experiment ID: 108576 Result: Down-regulated in Transcription
  misc_feature: MA Experiment 108576 PARAMETER Experiment Name: At_42deg_Heat_cDNA_P Parameter: Temperature (deg C) Value: 42 vs. 22
  misc_feature: MA Experiment 108576 PARAMETER Experiment Name: At_42deg_Heat_cDNA_P Parameter: Timepoint (hr) Value: 1
  misc_feature: MA Experiment 108576 PARAMETER Experiment Name: At_42deg_Heat_cDNA_P Parameter: Tissue Value: Aerial
  misc_feature: MA Experiment ID: 108668 Result: Down-regulated in Transcription
  misc_feature: MA Experiment 108668 PARAMETER Experiment Name: At_2mM_SA_cDNA_P Parameter: Plant Line Value: WS
  misc_feature: MA Experiment 108668 PARAMETER Experiment Name: At_2mM_SA_cDNA_P Parameter: Timepoint (hr) Value: 6
  misc_feature: MA Experiment 108668 PARAMETER Experiment Name: At_2mM_SA_cDNA_P Parameter: Treatment Value: 2mM SA vs. No Treatment
  misc_feature: MA Experiment ID: 20000111 Result: Down-regulated in Transcription
  misc_feature: MA Experiment 20000111 PARAMETER Experiment Name: At_42deg_Heat_cDNA_P Parameter: Temperature (deg C) Value: 42 vs. 22
  misc_feature: MA Experiment 20000111 PARAMETER Experiment Name: At_42deg_Heat_cDNA_P Parameter: Timepoint (hr) Value: 6
  misc_feature: MA Experiment 20000111 PARAMETER Experiment Name: At_42deg_Heat_cDNA_P Parameter: Tissue Value: Aerial
  misc_feature: MA Experiment ID: 20000144 Result: Down-regulated in Transcription
  misc_feature: MA Experiment 20000144 PARAMETER Experiment Name: At_42deg_Heat_cDNA_P Parameter: Temperature (deg C) Value: 42 vs. 22
  misc_feature: MA Experiment 20000144 PARAMETER Experiment Name: At_42deg_Heat_cDNA_P Parameter: Timepoint (hr) Value: 1
  misc_feature: MA Experiment 20000144 PARAMETER Experiment Name: At_42deg_Heat_cDNA_P Parameter: Tissue Value: Aerial
  misc_feature: MA Experiment ID: 20000185 Result: Down-regulated in Transcription
  misc_feature: MA Experiment 20000185 PARAMETER Experiment Name: At_Roots__P Parameter: Age (day) Value: 7 vs. 21
  misc_feature: MA Experiment 20000185 PARAMETER Experiment Name: At_Roots__P Parameter: Organism Value: A. thaliana
  misc_feature: MA Experiment 20000185 PARAMETER Experiment Name: At_Roots__P Parameter: Tissue Value: Roots vs. Whole Plant
  misc_feature: MA Experiment ID: 20000264 Result: Down-regulated in Transcription
  misc_feature: MA Experiment 20000264 PARAMETER Experiment Name: At_Open_Flower_P Parameter: Age (day) Value: 21
  misc_feature: MA Experiment 20000264 PARAMETER Experiment Name: At_Open_Flower_P Parameter: Plant Line Value: WS
  misc_feature: MA Experiment 20000264 PARAMETER Experiment Name: At_Open_Flower_P Parameter: Tissue Value: Open Flower vs. Whole Plant
  misc_feature: MA Experiment ID: 20000439 Result: Down-regulated in Transcription
  misc_feature: MA Experiment 20000439 PARAMETER Experiment Name: At_Roots__P Parameter: Age (day) Value: 14 vs. 21
  misc_feature: MA Experiment 20000439 PARAMETER Experiment Name: At_Roots__P Parameter: Organism Value: A. thaliana
  misc_feature: MA Experiment 20000439 PARAMETER Experiment Name: At_Roots__P Parameter: Tissue Value: Roots vs. Whole Plant
  misc_feature: MA Experiment ID: 20000495 Result: Down-regulated in Transcription
  misc_feature: MA Experiment 20000495 PARAMETER Experiment Name: At_Guard_Cells_P Parameter: Harvest Date Value: 8/2/2002
  misc_feature: MA Experiment 20000495 PARAMETER Experiment Name: At_Guard_Cells_P Parameter: Organism Value: A. thaliana
  misc_feature: MA Experiment 20000495 PARAMETER Experiment Name: At_Guard_Cells_P Parameter: Tissue Value: Guard Cells vs. Leaves
  misc_feature: MA Experiment ID: 20001247 Result: Up-regulated in Transcription
  misc_feature: MA Experiment 20001247 PARAMETER Experiment Name: At_Far-red-induction_P Parameter: Age (day) Value: 7
  misc_feature: MA Experiment 20001247 PARAMETER Experiment Name: At_Far-red-induction_P Parameter: Light Value: Far-red vs. White
  misc_feature: MA Experiment 20001247 PARAMETER Experiment Name: At_Far-red-induction_P Parameter: Organism Value: A. thaliana
  misc_feature: MA Experiment 20001247 PARAMETER Experiment Name: At_Far-red-induction_P Parameter: Plant Line Value: Columbia
  misc_feature: MA Experiment 20001247 PARAMETER Experiment Name: At_Far-red-induction_P Parameter: Timepoint (hr) Value: 1
  misc_feature: MA Experiment 20001247 PARAMETER Experiment Name: At_Far-red-induction_P Parameter: Tissue Value: Whole Plant
ttgttgttatcctcacagtaaatgcttttgcttgagagagagtctgttagaggttttttgtttgtttctgtttccttctgtcacccagaaaactaaaaagcaaacaaattcaagaagagagagagagagagatagcctcaaaaccaagtcctaaccattgttgatagaagagaaagcttttcttttcttgttgcttatggtgaaagaatgaaagagagagaggaggagaagtaagaagcagagaaagtgtttagagctttgcatgttcctttctctccaagtttatatcttcatcggtttcacaagttcacttaaaaagttgaaaagagtctttcttcttcaactattgtaaatgcgaaatggatcgaagagatgcaatgggattatccgggtcaggttcttactatatccatagaggattatccgggtcgggtcctccaacgtttcatggatcaccacagcaacagcaaggtcttcgtcacttacctaatcaaaactctccattcgggtcaggctccactggtttcggatctccttctttacacggtgatccttctctggcaacagcagccggaggagccggagctcttcctcatcatatcggcgttaatatgattgctcctcctccacctcccagtgaaactccgatgaaacgaaagagaggacggcctagaaaatacggtcaagacggctctgtttctttggctctgtcgtcttcctctgtttcgaccattactcccaacaactctaacaaacgcggccgtggtcgacctccgggctccggcaagaaacagagaatggcttccgttggtgaactgatgccttcatcttctggaatgagcttcacgccacatgttatcgcggtttcaataggagaagatattgcatcaaaggttatagctttctctcaacaaggtccgagagccatttgcgttttatctgcaagtggtgcagtctctactgcaacacttattcaaccatcagcatctcccggagccattaaatacgagggccggtttgaaatcctagcgttatcaacatcttatatagtggcaactgatggaagcttccgtaaccgaactggaaacttatcggtttcgcttgctagccccgatgggcgtgtgattggcggtgccattggtgggcctttaatagctgcaagtcctgttcaggttattgtagggagctttatatgggcagctccaaagatcaagagcaagaaacgagaagaagaagcttctgaagttgttcaagaaactgatgatcaccacgttctggacaataataacaacacgatttcgcctgtccctcagcagcagccaaaccaaaacctgatttggtcaacaggttcaaggcaaatggatatgcgtcatgctcatgctgatattgatttaatgcgcggttgatgatagcgagaaagaactctgtgtatataaagcatggaatctaggaagaagaagaaggaatataagctaacctctgaacaaaagtatgtggaaatgttagggaaaaagattatgtggaaatgttagggaaaaagattaactctattagtgtacctctcatatctctaagcttgtttggttttactgtttctgtgactctgaagatttgcagagttcctttctttctctgttttagattgttcagtctttatgtaatttgcttgcaattctgattctacagcttagattcagtacattgtgtagaagtttacatgggaacctgaaaattgggcatttcatgggccttcatatgatccaatttattttc

SEQ ID NO: 77475 - protein, 348 aa, Arabidopsis thaliana; identical to SEQ ID NO: 36793
  peptide (1)..(348): Ceres Seq. ID no. 12576591
  misc_feature (1)..(348): Homolog of NCBI NO: 15225902 NR Description: putative AT-hook DNA-binding protein; protein id: supported by cDNA: gi_14194130, supported by cDNA: gi_16323337, by cDNA: gi_17065245 [Arabidopsis thaliana]
  misc_feature (1)..(348): Homolog of NCBI NO: 30695388 NR Description: DNA-binding protein -related [Arabidopsis
  misc_feature (7)..(348): Homolog of NCBI NO: 11281387 NR Description: probable DNA-binding protein - Arabidopsis
  misc_feature (1)..(348): Homolog of NCBI NO: 7488825 NR Description: probable DNA-binding protein - garden pea
  misc_feature (1)..(337): Homolog of NCBI NO: 2213534 NR Description: DNA-binding PD1-like protein [Pisum sativum]
  misc_feature (1)..(348): Homolog of NCBI NO: 30696854 NR Description: DNA-binding protein -related [Arabidopsis
  misc_feature (1)..(321): Homolog of NCBI NO: 6633838 NR Description: F2K11.15 [Arabidopsis thaliana]
  misc_feature (1)..(348): Homolog of NCBI NO: 22330402 NR Description: DNA-binding protein, putative; protein id: supported by cDNA: gi_17979308, supported by cDNA: gi_20466008
  misc_feature (1)..(317): Homolog of NCBI NO: 6633838 NR Description: F2K11.15 [Arabidopsis thaliana]
  misc_feature (89)..(348): Homolog of NCBI NO: 6633838 NR Description: F2K11.15 [Arabidopsis thaliana]

SEQ ID NO: 77476 - protein, 342 aa, Arabidopsis thaliana; identical to SEQ ID NO: 36794
  peptide (1)..(342): Ceres Seq. ID no. 12576592
  misc_feature (1)..(342): Homolog of NCBI NO: 15225902 NR Description: putative AT-hook DNA-binding protein; protein id: supported by cDNA: gi_14194130, supported by cDNA: gi_16323337, by cDNA: gi_17065245 [Arabidopsis thaliana]
  misc_feature (1)..(342): Homolog of NCBI NO: 30695388 NR Description: DNA-binding protein -related [Arabidopsis
  misc_feature (1)..(342): Homolog of NCBI NO: 11281387 NR Description: probable DNA-binding protein - Arabidopsis
  misc_feature (1)..(342): Homolog of NCBI NO: 7488825 NR Description: probable DNA-binding protein - garden pea
  misc_feature (1)..(331): Homolog of NCBI NO: 2213534 NR Description: DNA-binding PD1-like protein [Pisum sativum]
  misc_feature (1)..(342): Homolog of NCBI NO: 30696854 NR Description: DNA-binding protein -related [Arabidopsis
  misc_feature (1)..(315): Homolog of NCBI NO: 6633838 NR Description: F2K11.15 [Arabidopsis thaliana]
  misc_feature (1)..(342): Homolog of NCBI NO: 22330402 NR Description: DNA-binding protein, putative; protein id: supported by cDNA: gi_17979308, supported by cDNA: gi_20466008
  misc_feature (1)..(311): Homolog of NCBI NO: 6633838 NR Description: F2K11.15 [Arabidopsis thaliana]
  misc_feature (83)..(342): Homolog of NCBI NO: 6633838 NR Description: F2K11.15 [Arabidopsis thaliana]

SEQ ID NO: 77477 - protein, 264 aa, Arabidopsis thaliana; identical to SEQ ID NO: 36795
  peptide (1)..(264): Ceres Seq. ID no. 12576593
  misc_feature (1)..(264): Homolog of NCBI NO: 15225902 NR Description: putative AT-hook DNA-binding protein; protein id: supported by cDNA: gi_14194130, supported by cDNA: gi_16323337, by cDNA: gi_17065245 [Arabidopsis thaliana]
  misc_feature (1)..(264): Homolog of NCBI NO: 30695388 NR Description: DNA-binding protein -related [Arabidopsis
  misc_feature (1)..(264): Homolog of NCBI NO: 11281387 NR Description: probable DNA-binding protein - Arabidopsis
  misc_feature (1)..(264): Homolog of NCBI NO: 7488825 NR Description: probable DNA-binding protein - garden pea
  misc_feature (1)..(253): Homolog of NCBI NO: 2213534 NR Description: DNA-binding PD1-like protein [Pisum sativum]
  misc_feature (1)..(264): Homolog of NCBI NO: 30696854 NR Description: DNA-binding protein -related [Arabidopsis
  misc_feature (1)..(237): Homolog of NCBI NO: 6633838 NR Description: F2K11.15 [Arabidopsis thaliana]
  misc_feature (1)..(264): Homolog of NCBI NO: 22330402 NR Description: DNA-binding protein, putative; protein id: supported by cDNA: gi_17979308, supported by cDNA: gi_20466008
  misc_feature (1)..(233): Homolog of NCBI NO: 6633838 NR Description: F2K11.15 [Arabidopsis thaliana]
  misc_feature (5)..(264): Homolog of NCBI NO: 6633838 NR Description: F2K11.15 [Arabidopsis thaliana]

SEQ ID NO: 77478 - DNA, 1765 bp, Arabidopsis thaliana
  misc_feature (1)..(1765): Ceres Seq. ID no. 12576594
  misc_feature: MA Experiment ID: 20000173 Result: Down-regulated in Transcription
  misc_feature: MA Experiment 20000173 PARAMETER Experiment Name: At_42deg_Heat_P Parameter: Age (day) Value: 14
  misc_feature: MA Experiment 20000173 PARAMETER Experiment Name: At_42deg_Heat_P Parameter: Organism Value: A. thaliana
  misc_feature: MA Experiment 20000173 PARAMETER Experiment Name: At_42deg_Heat_P Parameter: Plant Line Value: WS
  misc_feature: MA Experiment 20000173 PARAMETER Experiment Name: At_42deg_Heat_P Parameter: Temperature (deg C) Value: 42 vs. 22
  misc_feature: MA Experiment 20000173 PARAMETER Experiment Name: At_42deg_Heat_P Parameter: Timepoint (hr) Value: 6
  misc_feature: MA Experiment 20000173 PARAMETER Experiment Name: At_42deg_Heat_P Parameter: Tissue Value: Aerial
  misc_feature: MA Experiment ID: 20000265 Result: Up-regulated in Transcription
  misc_feature: MA Experiment 20000265 PARAMETER Experiment Name: At_Open_Flower_P Parameter: Age (day) Value: 21
  misc_feature: MA Experiment 20000265 PARAMETER Experiment Name: At_Open_Flower_P Parameter: Plant Line Value: WS
  misc_feature: MA Experiment 20000265 PARAMETER Experiment Name: At_Open_Flower_P Parameter: Tissue Value: Closed Flower vs. Whole Plant
  misc_feature: MA Experiment ID: 20000286 Result: Up-regulated in Transcription
  misc_feature: MA Experiment 20000286 PARAMETER Experiment Name: At_Open_Flower_P Parameter: Age (day) Value: 21
  misc_feature: MA Experiment 20000286 PARAMETER Experiment Name: At_Open_Flower_P Parameter: Plant Line Value: WS
  misc_feature: MA Experiment 20000286 PARAMETER Experiment Name: At_Open_Flower_P Parameter: Tissue Value: Half Open vs. Whole Plant
  misc_feature: MA Experiment ID: 20001451 Result: Down-regulated in Transcription
  misc_feature: MA Experiment 20001451 PARAMETER Experiment Name: At_Far-red-induction_P Parameter: Age (day) Value: 7
  misc_feature: MA Experiment 20001451 PARAMETER Experiment Name: At_Far-red-induction_P Parameter: Light Value: Far-red vs. White
  misc_feature: MA Experiment 20001451 PARAMETER Experiment Name: At_Far-red-induction_P Parameter: Organism Value: A. thaliana
  misc_feature: MA Experiment 20001451 PARAMETER Experiment Name: At_Far-red-induction_P Parameter: Plant Line Value: Columbia
  misc_feature: MA Experiment 20001451 PARAMETER Experiment Name: At_Far-red-induction_P Parameter: Timepoint (hr) Value: 24
  misc_feature: MA Experiment 20001451 PARAMETER Experiment Name: At_Far-red-induction_P Parameter: Tissue Value: Whole Plant
acttattccaaaagcaaacaaaatccaacactgtctcgttatctttctcttcactctttgatataaagaaggatcatcaaagctttcattttgagatctgggctcagacaaagattcttttttttttattctctccccagctccaaattctcagtgaagcataattgctctcgtacgtgggggttttgctcaatgtaaagaagttaaagattcaaacttttttttcacaatgggagagaatctgcatttgtctccacgacaccgatcttctctaaagaagccattgttgattgttttgttagtctgtatcacaagtgtgcttttggtgatcacttacatgtatccacaacacaacaacagtaagagctctgcttgtgcgggtttgtctagtagaggctgtcaagctgcgctctctggatggcttcctgttcatgtcaggaaattcactgatgaagaagtagcagctcgagttgtgatcaaagatatactgagactacctcctgctctaaccgctaaatcgaaaatcgcttttatgtttttgactcctggtactttgccatttgagaagctttgggataagtttttccagggtcaagaaggaagattctctatttacatccacccttccaggttacgaccagttcacattagccgtcacttttcagaccgtgaaattcatagtgatcatgtcacttggggaaggatttctatggttgatgctgagagacggcttctagcaaatgctcttgaagatcctgataaccagcactttgttcttctttcagaaagttgtataccgttgcatacatttgactacacctatcgatatttgatgcacgcaaatgtcagcttcattgatagttttgaggatcttggtcctcatgggactggcagacacatggatcacatgttacctgagatcccaaggcaagatttcagaaagggtgcacagtggttcacaatgaagcgtcaacacgctgtaatagtgatggctgatggtctctactactcgaaattccgggagtattgcagacctggagtagaagcaaacaagaactgcatcgcggatgaacattacctgccaacattctttcatatgcttgatcctggaggaatctcgaactggtcagtcacatatgttgattggtctgagcgtagatggcatccaaagacatatagagcacgcgatgtctcactcaagctcttgaaaaatatcacgtctgacgacatgagtgtacatgtaacaagcgttggcaagcgcggagaagagctgcgttggccttgtacatggaagggaattagacgaccatgttatctatttgcaaggaagcttcactcagatgctctttacaaactggtcagactctttccaaattacacaagcacagtggtctaagccagagacaaattcttgaaactaaaccatacgattcttgaaaccggaactaaacacttccagatatgccgagattggatcgcaatttactgtaaatttttgctttctcttgctgagatttagtgtctctttacatggtactctacttttattaaggtttagtataagaagaaagttagaagcagaaattttttggtcaaggagagatttggttatcgtgattttagccattgttcggttagtgttaagcggtatatgttgttgtaaaagctataagtagtttagcacaacgggttaagaattttggctgtgttcagttctttgacatctaaacataatgataccaatatgaaaaatactttttgctcg

SEQ ID NO: 77479 - protein, 388 aa, Arabidopsis thaliana; identical to SEQ ID NO: 43707
  peptide (1)..(388): Ceres Seq. ID no. 12576595
  misc_feature (132)..(243): Pfam Name: Arabidopsis protein of unknown function, DUF266 Pfam Description: Arabidopsis protein of unknown function, DUF266
  misc_feature (1)..(388): Homolog of NCBI NO: 22327910 NR Description: putative protein; protein id: At5g57270.1, by cDNA: gi_17065015, supported by cDNA: gi_17065151, supported cDNA: gi_20260013 [Arabidopsis thaliana]
  misc_feature (1)..(388): Homolog of NCBI NO: 17065016 NR Description: Unknown protein [Arabidopsis thaliana]
  misc_feature (1)..(343): Homolog of NCBI NO: 8777360 NR Description: gene_id:MJB24.8~pir||T04241~strong similarity to
  misc_feature (1)..(388): Homolog of NCBI NO: 15236024 NR Description: putative protein; protein id: At4g25870.1
  misc_feature (16)..(387): Homolog of NCBI NO: 22329024 NR Description: putative protein; protein id: At4g30060.1, by cDNA: gi_17065049 [Arabidopsis thaliana] putative protein [Arabidopsis thaliana]
  misc_feature (10)..(387): Homolog of NCBI NO: 30680587 NR Description: expressed protein [Arabidopsis thaliana]
  misc_feature (10)..(340): Homolog of NCBI NO: 7487281 NR Description: hypothetical protein T20K24.18 - Arabidopsis >gi|3176725|gb|AAD12039.1| (AC002392) unknown protein
  misc_feature (9)..(384): Homolog of NCBI NO: 38346557 NR Description: OSJNBa0035M09.18 [Oryza sativa (japonica
  misc_feature (10)..(387): Homolog of NCBI NO: 26452247 NR Description: unknown protein [Arabidopsis thaliana]
  misc_feature (9)..(384): Homolog of NCBI NO: 38637182 NR Description: unknown protein [Oryza sativa (japonica

SEQ ID NO: 77480 - protein, 352 aa, Arabidopsis thaliana; identical to SEQ ID NO: 43708
  peptide (1)..(352): Ceres Seq. ID no. 12576596
  misc_feature (96)..(207): Pfam Name: Arabidopsis protein of unknown function, DUF266 Pfam Description: Arabidopsis protein of unknown function, DUF266
  misc_feature (1)..(352): Homolog of NCBI NO: 22327910 NR Description: putative protein; protein id: At5g57270.1, by cDNA: gi_17065015, supported by cDNA: gi_17065151, supported cDNA: gi_20260013 [Arabidopsis thaliana]
  misc_feature (1)..(352): Homolog of NCBI NO: 17065016 NR Description: Unknown protein [Arabidopsis thaliana]
  misc_feature (1)..(307): Homolog of NCBI NO: 8777360 NR Description: gene_id:MJB24.8~pir||T04241~strong similarity to
  misc_feature (1)..(352): Homolog of NCBI NO: 15236024 NR Description: putative protein; protein id: At4g25870.1
  misc_feature (1)..(351): Homolog of NCBI NO: 22329024 NR Description: putative protein; protein id: At4g30060.1, by cDNA: gi_17065049 [Arabidopsis thaliana] putative protein [Arabidopsis thaliana]
  misc_feature (1)..(351): Homolog of NCBI NO: 30680587 NR Description: expressed protein [Arabidopsis thaliana]
  misc_feature (1)..(304): Homolog of NCBI NO: 7487281 NR Description: hypothetical protein T20K24.18 - Arabidopsis >gi|3176725|gb|AAD12039.1| (AC002392) unknown protein
  misc_feature (1)..(348): Homolog of NCBI NO: 38346557 NR Description: OSJNBa0035M09.18 [Oryza sativa (japonica
  misc_feature (1)..(351): Homolog of NCBI NO: 26452247 NR Description: unknown protein [Arabidopsis thaliana]
  misc_feature (1)..(348): Homolog of NCBI NO: 38637182 NR Description: unknown protein [Oryza sativa (japonica

SEQ ID NO: 77481 - protein, 287 aa, Arabidopsis thaliana; identical to SEQ ID NO: 43709
  peptide (1)..(287): Ceres Seq. ID no. 12576597
  misc_feature (31)..(142): Pfam Name: Arabidopsis protein of unknown function, DUF266 Pfam Description: Arabidopsis protein of unknown function, DUF266
  misc_feature (1)..(287): Homolog of NCBI NO: 22327910 NR Description: putative protein; protein id: At5g57270.1, by cDNA: gi_17065015, supported by cDNA: gi_17065151, supported cDNA: gi_20260013 [Arabidopsis thaliana]
  misc_feature (1)..(287): Homolog of NCBI NO: 17065016 NR Description: Unknown protein [Arabidopsis thaliana]
  misc_feature (1)..(242): Homolog of NCBI NO: 8777360 NR Description: gene_id:MJB24.8~pir||T04241~strong similarity to
  misc_feature (1)..(287): Homolog of NCBI NO: 15236024 NR Description: putative protein; protein id: At4g25870.1
  misc_feature (1)..(286): Homolog of NCBI NO: 22329024 NR Description: putative protein; protein id: At4g30060.1, by cDNA: gi_17065049 [Arabidopsis thaliana] putative protein [Arabidopsis thaliana]
  misc_feature (1)..(286): Homolog of NCBI NO: 30680587 NR Description: expressed protein [Arabidopsis thaliana]
  misc_feature (1)..(239): Homolog of NCBI NO: 7487281 NR Description: hypothetical protein T20K24.18 - Arabidopsis >gi|3176725|gb|AAD12039.1| (AC002392) unknown protein
  misc_feature (1)..(283): Homolog of NCBI NO: 38346557 NR Description: OSJNBa0035M09.18 [Oryza sativa (japonica
  misc_feature (1)..(286): Homolog of NCBI NO: 26452247 NR Description: unknown protein [Arabidopsis thaliana]
  misc_feature (1)..(283): Homolog of NCBI NO: 38637182 NR Description: unknown protein [Oryza sativa (japonica

SEQ ID NO: 77482 - DNA, 2655 bp, Arabidopsis thaliana
  misc_feature (1)..(2655): Ceres Seq. ID no. 12576610
  misc_feature: MA Experiment ID: 20000171 Result: Up-regulated in Transcription
  misc_feature: MA Experiment 20000171 PARAMETER Experiment Name: At_42deg_Heat_P Parameter: Age (day) Value: 14
  misc_feature: MA Experiment 20000171 PARAMETER Experiment Name: At_42deg_Heat_P Parameter: Organism Value: A. thaliana
  misc_feature: MA Experiment 20000171 PARAMETER Experiment Name: At_42deg_Heat_P Parameter: Plant Line Value: WS
  misc_feature: MA Experiment 20000171 PARAMETER Experiment Name: At_42deg_Heat_P Parameter: Temperature (deg C) Value: 42 vs. 22
  misc_feature: MA Experiment 20000171 PARAMETER Experiment Name: At_42deg_Heat_P Parameter: Timepoint (hr) Value: 1
  misc_feature: MA Experiment 20000171 PARAMETER Experiment Name: At_42deg_Heat_P Parameter: Tissue Value: Aerial
ggttcttccccaaacacaacgaagaagtcttttgtttccgatatagatcgaggaacttcgatttatcagacattaacaccaatttttaagatatcgtgaaggagagatttgattgatggcttggaggcgcatcatcaccaaggtttcgagtcatgaaagggaattgagcagtttaagaagcttacttgttagagcttactcctcttttcctagagtgggagttactggagctgtgggtggtggtggagcttctttaccgcgaacgaggtttcaatcgagttatgttggtagctttgctcgcagagtccgtgatagagaagaagttaatgaggttgcacatctgagagaacttattcgaagaaatgatcctgaggctgttatcagaatgtttgaaagccaaccttctttgcatgcgaatgcctctgcgttatcggaatacattaaggcattggttaaagttgataggctcgatcaaagtgagctggttcgaacattgcaaagaggtattgctggtgttgcaagggaggaagagacttttggaggtcttggggcatttagaaacgtaggaaaaccaacaaaagatggtgtccttggaactgctagtgcaccgatccatacgatatccacagaaaggactcactttaaagaacagctatggagtacaatccgaactattggagttggttttttactcatttctggtattggagctcttatcgaggacagaggaattggcaaaggacttggtttgcacgaagaagtgcaacctagtatggattcgagcaccaaattttctgatgtaaagggtgttgatgaagcaaaggctgagctagaggaaattgtgcattatcttcgcgaccccaaagtaaattcacagtgctagagtgtttttctaaggttcactcgtctgggaggaaagcttcctaagggtgtgttgcttgtcggtcctcctgggacaggaaaaactatgcttgctagagctattgctggagaagctggagtgcctttcttctcctgcagtggtagtgagtttgaagagatgtttgttggagttggagccagaagagtgagagatctttttagtgctgcaaagaagtgctccccgtgtattatatttatcgatgaaatagatgctattggaggaagtcgcaatcccaaggaccagcaatacatgaagatgacattgaaccagatgctcgttgagttggatgggtttaaacagaatgaaggaattattgtggtcgcagcaacaaatttcccagagtctttggataaggccctggttagacctgggaggtttgatcgtcatattgttgtacctaacccagacgtggaaggtcgacgccagattttggagtctcacatgtcaaaggtacttaaggctgaagatgtcgatttaatgatcatcgctagaggaacgcctggattttctggcgctgatttggctaatctggtcaatgttgctgctttaaaagctgcaatggacggttctaaagatgtgacaatgtctgatcttgagtttgccaaagacagaatcatgatgggaagtgagaggaaatctgcagttatatctgacgagtcaagaaagctaactgctttccatgaaggtggtcatgcccttgttgccattcacaccgaaggtgctcttccagtccacaaagcaaccattgtgcctcgtggtatggctcttggcatggtttctcaactaccagataaagatgagacgagcatttctaggaaacagatgcttgctaggcttgatgtttgtatgggaggccgggtagccgaagagttgatttttggggaaagtgaagtaacttcgggtgcatcttctgatcttgagcaggcaaccaaactcgcgagagcaatggtcacgaaattcggtatgagcaaagaggtgggtcttgtggcacataactacgacgacaatgggaaaagcatgagcaccgagacaaggcttctcattgagagtgaagtgaaacaacttctggaaaaggcttataacaatgcaaaaacaatcctcacggtttacaacaaagagcttcatgcccttgcaaatgctttgcttcagcacgaaactctgtccggtaagcagattaaagaattgcttaccgatctcaactctccactgctgcaaaagcgtcaagaagtggttacaaagcaaagcaacccggttcctccatcaacccctagctcagcatcatcagcagccgcagcagctgccgcagctgcagccgccgccgccgcagcagctgcaacagccgcaaccaaaggtaaagacatggcgccagtatcgtaaaaataaaggagctagcgtttggtagagaaggcgttttcatgtatttgtgtatgttggggtaattgaattgggaataactctttattttgagagtttttagaatcagtgagaggctggtgagggttaagagcattaagcttaggacaatgagattaacatctcaggtttttctctatctctatctcgtacacacggaatctcgctgcgaaatggtatgtgttcactttttctctaaatgttttcggaatctcgtgggatgttatttagaagtttggctcgtacagtttcaggttacactaaattctaaagcctgcttgtaagactcaatgcaataaattttatagtctcttgttatt

SEQ ID NO: 77483 - protein, 443 aa, Arabidopsis thaliana
  peptide (1)..(443): Ceres Seq. ID no. 12576611
  misc_feature (178)..(380): Pfam Name: Peptidase family M41 Pfam Description: Peptidase family M41
  misc_feature (1)..(442): Homolog of NCBI NO: 30526336 NR Description: putative FtsH protease [Lycopersicon esculentum]
  misc_feature (1)..(436): Homolog of NCBI NO: 34914298 NR Description: putative FtsH protease [Oryza sativa (japonica group)] >gi|20521392|dbj|BAB91903.1| putative FtsH protease
  misc_feature (1)..(437): Homolog of NCBI NO: 34914298 NR Description: putative FtsH protease [Oryza sativa (japonica group)] >gi|20521392|dbj|BAB91903.1| putative FtsH protease
  misc_feature (1)..(381): Homolog of NCBI NO: 18423480 NR Description: FtsH protease, putative; protein id: At5g53170.1, by cDNA: gi_20258847 [Arabidopsis thaliana]
  misc_feature (1)..(380): Homolog of NCBI NO: 531752 NR Description: probable mitochondrial protein~nearly identical
  misc_feature (1)..(380): Homolog of NCBI NO: 684978 NR Description: OSD1 gene product [Saccharomyces cerevisiae]
  misc_feature (1)..(380): Homolog of NCBI NO: 6325281 NR Description: Mitochondrial protein of the CDC48/PAS1/SEC18 of ATPases; Yme1p [Saccharomyces cerevisiae]
  misc_feature (1)..(406): Homolog of NCBI NO: 22963104 NR Description: hypothetical protein [Rhodopseudomonas palustris]
  misc_feature (1)..(381): Homolog of NCBI NO: 19076014 NR Description: putative metallopeptidase [Schizosaccharomyces
  misc_feature (1)..(409): Homolog of NCBI NO: 27382257 NR Description: metalloprotease [Bradyrhizobium japonicum] metalloprotease FtsH [Bradyrhizobium japonicum]
MLARAIAGEAGVPFFSCSGSEFEEMFVGVGARRVRDLFSAAKKCSPCIIFIDEIDAIGGSRNPKDQQYMKMTLNQMLVELDGFKQNEGIIVVAATNFPESLDKALVRPGRFDRHIVVPNPDVEGRRQILESHMSKVLKAEDVDLMIIARGTPGFSGADLANLVNVAALKAAMDGSKDVTMSDLEFAKDRIMMGSERKSAVISDESRKLTAFHEGGHALVAIHTEGALPVHKATIVPRGMALGMVSQLPDKDETSISRKQMLARLDVCMGGRVAEELIFGESEVTSGASSDLEQATKLARAMVTKFGMSKEVGLVAHNYDDNGKSMSTETRLLIESEVKQLLEKAYNNAKTILTVYNKELHALANALLQHETLSGKQIKELLTDLNSPLLQKRQEVVTKQSNPVPPSTPSSASSAAAAAAAAAAAAAAAAATAATKGKDMAPVS

SEQ ID NO: 77484 - protein, 419 aa, Arabidopsis thaliana
  peptide (1)..(419): Ceres Seq. ID no. 12576612
  misc_feature (154)..(356): Pfam Name: Peptidase family M41 Pfam Description: Peptidase family M41
  misc_feature (1)..(418): Homolog of NCBI NO: 30526336 NR Description: putative FtsH protease [Lycopersicon esculentum]
  misc_feature (1)..(412): Homolog of NCBI NO: 34914298 NR Description: putative FtsH protease [Oryza sativa (japonica group)] >gi|20521392|dbj|BAB91903.1| putative FtsH protease
  misc_feature (1)..(413): Homolog of NCBI NO: 34914298 NR Description: putative FtsH protease [Oryza sativa (japonica group)] >gi|20521392|dbj|BAB91903.1| putative FtsH protease
  misc_feature (1)..(357): Homolog of NCBI NO: 18423480 NR Description: FtsH protease, putative; protein id: At5g53170.1, by cDNA: gi_20258847 [Arabidopsis thaliana]
  misc_feature (1)..(356): Homolog of NCBI NO: 531752 NR Description: probable mitochondrial protein~nearly identical
  misc_feature (1)..(356): Homolog of NCBI NO: 684978 NR Description: OSD1 gene product [Saccharomyces cerevisiae]
  misc_feature (1)..(356): Homolog of NCBI NO: 6325281 NR Description: Mitochondrial protein of the CDC48/PAS1/SEC18 of ATPases; Yme1p [Saccharomyces cerevisiae]
  misc_feature (1)..(382): Homolog of NCBI NO: 22963104 NR Description: hypothetical protein [Rhodopseudomonas palustris]
  misc_feature (1)..(357): Homolog of NCBI NO: 19076014 NR Description: putative metallopeptidase [Schizosaccharomyces
  misc_feature (1)..(385): Homolog of NCBI NO: 27382257 NR Description: metalloprotease [Bradyrhizobium japonicum] metalloprotease FtsH [Bradyrhizobium japonicum]
MFVGVGARRVRDLFSAAKKCSPCIIFIDEIDAIGGSRNPKDQQYMKMTLNQMLVELDGFKQNEGIIVVAATNFPESLDKALVRPGRFDRHIVVPNPDVEGRRQILESHMSKVLKAEDVDLMIIARGTPGFSGADLANLVNVAALKAAMDGSKDVTMSDLEFAKDRIMMGSERKSAVISDESRKLTAFHEGGHALVAIHTEGALPVHKATIVPRGMALGMVSQLPDKDETSISRKQMLARLDVCMGGRVAEELIFGESEVTSGASSDLEQATKLARAMVTKFGMSKEVGLVAHNYDDNGKSMSTETRLLIESEVKQLLEKAYNNAKTILTVYNKELHALANALLQHETLSGKQIKELLTDLNSPLLQKRQEVVTKQSNPVPPSTPSSASSAAAAAAAAAAAAAAAAATAATKGKDMAPVS

SEQ ID NO: 77485 - protein, 375 aa, Arabidopsis thaliana
  peptide (1)..(375): Ceres Seq. ID no. 12576613
  misc_feature (110)..(312): Pfam Name: Peptidase family M41 Pfam Description: Peptidase family M41
  misc_feature (1)..(374): Homolog of NCBI NO: 30526336 NR Description: putative FtsH protease [Lycopersicon esculentum]
  misc_feature (1)..(368): Homolog of NCBI NO: 34914298 NR Description: putative FtsH protease [Oryza sativa (japonica group)] >gi|20521392|dbj|BAB91903.1| putative FtsH protease
  misc_feature (1)..(369): Homolog of NCBI NO: 34914298 NR Description: putative FtsH protease [Oryza sativa (japonica group)] >gi|20521392|dbj|BAB91903.1| putative FtsH protease
  misc_feature (1)..(313): Homolog of NCBI NO: 18423480 NR Description: FtsH protease, putative; protein id: At5g53170.1, by cDNA: gi_20258847 [Arabidopsis thaliana]
  misc_feature (1)..(312): Homolog of NCBI NO: 531752 NR Description: probable mitochondrial protein~nearly identical
  misc_feature (1)..(312): Homolog of NCBI NO: 684978 NR Description: OSD1 gene product [Saccharomyces cerevisiae]
  misc_feature (1)..(312): Homolog of NCBI NO: 6325281 NR Description: Mitochondrial protein of the CDC48/PAS1/SEC18 of ATPases; Yme1p [Saccharomyces cerevisiae]
  misc_feature (1)..(338): Homolog of NCBI NO: 22963104 NR Description: hypothetical protein [Rhodopseudomonas palustris]
  misc_feature (1)..(313): Homolog of NCBI NO: 19076014 NR Description: putative metallopeptidase [Schizosaccharomyces
  misc_feature (1)..(341): Homolog of NCBI NO: 27382257 NR Description: metalloprotease [Bradyrhizobium japonicum] metalloprotease FtsH [Bradyrhizobium japonicum]
MKMTLNQMLVELDGFKQNEGIIVVAATNFPESLDKALVRPGRFDRHIVVPNPDVEGRRQILESHMSKVLKAEDVDLMIIARGTPGFSGADLANLVNVAALKAAMDGSKDVTMSDLEFAKDRIMMGSERKSAVISDESRKLTAFHEGGHALVAIHTEGALPVHKATIVPRGMALGMVSQLPDKDETSISRKQMLARLDVCMGGRVAEELIFGESEVTSGASSDLEQATKLARAMVTKFGMSKEVGLVAHNYDDNGKSMSTETRLLIESEVKQLLEKAYNNAKTILTVYNKELHALANALLQHETLSGKQIKELLTDLNSPLLQKRQEVVTKQSNPVPPSTPSSASSAAAAAAAAAAAAAAAAATAATKGKDMAPVS

SEQ ID NO: 77486 - DNA, 1590 bp, Arabidopsis thaliana
  misc_feature (1)..(1590): Ceres Seq. ID no. 12576637
  misc_feature: MA Experiment ID: 108434 Result: Up-regulated in Transcription
  misc_feature: MA Experiment 108434 PARAMETER Experiment Name: At_Root_Tips_cDNA_P Parameter: Tissue Value: Root Tips
  misc_feature: MA Experiment ID: 108462 Result: Down-regulated in Transcription
  misc_feature: MA Experiment 108462 PARAMETER Experiment Name: At_Germinating_Seeds_cDNA_P Parameter: Age (day) Value: 2 vs. 0
  misc_feature: MA Experiment 108462 PARAMETER Experiment Name: At_Germinating_Seeds_cDNA_P Parameter: Tissue Value: Germinating Seeds
  misc_feature: MA Experiment ID: 108463 Result: Down-regulated in Transcription
  misc_feature: MA Experiment 108463 PARAMETER Experiment Name: At_Germinating_Seeds_cDNA_P Parameter: Age (day) Value: 3 vs. 0
  misc_feature: MA Experiment 108463 PARAMETER Experiment Name: At_Germinating_Seeds_cDNA_P Parameter: Tissue Value: Germinating Seeds
  misc_feature: MA Experiment ID: 108573 Result: Down-regulated in Transcription
  misc_feature: MA Experiment 108573 PARAMETER Experiment Name: At_Drought_cDNA_P Parameter: Timepoint (hr) Value: 6
  misc_feature: MA Experiment 108573 PARAMETER Experiment Name: At_Drought_cDNA_P Parameter: Tissue Value: Aerial
  misc_feature: MA Experiment 108573 PARAMETER Experiment Name: At_Drought_cDNA_P Parameter: Treatment Value: Drought vs. No Drought
  misc_feature: MA Experiment ID: 108595 Result: Down-regulated in Transcription
  misc_feature: MA Experiment 108595 PARAMETER Experiment Name: At_Ler-pi_Ovule_cDNA_P Parameter: Plant Line Value: null
  misc_feature: MA Experiment ID: 20000224 Result: Up-regulated in Transcription
  misc_feature: MA Experiment ID: 20000227 Result: Up-regulated in Transcription
  misc_feature: MA Experiment 20000227 PARAMETER Experiment Name: At_Root-Tips-vs-Tops_P Parameter: Tissue Value: Root Tips vs. Root Tops
  misc_feature: MA Experiment ID: 20000286 Result: Up-regulated in Transcription
  misc_feature: MA Experiment 20000286 PARAMETER Experiment Name: At_Open_Flower_P Parameter: Age (day) Value: 21
  misc_feature: MA Experiment 20000286 PARAMETER Experiment Name: At_Open_Flower_P Parameter: Plant Line Value: WS
  misc_feature: MA Experiment 20000286 PARAMETER Experiment Name: At_Open_Flower_P Parameter: Tissue Value: Half Open vs. Whole Plant
  misc_feature: MA Experiment ID: 20001451 Result: Down-regulated in Transcription
  misc_feature: MA Experiment 20001451 PARAMETER Experiment Name: At_Far-red-induction_P Parameter: Age (day) Value: 7
  misc_feature: MA Experiment 20001451 PARAMETER Experiment Name: At_Far-red-induction_P Parameter: Light Value: Far-red vs. White
  misc_feature: MA Experiment 20001451 PARAMETER Experiment Name: At_Far-red-induction_P Parameter: Organism Value: A. thaliana
  misc_feature: MA Experiment 20001451 PARAMETER Experiment Name: At_Far-red-induction_P Parameter: Plant Line Value: Columbia
  misc_feature: MA Experiment 20001451 PARAMETER Experiment Name: At_Far-red-induction_P Parameter: Timepoint (hr) Value: 24
  misc_feature: MA Experiment 20001451 PARAMETER Experiment Name: At_Far-red-induction_P Parameter: Tissue Value: Whole Plant
  misc_feature: MA Experiment ID: 20001557 Result: Up-regulated in Transcription
  misc_feature: MA Experiment 20001557 PARAMETER Experiment Name: At_Drought_Soil_Dry_P Parameter: Age (day) Value: 27
  misc_feature: MA Experiment 20001557 PARAMETER Experiment Name: At_Drought_Soil_Dry_P Parameter: Organism Value: A. thaliana
  misc_feature: MA Experiment 20001557 PARAMETER Experiment Name: At_Drought_Soil_Dry_P Parameter: Plant Line Value: WS
  misc_feature: MA Experiment 20001557 PARAMETER Experiment Name: At_Drought_Soil_Dry_P Parameter: Post Timepoint (hr) Value: 3
  misc_feature: MA Experiment 20001557 PARAMETER Experiment Name: At_Drought_Soil_Dry_P Parameter: Post-Treatment Value: Re-Water vs. No Drought
  misc_feature: MA Experiment 20001557 PARAMETER Experiment Name: At_Drought_Soil_Dry_P Parameter: Timepoint (day) Value: 13
  misc_feature: MA Experiment 20001557 PARAMETER Experiment Name: At_Drought_Soil_Dry_P Parameter: Treatment Value: Drought vs. No Drought
  misc_feature: MA Experiment ID: 20001558 Result: Up-regulated in Transcription
  misc_feature: MA Experiment 20001558 PARAMETER Experiment Name: At_Drought_Soil_Dry_P Parameter: Age (day) Value: 27
  misc_feature: MA Experiment 20001558 PARAMETER Experiment Name: At_Drought_Soil_Dry_P Parameter: Organism Value: A. thaliana
  misc_feature: MA Experiment 20001558 PARAMETER Experiment Name: At_Drought_Soil_Dry_P Parameter: Plant Line Value: WS
  misc_feature: MA Experiment 20001558 PARAMETER Experiment Name: At_Drought_Soil_Dry_P Parameter: Post Timepoint (hr) Value: 6
  misc_feature: MA Experiment 20001558 PARAMETER Experiment Name: At_Drought_Soil_Dry_P Parameter: Post-Treatment Value: Re-Water vs. No Drought
  misc_feature: MA Experiment 20001558 PARAMETER Experiment Name: At_Drought_Soil_Dry_P Parameter: Timepoint (day) Value: 13
  misc_feature: MA Experiment 20001558 PARAMETER Experiment Name: At_Drought_Soil_Dry_P Parameter: Treatment Value: Drought vs. No Drought
aaatctctgatccgccatgagaggagctctcttgagaaatgcatctctctgcgctcgcagaatcattctttctcctcgtataacccatcagatctcccccaatgttccctttctcgctccaatcgccgctcctgctgctcccaagttcagatttttctcctccgaatccggtgagaactcgactacggcccctgagtcttcgccgactgattcacccgagaagaaagatctcgttgtagaagatgtaagcaacaaagagcttaaaagccgtatagagaagtatttcaatgagggtaatgaagatgctttacccggagttattgaagcacttctacagagaagacttgtagacaaacacgcagagactgatgatgaattgttggaaaaaatcgagtctctacctttcaaagatgatgtcaaggatgaagattttgaatccgatttcgaggaagcacattctactgacgaagaacttgaggatttgtacaattctcccgagtatgtagctgaaaagatgaggaagaatgagtttttcaacatggatgataagaagtgggatcacatgattagagaaggtatccaacatgggtgtcttactgatactaaagaatgcgaggagattcttgaggatatgctcaaatgggaccagcttcttcctgatgacttgaagaaaaaggttgaagcaaagtttaatgagcttggagatatgtgtgaaagaggtgaaattgaggctgaagcagcttatgagctttttaaggaatttgaagatgagatggtaattcagtatggggatcagatggaagctgagggtcctccccaatttggtgaaacagatgcttccgataggaatactgacttggatgatccccctggtaaaggcccaatcctcaggtggcaatcaaggatagtttttgctcctggaggtgatgcgtggcatccaaagaacaggaaagttaaaatgtctgttacagtgaaagagcttgggctctcaaagcatcaggctaaaaggctaagggaacttgtagggaaaagataccattcggggaaagacgagcttacaatcaccagcgagaggtttgaacaccgagaggaaaacaggaaagactgcttaagaactctttacgggttgatagaagaagctgggaaagccaacaagatcgctgaagacataagaacttcatatgtaaaacaaagactccgtgccaatccagcttttatgcagaaactacaagccaagatcataaggtctaaagaatcagatgccatcaacgcttgaacaaaacttttcccgatccatgaagaatctttgatggtaactcctatcttagtttggtttgcttgttgtatctcatgaagacatgaaccttggctgtgctgttggtgtctattagagactagttaacgttttctcagaattatgaatctctcctaaagttaaggtttcagatatgtttacgggttcagaatgaaagtaaccaaaggaaagaattggtacaatttttgtttgggttttgtatcagatgtctttctaatttttaaagaaattcaatcagtaagataagaaatggaaactaaataaattattgcttc

SEQ ID NO: 77487 - protein, 419 aa, Arabidopsis thaliana; identical to SEQ ID NO: 28427
  peptide (1)..(419): Ceres Seq. ID no. 12576638
  misc_feature (1)..(419): Homolog of NCBI NO: 18401816 NR Description: expressed protein; protein id: At3g18240.1, by cDNA: gi_11908119, supported by cDNA: gi_13194809, supported cDNA: gi_13265398 [Arabidopsis thaliana]
  misc_feature (1)..(419): Homolog of NCBI NO: 18415698 NR Description: putative protein; protein id: At4g21460.1,
  misc_feature (26)..(419): Homolog of NCBI NO: 7485722 NR Description: hypothetical protein F18E5.80 - Arabidopsis >gi|3080390|emb|CAA18710.1| putative protein [Arabidopsis >gi|7268943|emb|CAB81253.1| putative protein [Arabidopsis
  misc_feature (1)..(154): Homolog of NCBI NO: 15219546 NR Description: hypothetical protein; protein id: At1g73770.1

SEQ ID NO: 77488 - protein, 253 aa, Arabidopsis thaliana; identical to SEQ ID NO: 28428
  peptide (1)..(253): Ceres Seq. ID no. 12576639
  misc_feature (1)..(253): Homolog of NCBI NO: 18401816 NR Description: expressed protein; protein id: At3g18240.1, by cDNA: gi_11908119, supported by cDNA: gi_13194809, supported cDNA: gi_13265398 [Arabidopsis thaliana]
  misc_feature (1)..(253): Homolog of NCBI NO: 18415698 NR Description: putative protein; protein id: At4g21460.1,
  misc_feature (1)..(253): Homolog of NCBI NO: 7485722 NR Description: hypothetical protein F18E5.80 - Arabidopsis >gi|3080390|emb|CAA18710.1| putative protein [Arabidopsis >gi|7268943|emb|CAB81253.1| putative protein [Arabidopsis

SEQ ID NO: 77489 - protein, 245 aa, Arabidopsis thaliana; identical to SEQ ID NO: 28429
  peptide (1)..(245): Ceres Seq. ID no. 12576640
  misc_feature (1)..(245): Homolog of NCBI NO: 18401816 NR Description: expressed protein; protein id: At3g18240.1, by cDNA: gi_11908119, supported by cDNA: gi_13194809, supported cDNA: gi_13265398 [Arabidopsis thaliana]
  misc_feature (1)..(245): Homolog of NCBI NO: 18415698 NR Description: putative protein; protein id: At4g21460.1,
  misc_feature (1)..(245): Homolog of NCBI NO: 7485722 NR Description: hypothetical protein F18E5.80 - Arabidopsis >gi|3080390|emb|CAA18710.1| putative protein [Arabidopsis >gi|7268943|emb|CAB81253.1| putative protein [Arabidopsis

SEQ ID NO: 77490 - DNA, 1826 bp, Arabidopsis thaliana
  misc_feature (1)..(1826): Ceres Seq. ID no. 12576641
  misc_feature: MA Experiment ID: 20000171 Result: Down-regulated in Transcription
  misc_feature: MA Experiment 20000171 PARAMETER Experiment Name: At_42deg_Heat_P Parameter: Age (day) Value: 14
  misc_feature: MA Experiment 20000171 PARAMETER Experiment Name: At_42deg_Heat_P Parameter: Organism Value: A. thaliana
  misc_feature: MA Experiment 20000171 PARAMETER Experiment Name: At_42deg_Heat_P Parameter: Plant Line Value: WS
  misc_feature: MA Experiment 20000171 PARAMETER Experiment Name: At_42deg_Heat_P Parameter: Temperature (deg C) Value: 42 vs. 22
  misc_feature: MA Experiment 20000171 PARAMETER Experiment Name: At_42deg_Heat_P Parameter: Timepoint (hr) Value: 1
  misc_feature: MA Experiment 20000171 PARAMETER Experiment Name: At_42deg_Heat_P Parameter: Tissue Value: Aerial
  misc_feature: MA Experiment ID: 20000173 Result: Down-regulated in Transcription
  misc_feature: MA Experiment 20000173 PARAMETER Experiment Name: At_42deg_Heat_P Parameter: Age (day) Value: 14
  misc_feature: MA Experiment 20000173 PARAMETER Experiment Name: At_42deg_Heat_P Parameter: Organism Value: A. thaliana
  misc_feature: MA Experiment 20000173 PARAMETER Experiment Name: At_42deg_Heat_P Parameter: Plant Line Value: WS
  misc_feature: MA Experiment 20000173 PARAMETER Experiment Name: At_42deg_Heat_P Parameter: Temperature (deg C) Value: 42 vs. 22
  misc_feature: MA Experiment 20000173 PARAMETER Experiment Name: At_42deg_Heat_P Parameter: Timepoint (hr) Value: 6
  misc_feature: MA Experiment 20000173 PARAMETER Experiment Name: At_42deg_Heat_P Parameter: Tissue Value: Aerial
  misc_feature: MA Experiment ID: 20000180 Result: Up-regulated in Transcription
  misc_feature: MA Experiment 20000180 PARAMETER Experiment Name: At_Germinating_Seeds_P Parameter: Age (hr) Value: 24 vs. 0
  misc_feature: MA Experiment 20000180 PARAMETER Experiment Name: At_Germinating_Seeds_P Parameter: Tissue Value: Germinating Seeds
  misc_feature: MA Experiment ID: 20000184 Result: Down-regulated in Transcription
  misc_feature: MA Experiment 20000184 PARAMETER Experiment Name: At_Shoots__P Parameter: Age (day) Value: 7
  misc_feature: MA Experiment 20000184 PARAMETER Experiment Name: At_Shoots__P Parameter: Tissue Value: Shoots vs. Whole Plant
  misc_feature: MA Experiment ID: 20000185 Result: Down-regulated in Transcription
  misc_feature: MA Experiment 20000185 PARAMETER Experiment Name: At_Roots__P Parameter: Age (day) Value: 7 vs. 21
  misc_feature: MA Experiment 20000185 PARAMETER Experiment Name: At_Roots__P Parameter: Organism Value: A. thaliana
  misc_feature: MA Experiment 20000185 PARAMETER Experiment Name: At_Roots__P Parameter: Tissue Value: Roots vs. Whole Plant
  misc_feature: MA Experiment ID: 20000227 Result: Down-regulated in Transcription
  misc_feature: MA Experiment 20000227 PARAMETER Experiment Name: At_Root-Tips-vs-Tops_P Parameter: Tissue Value: Root Tips vs. Root Tops
  misc_feature: MA Experiment ID: 20000439 Result: Down-regulated in Transcription
  misc_feature: MA Experiment 20000439 PARAMETER Experiment Name: At_Roots__P Parameter: Age (day) Value: 14 vs. 21
  misc_feature: MA Experiment 20000439 PARAMETER Experiment Name: At_Roots__P Parameter: Organism Value: A. thaliana
  misc_feature: MA Experiment 20000439 PARAMETER Experiment Name: At_Roots__P Parameter: Tissue Value: Roots vs. Whole Plant
  misc_feature: MA Experiment ID: 20000495 Result: Up-regulated in Transcription
  misc_feature: MA Experiment 20000495 PARAMETER Experiment Name: At_Guard_Cells_P Parameter: Harvest Date Value: 8/2/2002
  misc_feature: MA Experiment 20000495 PARAMETER Experiment Name: At_Guard_Cells_P Parameter: Organism Value: A. thaliana
  misc_feature: MA Experiment 20000495 PARAMETER Experiment Name: At_Guard_Cells_P Parameter: Tissue Value: Guard Cells vs. Leaves
  misc_feature: MA Experiment ID: 20000527 Result: Down-regulated in Transcription
  misc_feature: MA Experiment 20000527 PARAMETER Experiment Name: At_10percent_PEG_P Parameter: Age (day) Value: 20
  misc_feature: MA Experiment 20000527 PARAMETER Experiment Name: At_10percent_PEG_P Parameter: Organism Value: A. thaliana
  misc_feature: MA Experiment 20000527 PARAMETER Experiment Name: At_10percent_PEG_P Parameter: Plant Line Value: WS
  misc_feature: MA Experiment 20000527 PARAMETER Experiment Name: At_10percent_PEG_P Parameter: Timepoint (day) Value: 20
  misc_feature: MA Experiment 20000527 PARAMETER Experiment Name: At_10percent_PEG_P Parameter: Tissue Value: Whole Plant
  misc_feature: MA Experiment 20000527 PARAMETER Experiment Name: At_10percent_PEG_P Parameter: Treatment Value: 10percent PEG vs. No Treatment
  misc_feature: MA Experiment ID: 20001247 Result: Down-regulated in Transcription
  misc_feature: MA Experiment 20001247 PARAMETER Experiment Name: At_Far-red-induction_P Parameter: Age (day) Value: 7
  misc_feature: MA Experiment 20001247 PARAMETER Experiment Name: At_Far-red-induction_P Parameter: Light Value: Far-red vs. White
  misc_feature: MA Experiment 20001247 PARAMETER Experiment Name: At_Far-red-induction_P Parameter: Organism Value: A. thaliana
  misc_feature: MA Experiment 20001247 PARAMETER Experiment Name: At_Far-red-induction_P Parameter: Plant Line Value: Columbia
  misc_feature: MA Experiment 20001247 PARAMETER Experiment Name: At_Far-red-induction_P Parameter: Timepoint (hr) Value: 1
  misc_feature: MA Experiment 20001247 PARAMETER Experiment Name: At_Far-red-induction_P Parameter: Tissue Value: Whole Plant
  misc_feature: MA Experiment ID: 20001556 Result: Down-regulated in Transcription
  misc_feature: MA Experiment 20001556 PARAMETER Experiment Name: At_Drought_Soil_Dry_P Parameter: Age (day) Value: 26
  misc_feature: MA Experiment 20001556 PARAMETER Experiment Name: At_Drought_Soil_Dry_P Parameter: Organism Value: A. thaliana
  misc_feature: MA Experiment 20001556 PARAMETER Experiment Name: At_Drought_Soil_Dry_P Parameter: Plant Line Value: WS
  misc_feature: MA Experiment 20001556 PARAMETER Experiment Name: At_Drought_Soil_Dry_P Parameter: Post Timepoint (hr) Value: None
  misc_feature: MA Experiment 20001556 PARAMETER Experiment Name: At_Drought_Soil_Dry_P Parameter: Post-Treatment Value: None
  misc_feature: MA Experiment 20001556 PARAMETER Experiment Name: At_Drought_Soil_Dry_P Parameter: Timepoint (day) Value: 12
  misc_feature: MA Experiment 20001556 PARAMETER Experiment Name: At_Drought_Soil_Dry_P Parameter: Treatment Value: Drought vs. No Drought
  misc_feature: MA Experiment ID: 20001558 Result: Down-regulated in Transcription
  misc_feature: MA Experiment 20001558 PARAMETER Experiment Name: At_Drought_Soil_Dry_P Parameter: Age (day) Value: 27
  misc_feature: MA Experiment 20001558 PARAMETER Experiment Name: At_Drought_Soil_Dry_P Parameter: Organism Value: A. thaliana
  misc_feature: MA Experiment 20001558 PARAMETER Experiment Name: At_Drought_Soil_Dry_P Parameter: Plant Line Value: WS
  misc_feature: MA Experiment 20001558 PARAMETER Experiment Name: At_Drought_Soil_Dry_P Parameter: Post Timepoint (hr) Value: 6
  misc_feature: MA Experiment 20001558 PARAMETER Experiment Name: At_Drought_Soil_Dry_P Parameter: Post-Treatment Value: Re-Water vs. No Drought
  misc_feature: MA Experiment 20001558 PARAMETER Experiment Name: At_Drought_Soil_Dry_P Parameter: Timepoint (day) Value: 13
  misc_feature: MA Experiment 20001558 PARAMETER Experiment Name: At_Drought_Soil_Dry_P Parameter: Treatment Value: Drought vs. No Drought
  misc_feature: MA Experiment ID: 20001559 Result: Down-regulated in Transcription
  misc_feature: MA Experiment 20001559 PARAMETER Experiment Name: At_Drought_Soil_Dry_P Parameter: Age (day) Value: 28
  misc_feature: MA Experiment 20001559 PARAMETER Experiment Name: At_Drought_Soil_Dry_P Parameter: Organism Value: A. thaliana
  misc_feature: MA Experiment 20001559 PARAMETER Experiment Name: At_Drought_Soil_Dry_P Parameter: Plant Line Value: WS
  misc_feature: MA Experiment 20001559 PARAMETER Experiment Name: At_Drought_Soil_Dry_P Parameter: Post Timepoint (hr) Value: 29
  misc_feature: MA Experiment 20001559 PARAMETER Experiment Name: At_Drought_Soil_Dry_P Parameter: Post-Treatment Value: Re-Water vs. No Drought
  misc_feature: MA Experiment 20001559 PARAMETER Experiment Name: At_Drought_Soil_Dry_P Parameter: Timepoint (day) Value: 14
  misc_feature: MA Experiment 20001559 PARAMETER Experiment Name: At_Drought_Soil_Dry_P Parameter: Treatment Value: Drought vs. No Drought
  misc_feature: MA Experiment ID: 20001910 Result: Down-regulated in Transcription
  misc_feature: MA Experiment 20001910 PARAMETER Experiment Name: At_Drought_Reproduction_P Parameter: Age (day) Value: 37
  misc_feature: MA Experiment 20001910 PARAMETER Experiment Name: At_Drought_Reproduction_P Parameter: Organism Value: A. thaliana
  misc_feature: MA Experiment 20001910 PARAMETER Experiment Name: At_Drought_Reproduction_P Parameter: Plant Line Value: WS
  misc_feature: MA Experiment 20001910 PARAMETER Experiment Name: At_Drought_Reproduction_P Parameter: Timepoint (day) Value: 7
  misc_feature: MA Experiment 20001910 PARAMETER Experiment Name: At_Drought_Reproduction_P Parameter: Tissue Value: Flowers
  misc_feature: MA Experiment 20001910 PARAMETER Experiment Name: At_Drought_Reproduction_P Parameter: Treatment Value: Drought vs. No Drought
aaaccaaacggtcaaacctcactcaccatgagacaccttagctcacctccatggcctctcctccttctcctcctcctctcttctttcacctccggcgaatcctctctgtccgcagaaaaaaacaaattgcacaccggtggtctcagtagacagagttttcctaaaggattcgtgtttggaaccgccacgtcagcttatcaagtcgaaggcgagactcatcaagacggtcgtggcccaagcatttgggatgccttcgtcaagattcctgggaagatcgccaagaatgccacggctgagataacagtggaccagtatcaccgttacaaggaagatgtggatttgatgaagaaactgaacttcgatgcttacagattttccatttcatggtccaggatattccctgagggaagtggtaaagtcaactggaaaggagttgcttattacaatagattgattgattacatggttcaaaaagggattacaccttatgctaatctgtaccactacgatcttccattggctttggaaaacaagtataaaggcttgcttggtagacaagtagtgtaagcaccaatatgcaaagctcttttatgcattcctcaaaagttacaaactttgataatgcaaattttacaggaaagattttgcggattacgctgagttttgttacaagacatttggtgatagagtgaaaaattggatgacgttcaacgagccgcgtgtggtagctgctttaggttatgataatggtattttcgcaccgggtagatgctcaaaagcatttggaaattgcactgaaggaaactccgcgacagagccatacatagttactcatcaccttatcttggcccacgcagcagcagtccaaagataccgcaaatattaccaagcgaaacaaaagggaagggttgggatacttttagatttcgtttggtatgagccgcttactagaagtaaagcagataatcttgcagctcaaagagcaagagacttccatatcggatggtttattcacccattagtatatggagagtatccaaagacaatgcagaacattgtgaaagagaggcttccaaagttcacggagaaagaagtgaaaatggtgaaaggttccatagattttgtgggaataaaccaatacacgacttattacatgtccgaaccacatcccaccaccaaacctaaggatttgggttatcaacaagattggaatgtggaatttggctttgctaagttggggaagccaataggtccaagggcttactcgtcttggttatacaacgtaccatggggaatgtacaaggccttgatgtatatgaaggaacgttacggcaaccctactatgatcctctctgaaaacggtatggatgacccgggaaacgttactctagctcaaggactacatgacaccacgagaatcaagtattacaaagattacttaaccaaccttaagaaagctagggatgatggagccaatgtggttggatattttgcgtggtcattgctagataatttcgaatggttatcaggatatacttcaaggtttgggatcgtttatgttgattacaaaacattgaagaggtaccccaagatgtctgctcagtggtttaagcaacttctgaaacgaaacaacaaatgatctcaatgtatcaatgccgggtggatttagtttttaaaaaggttggaattgatgattgaagaaataatggggccggtttagtcactttgtttattataaggggggtgaattgtaacttgaactctctccttcttcagttctttgacttttcaacacaaataaaataaaagtttaagaataaatttgc

SEQ ID NO: 77491 - protein, 312 aa, Arabidopsis thaliana
  peptide (1)..(312): Ceres Seq. ID no. 12576642
  misc_feature (1)..(312): Pfam Name: Glycosyl hydrolase family 1 Pfam Description: Glycosyl hydrolase family 1
  misc_feature (1)..(312): Homolog of NCBI NO: 15229584 NR Description: glycosyl hydrolase family 1; protein id: supported by cDNA: 11984. [Arabidopsis thaliana]
  misc_feature (1)..(312): Homolog of NCBI NO: 9294062 NR Description: beta-glucosidase [Arabidopsis thaliana]
  misc_feature (1)..(312): Homolog of NCBI NO: 22331147 NR Description: glycosyl hydrolase family 1; protein id:
  misc_feature (1)..(309): Homolog of NCBI NO: 17226270 NR Description: beta-mannosidase enzyme [Lycopersicon esculentum]
  misc_feature (1)..(312): Homolog of NCBI NO: 1362162 NR Description: beta-glucosidase BGQ60 precursor - barley
  misc_feature (1)..(310): Homolog of NCBI NO: 34899014 NR Description: putative non-cyanogenic beta-glucosidase
  misc_feature (1)..(308): Homolog of NCBI NO: 18875458 NR Description: beta-glucosidase [Oryza sativa]
  misc_feature (1)..(308): Homolog of NCBI NO: 22658440 NR Description: beta-glucosidase [Oryza sativa (japonica
  misc_feature (1)..(179): Homolog of NCBI NO: 12746303 NR Description: beta-glucosidase [Musa acuminata]
  misc_feature (196)..(312): Homolog of NCBI NO: 12746303 NR Description: beta-glucosidase [Musa acuminata]
MTFNEPRVVAALGYDNGIFAPGRCSKAFGNCTEGNSATEPYIVTHHLILAHAAAVQRYRKYYQAKQKGRVGILLDFVWYEPLTRSKADNLAAQRARDFHIGWFIHPLVYGEYPKTMQNIVKERLPKFTEKEVKMVKGSIDFVGINQYTTYYMSEPHPTTKPKDLGYQQDWNVEFGFAKLGKPIGPRAYSSWLYNVPWGMYKALMYMKERYGNPTMILSENGMDDPGNVTLAQGLHDTTRIKYYKDYLTNLKKARDDGANVVGYFAWSLLDNFEWLSGYTSRFGIVYVDYKTLKRYPKMSAQWFKQLLKRNNK

SEQ ID NO: 77492 - protein, 197 aa, Arabidopsis thaliana
  peptide (1)..(197): Ceres Seq. ID no. 12576643
  misc_feature (1)..(197): Pfam Name: Glycosyl hydrolase family 1 Pfam Description: Glycosyl hydrolase family 1
  misc_feature (1)..(197): Homolog of NCBI NO: 15229584 NR Description: glycosyl hydrolase family 1; protein id: supported by cDNA: 11984. [Arabidopsis thaliana]
  misc_feature (1)..(197): Homolog of NCBI NO: 9294062 NR Description: beta-glucosidase [Arabidopsis thaliana]
  misc_feature (1)..(197): Homolog of NCBI NO: 22331147 NR Description: glycosyl hydrolase family 1; protein id:
  misc_feature (1)..(194): Homolog of NCBI NO: 17226270 NR Description: beta-mannosidase enzyme [Lycopersicon esculentum]
  misc_feature (1)..(197): Homolog of NCBI NO: 1362162 NR Description: beta-glucosidase BGQ60 precursor - barley
  misc_feature (1)..(195): Homolog of NCBI NO: 34899014 NR Description: putative non-cyanogenic beta-glucosidase
  misc_feature (1)..(193): Homolog of NCBI NO: 18875458 NR Description: beta-glucosidase [Oryza sativa]
  misc_feature (1)..(193): Homolog of NCBI NO: 22658440 NR Description: beta-glucosidase [Oryza sativa (japonica
  misc_feature (1)..(64): Homolog of NCBI NO: 12746303 NR Description: beta-glucosidase [Musa acuminata]
  misc_feature (81)..(197): Homolog of NCBI NO: 12746303 NR Description: beta-glucosidase [Musa acuminata]
MQNIVKERLPKFTEKEVKMVKGSIDFVGINQYTTYYMSEPHPTTKPKDLGYQQDWNVEFGFAKLGKPIGPRAYSSWLYNVPWGMYKALMYMKERYGNPTMILSENGMDDPGNVTLAQGLHDTTRIKYYKDYLTNLKKARDDGANVVGYFAWSLLDNFEWLSGYTSRFGIVYVDYKTLKRYPKMSAQWFKQLLKRNNK

SEQ ID NO: 77493 - protein, 188 aa, Arabidopsis thaliana
  peptide (1)..(188): Ceres Seq. ID no. 12576644
  misc_feature (49)..(188): Pfam Name: Glycosyl hydrolase family 1 Pfam Description: Glycosyl hydrolase family 1
  misc_feature (10)..(188): Homolog of NCBI NO: 15229584 NR Description: glycosyl hydrolase family 1; protein id: supported by cDNA: 11984. [Arabidopsis thaliana]
  misc_feature (21)..(188): Homolog of NCBI NO: 9294062 NR Description: beta-glucosidase [Arabidopsis thaliana]
  misc_feature (21)..(186): Homolog of NCBI NO: 22331147 NR Description: glycosyl hydrolase family 1; protein id:
  misc_feature (14)..(188): Homolog of NCBI NO: 17226270 NR Description: beta-mannosidase enzyme [Lycopersicon esculentum]
  misc_feature (44)..(188): Homolog of NCBI NO: 1362162 NR Description: beta-glucosidase BGQ60 precursor - barley
  misc_feature (46)..(187): Homolog of NCBI NO: 34899014 NR Description: putative non-cyanogenic beta-glucosidase
  misc_feature (20)..(187): Homolog of NCBI NO: 18875458 NR Description: beta-glucosidase [Oryza sativa]
  misc_feature (24)..(188): Homolog of NCBI NO: 22658440 NR Description: beta-glucosidase [Oryza sativa (japonica
  misc_feature (36)..(188): Homolog of NCBI NO: 12746303 NR Description: beta-glucosidase [Musa acuminata]
  misc_feature (48)..(188): Homolog of NCBI NO: 7435429 NR Description: furostanol glycoside 26-O-beta-glucosidase F26G -
KPNGQTSLTMRHLSSPPWPLLLLLLLSSFTSGESSLSAEKNKLHTGGLSRQSFPKGFVFGTATSAYQVEGETHQDGRGPSIWDAFVKIPGKIAKNATAEITVDQYHRYKEDVDLMKKLNFDAYRFSISWSRIFPEGSGKVNWKGVAYYNRLIDYMVQKGITPYANLYHYDLPLALENKYKGLLGRQVV

SEQ ID NO: 77494 - DNA, 955 bp, Arabidopsis thaliana
  misc_feature (1)..(955): Ceres Seq. ID no. 12576645
  misc_feature: MA Experiment ID: 108434 Result: Up-regulated in Transcription
  misc_feature: MA Experiment 108434 PARAMETER Experiment Name: At_Root_Tips_cDNA_P Parameter: Tissue Value: Root Tips
  misc_feature: MA Experiment ID: 108595 Result: Down-regulated in Transcription
  misc_feature: MA Experiment 108595 PARAMETER Experiment Name: At_Ler-pi_Ovule_cDNA_P Parameter: Plant Line Value: null
  misc_feature: MA Experiment ID: 20000111 Result: Up-regulated in Transcription
  misc_feature: MA Experiment 20000111 PARAMETER Experiment Name: At_42deg_Heat_cDNA_P Parameter: Temperature (deg C) Value: 42 vs. 22
  misc_feature: MA Experiment 20000111 PARAMETER Experiment Name: At_42deg_Heat_cDNA_P Parameter: Timepoint (hr) Value: 6
  misc_feature: MA Experiment 20000111 PARAMETER Experiment Name: At_42deg_Heat_cDNA_P Parameter: Tissue Value: Aerial
  misc_feature: MA Experiment ID: 20000173 Result: Up-regulated in Transcription
  misc_feature: MA Experiment 20000173 PARAMETER Experiment Name: At_42deg_Heat_P Parameter: Age (day) Value: 14
  misc_feature: MA Experiment 20000173 PARAMETER Experiment Name: At_42deg_Heat_P Parameter: Organism Value: A. thaliana
  misc_feature: MA Experiment 20000173 PARAMETER Experiment Name: At_42deg_Heat_P Parameter: Plant Line Value: WS
  misc_feature: MA Experiment 20000173 PARAMETER Experiment Name: At_42deg_Heat_P Parameter: Temperature (deg C) Value: 42 vs. 22
  misc_feature: MA Experiment 20000173 PARAMETER Experiment Name: At_42deg_Heat_P Parameter: Timepoint (hr) Value: 6
  misc_feature: MA Experiment 20000173 PARAMETER Experiment Name: At_42deg_Heat_P Parameter: Tissue Value: Aerial
  misc_feature: MA Experiment ID: 20000184 Result: Up-regulated in Transcription
  misc_feature: MA Experiment 20000184 PARAMETER Experiment Name: At_Shoots__P Parameter: Age (day) Value: 7
  misc_feature: MA Experiment 20000184 PARAMETER Experiment Name: At_Shoots__P Parameter: Tissue Value: Shoots vs. Whole Plant
gacgtataatttccccaatttctcagagagactcaaaatcaccaccaccaccaaatcgccgccatgtttaaacaagcttctcgtctcctctcccgatctgtcgccgccgcatcttccaaatcggtgacgactcgtgccttttcaacggaacttccatcgacgctcgattccactttcgtcgaggcatggaagaaagtcgcaccgaatatggacccaccgcagactccttctgctttcatgaaacctcgtccttccactccttcttctatcccgacgaagctcaccgtcaattttgtcctcccttacacatctgagcttaccgggaaagaggtcgacatggtcatcattcccgcatcaacaggacaaatgggtgtcttgcccggacacgttccaacaattgctgagctaaaacctggcatcatgtccgtccatgaaggcactgacgtgaagaaatacttcttgagcagtggttttgcattcctccacgcaaattccgtcgctgacataatcgcggtggaagctgtgccgcttgaccacattgaccctagccaagtccaaaagggtttagctgagttccaacagaaacttgcttctgccacaacagatcttgagaaagcagaggcacagattggtgttgaagttcacagtgccatcaacgcagctctctcgggctaaaagaaggtttctttctttatttcttcgaagaaacaaaaaaaaaactaaatcatttggcttttcaagtgattagtgaagtccctttttactactgcaaaggatggaatattgattcttcttgtttaatcgtgttggacttttgtttgaataaatgattttgtttaacgggcacaaaaacccacaaaagtttcttgtgttcatatctctgcacctttgtttttgtgtatgactttgttgtgttgagaaactaagttggaatttctttaaggtttcgtttact

SEQ ID NO: 77495 - protein, 203 aa, Arabidopsis thaliana; identical to SEQ ID NO: 21744
  peptide (1)..(203): Ceres Seq. ID no. 12576646
  misc_feature (72)..(155): Pfam Name: ATP synthase, Delta/Epsilon chain, beta-sandwich domain Pfam Description: ATP synthase, Delta/Epsilon chain,
  misc_feature (1)..(203): Homolog of NCBI NO: 15237998 NR Description: ATP synthase delta chain, mitochondrial precursor protein id: At5g47030.1, supported by cDNA: gi_13430525, by cDNA: gi_15810620, supported by cDNA: gi_1655483 [Arabidopsis
  misc_feature (1)..(203): Homolog of NCBI NO: 2493046 NR Description: ATP synthase delta' chain, mitochondrial precursor
  misc_feature (1)..(203): Homolog of NCBI NO: 34901780 NR Description: putative ATP synthase delta' chain, mitochondrial
  misc_feature (8)..(203): Homolog of NCBI NO: 2493047 NR Description: ATP synthase delta' chain, mitochondrial precursor
  misc_feature (128)..(203): Homolog of NCBI NO: 8272402 NR Description: F1-ATPase [Pyrus pyrifolia]
  misc_feature (73)..(201): Homolog of NCBI NO: 2493050 NR Description: ATP synthase delta chain, mitochondrial precursor
  misc_feature (1)..(98): Homolog of NCBI NO: 34901784 NR Description: ATP synthase delta' chain, mitochondrial
  misc_feature (67)..(202): Homolog of NCBI NO: 2493049 NR Description: ATP synthase delta chain, mitochondrial precursor
  misc_feature (73)..(201): Homolog of NCBI NO: 6320200 NR Description: ATP synthase delta subunit; Atp16p [Saccharomyces
  misc_feature (55)..(192): Homolog of NCBI NO: 40746994 NR Description: hypothetical protein AN0277.2 [Aspergillus

SEQ ID NO: 77496 - protein, 155 aa, Arabidopsis thaliana; identical to SEQ ID NO: 21745
  peptide (1)..(155): Ceres Seq. ID no. 12576647
  misc_feature (24)..(107): Pfam Name: ATP synthase, Delta/Epsilon chain, beta-sandwich domain Pfam Description: ATP synthase, Delta/Epsilon chain,
  misc_feature (1)..(155): Homolog of NCBI NO: 15237998 NR Description: ATP synthase delta chain, mitochondrial precursor protein id: At5g47030.1, supported by cDNA: gi_13430525, by cDNA: gi_15810620, supported by cDNA: gi_1655483 [Arabidopsis
  misc_feature (1)..(155): Homolog of NCBI NO: 2493046 NR Description: ATP synthase delta' chain, mitochondrial precursor
  misc_feature (1)..(155): Homolog of NCBI NO: 34901780 NR Description: putative ATP synthase delta' chain, mitochondrial
  misc_feature (1)..(155): Homolog of NCBI NO: 2493047 NR Description: ATP synthase delta' chain, mitochondrial precursor
  misc_feature (80)..(155): Homolog of NCBI NO: 8272402 NR Description: F1-ATPase [Pyrus pyrifolia]
  misc_feature (25)..(153): Homolog of NCBI NO: 2493050 NR Description: ATP synthase delta chain, mitochondrial precursor
  misc_feature (1)..(50): Homolog of NCBI NO: 34901784 NR Description: ATP synthase delta' chain, mitochondrial
  misc_feature (19)..(154): Homolog of NCBI NO: 2493049 NR Description: ATP synthase delta chain, mitochondrial precursor
  misc_feature (25)..(153): Homolog of NCBI NO: 6320200 NR Description: ATP synthase delta subunit; Atp16p [Saccharomyces
  misc_feature (7)..(144): Homolog of NCBI NO: 40746994 NR Description: hypothetical protein AN0277.2 [Aspergillus

SEQ ID NO: 77497 - protein, 145 aa, Arabidopsis thaliana; identical to SEQ ID NO: 21746
  peptide (1)..(145): Ceres Seq. ID no. 12576648
  misc_feature (14)..(97): Pfam Name: ATP synthase, Delta/Epsilon chain, beta-sandwich domain Pfam Description: ATP synthase, Delta/Epsilon chain,
  misc_feature (1)..(145): Homolog of NCBI NO: 15237998 NR Description: ATP synthase delta chain, mitochondrial precursor protein id: At5g47030.1, supported by cDNA: gi_13430525, by cDNA: gi_15810620, supported by cDNA: gi_1655483 [Arabidopsis
  misc_feature (1)..(145): Homolog of NCBI NO: 2493046 NR Description: ATP synthase delta' chain, mitochondrial precursor
  misc_feature (1)..(145): Homolog of NCBI NO: 34901780 NR Description: putative ATP synthase delta' chain, mitochondrial
  misc_feature (1)..(145): Homolog of NCBI NO: 2493047 NR Description: ATP synthase delta' chain, mitochondrial precursor
  misc_feature (70)..(145): Homolog of NCBI NO: 8272402 NR Description: F1-ATPase [Pyrus pyrifolia]
  misc_feature (15)..(143): Homolog of NCBI NO: 2493050 NR Description: ATP synthase delta chain, mitochondrial precursor
  misc_feature (1)..(40): Homolog of NCBI NO: 34901784 NR Description: ATP synthase delta' chain, mitochondrial
  misc_feature (9)..(144): Homolog of NCBI NO: 2493049 NR Description: ATP synthase delta chain, mitochondrial precursor
  misc_feature (15)..(143): Homolog of NCBI NO: 6320200 NR Description: ATP synthase delta subunit; Atp16p [Saccharomyces
  misc_feature (1)..(134): Homolog of NCBI NO: 40746994 NR Description: hypothetical protein AN0277.2 [Aspergillus

SEQ ID NO: 77498 - DNA, 1554 bp, Arabidopsis thaliana
  misc_feature (1)..(1554): Ceres Seq. ID no. 12576649
  misc_feature: MA Experiment ID: 108434 Result: Up-regulated in Transcription
  misc_feature: MA Experiment 108434 PARAMETER Experiment Name: At_Root_Tips_cDNA_P Parameter: Tissue Value: Root Tips
  misc_feature: MA Experiment ID: 108435 Result: Up-regulated in Transcription
  misc_feature: MA Experiment 108435 PARAMETER Experiment Name: At_stm_Mutants_cDNA_P Parameter: Plant Line Value: wt Landsburg vs stm
  misc_feature: MA Experiment 108435 PARAMETER Experiment Name: At_stm_Mutants_cDNA_P Parameter: Tissue Value: Shoot Apical Meristem Region
  misc_feature: MA Experiment ID: 108461 Result: Down-regulated in Transcription
  misc_feature: MA Experiment 108461 PARAMETER Experiment Name: At_Germinating_Seeds_cDNA_P Parameter: Age (day) Value: 1 vs. 0
  misc_feature: MA Experiment 108461 PARAMETER Experiment Name: At_Germinating_Seeds_cDNA_P Parameter: Tissue Value: Germinating Seeds
  misc_feature: MA Experiment ID: 108462 Result: Down-regulated in Transcription
  misc_feature: MA Experiment 108462 PARAMETER Experiment Name: At_Germinating_Seeds_cDNA_P Parameter: Age (day) Value: 2 vs. 0
  misc_feature: MA Experiment 108462 PARAMETER Experiment Name: At_Germinating_Seeds_cDNA_P Parameter: Tissue Value: Germinating Seeds
  misc_feature: MA Experiment ID: 108463 Result: Down-regulated in Transcription
  misc_feature: MA Experiment 108463 PARAMETER Experiment Name: At_Germinating_Seeds_cDNA_P Parameter: Age (day) Value: 3 vs. 0
  misc_feature: MA Experiment 108463 PARAMETER Experiment Name: At_Germinating_Seeds_cDNA_P Parameter: Tissue Value: Germinating Seeds
  misc_feature: MA Experiment ID: 108464 Result: Down-regulated in Transcription
  misc_feature: MA Experiment 108464 PARAMETER Experiment Name: At_Germinating_Seeds_cDNA_P Parameter: Age (day) Value: 4 vs. 0
  misc_feature: MA Experiment 108464 PARAMETER Experiment Name: At_Germinating_Seeds_cDNA_P Parameter: Tissue Value: Germinating Seeds
  misc_feature: MA Experiment ID: 108572 Result: Down-regulated in Transcription
  misc_feature: MA Experiment 108572 PARAMETER Experiment Name: At_Drought_cDNA_P Parameter: Timepoint (hr) Value: 1
  misc_feature: MA Experiment 108572 PARAMETER Experiment Name: At_Drought_cDNA_P Parameter: Tissue Value: Aerial
  misc_feature: MA Experiment 108572 PARAMETER Experiment Name: At_Drought_cDNA_P Parameter: Treatment Value: Drought vs. No Drought
  misc_feature: MA Experiment ID: 108573 Result: Down-regulated in Transcription
  misc_feature: MA Experiment 108573 PARAMETER Experiment Name: At_Drought_cDNA_P Parameter: Timepoint (hr) Value: 6
  misc_feature: MA Experiment 108573 PARAMETER Experiment Name: At_Drought_cDNA_P Parameter: Tissue Value: Aerial
  misc_feature: MA Experiment 108573 PARAMETER Experiment Name: At_Drought_cDNA_P Parameter: Treatment Value: Drought vs. No Drought
  misc_feature: MA Experiment ID: 108579 Result: Up-regulated in Transcription
  misc_feature: MA Experiment 108579 PARAMETER Experiment Name: At_4deg_Cold_cDNA_P Parameter: Temperature (deg C) Value: 4 vs. 22
  misc_feature: MA Experiment 108579 PARAMETER Experiment Name: At_4deg_Cold_cDNA_P Parameter: Timepoint (hr) Value: 6
  misc_feature: MA Experiment 108579 PARAMETER Experiment Name: At_4deg_Cold_cDNA_P Parameter: Tissue Value: Aerial
  misc_feature: MA Experiment ID: 20000089 Result: Up-regulated in Transcription
  misc_feature: MA Experiment ID: 20000090 Result: Up-regulated in Transcription
  misc_feature: MA Experiment ID: 20000180 Result: Down-regulated in Transcription
  misc_feature: MA Experiment 20000180 PARAMETER Experiment Name: At_Germinating_Seeds_P Parameter: Age (hr) Value: 24 vs. 0
  misc_feature: MA Experiment 20000180 PARAMETER Experiment Name: At_Germinating_Seeds_P Parameter: Tissue Value: Germinating Seeds
  misc_feature: MA Experiment ID: 20000184 Result: Down-regulated in Transcription
  misc_feature: MA Experiment 20000184 PARAMETER Experiment Name: At_Shoots__P Parameter: Age (day) Value: 7
  misc_feature: MA Experiment 20000184 PARAMETER Experiment Name: At_Shoots__P Parameter: Tissue Value: Shoots vs. Whole Plant
  misc_feature: MA Experiment ID: 20000224 Result: Up-regulated in Transcription
  misc_feature: MA Experiment ID: 20000438 Result: Down-regulated in Transcription
  misc_feature: MA Experiment 20000438 PARAMETER Experiment Name: At_Shoots__P Parameter: Age (day) Value: 14
  misc_feature: MA Experiment 20000438 PARAMETER Experiment Name: At_Shoots__P Parameter: Tissue Value: Shoots vs. Whole Plant
  misc_feature: MA Experiment ID: 20001557 Result: Up-regulated in Transcription
  misc_feature: MA Experiment 20001557 PARAMETER Experiment Name: At_Drought_Soil_Dry_P Parameter: Age (day) Value: 27
  misc_feature: MA Experiment 20001557 PARAMETER Experiment Name: At_Drought_Soil_Dry_P Parameter: Organism Value: A. thaliana
  misc_feature: MA Experiment 20001557 PARAMETER Experiment Name: At_Drought_Soil_Dry_P Parameter: Plant Line Value: WS
  misc_feature: MA Experiment 20001557 PARAMETER Experiment Name: At_Drought_Soil_Dry_P Parameter: Post Timepoint (hr) Value: 3
  misc_feature: MA Experiment 20001557 PARAMETER Experiment Name: At_Drought_Soil_Dry_P Parameter: Post-Treatment Value: Re-Water vs. No Drought
  misc_feature: MA Experiment 20001557 PARAMETER Experiment Name: At_Drought_Soil_Dry_P Parameter: Timepoint (day) Value: 13
  misc_feature: MA Experiment 20001557 PARAMETER Experiment Name: At_Drought_Soil_Dry_P Parameter: Treatment Value: Drought vs. No Drought
  misc_feature: MA Experiment ID: 20001558 Result: Up-regulated in Transcription
  misc_feature: MA Experiment 20001558 PARAMETER Experiment Name: At_Drought_Soil_Dry_P Parameter: Age (day) Value: 27
  misc_feature: MA Experiment 20001558 PARAMETER Experiment Name: At_Drought_Soil_Dry_P Parameter: Organism Value: A. thaliana
  misc_feature: MA Experiment 20001558 PARAMETER Experiment Name: At_Drought_Soil_Dry_P Parameter: Plant Line Value: WS
  misc_feature: MA Experiment 20001558 PARAMETER Experiment Name: At_Drought_Soil_Dry_P Parameter: Post Timepoint (hr) Value: 6
  misc_feature: MA Experiment 20001558 PARAMETER Experiment Name: At_Drought_Soil_Dry_P Parameter: Post-Treatment Value: Re-Water vs. No Drought
  misc_feature: MA Experiment 20001558 PARAMETER Experiment Name: At_Drought_Soil_Dry_P Parameter: Timepoint (day) Value: 13
  misc_feature: MA Experiment 20001558 PARAMETER Experiment Name: At_Drought_Soil_Dry_P Parameter: Treatment Value: Drought vs. No Drought
gagtttccagtaaacccttctctgaatcgctgccgcttcttcgatagactaaaagaatccaaacctcagtagccatggaaggcgaagagaagaatgattatagaaacgaggaagaagatttcaatacaccacaacaactacaaaagaagcaaaggaaagggaaaaaaatagcaacggaaacagaggatgaaaacgaagaagacaagagagttactctcaaagtcacgcaagtcgccgagagacccgatagaatctctccgatcgtcgcctatttctctacaggatacgatccttgtaaagtagatccaaaaacaggcaagagagttcatgaaactcccaaggttactgtttacaagcataaggatgattctaagaagaggattcaggttgttgtaagtcctccaggcgcaagagttgagttcgtcggaactaattacacaggcgagcaagctgctatgcagacgaatacttatagagttggtgtttttaatagagaggctaaaactttgaggattcttcctgttgctcacaataagataatcagattggagcctagagttaaagctcaagaaacaaatgaggaagaagcttcaggaagtgctgtcgtcaaagaacttgaagaactaaaaacaggagaacgcgatcgttataatacaaaaaaagctgttactcgggataagaagaagcgtgccttatatatgggagatgatgctgcgactcagaaggtccttgatgggaaactaagtgagttaggtgttaacacagctgctcttgaaggcaccagttctactgttgcacgcaacattcctccttacaataccgctgcaacgactgcaaatgaagcttatcccttagaaaagatcattgaaaagggggattggagttttcttgaagatatttactggcttctgcaacaggaaactgaagcagcaactgaggcttaccctgtatttgtccgcaacagattgtacagattgcgagatatcaaggacgatatgaaaaagcagacggtttgtggtgctgcaacgcttctcacccatctggttaagttcaaggacagaaactcaatgaatggttacgattccgctaaagaccacaagatgccagacatcttccgtcaaaaattcaacagcatgttcaaggattctgaatcagataggatacctgttgacaagatcaaccttctgataagctacgttcttgtgctatcccttcacgtggataatttcatgaccgatccagaagacatagcaaaagatctgaggataagcacagttgagctgaggaaacattttctacagcttggctgcaaattcctgaagcagaattctactacggttgctaccttaccgacccctctcaatttcccggaggttaaccggaggcgcagggcacgaaagtgatgacgatctaggagaagattttgttctatctttacatattttctgctattttaatgatatttctttgacggtctgttgagatattataaattgttttagttcctaagacatctgtttcttgggtttaatgatatatgatgttttggcattt

SEQ ID NO: 77499 - protein, 442 aa, Arabidopsis thaliana
  peptide (1)..(442): Ceres Seq. ID no. 12576650
  misc_feature (1)..(442): Homolog of NCBI NO: 15231416 NR Description: unknown protein; protein id: At3g13940.1, by cDNA: gi_13430583 [Arabidopsis thaliana] gene_id:MDC16.6~similar to unknown protein~sp|O14086 [Arabidopsis
  misc_feature (28)..(440): Homolog of NCBI NO: 19115294 NR Description: probable DNA-directed RNA polymerase I 49 kd
MEGEEKNDYRNEEEDFNTPQQLQKKQRKGKKIATETEDENEEDKRVTLKVTQVAERPDRISPIVAYFSTGYDPCKVDPKTGKRVHETPKVTVYKHKDDSKKRIQVVVSPPGARVEFVGTNYTGEQAAMQTNTYRVGVFNREAKTLRILPVAHNKIIRLEPRVKAQETNEEEASGSAVVKELEELKTGERDRYNTKKAVTRDKKKRALYMGDDAATQKVLDGKLSELGVNTAALEGTSSTVARNIPPYNTAATTANEAYPLEKIIEKGDWSFLEDIYWLLQQETEAATEAYPVFVRNRLYRLRDIKDDMKKQTVCGAATLLTHLVKFKDRNSMNGYDSAKDHKMPDIFRQKFNSMFKDSESDRIPVDKINLLISYVLVLSLHVDNFMTDPEDIAKDLRISTVELRKHFLQLGCKFLKQNSTTVATLPTPLNFPEVNRRRRARK

SEQ ID NO: 77500 - protein, 315 aa, Arabidopsis thaliana
  peptide (1)..(315): Ceres Seq. ID no. 12576651
  misc_feature (1)..(315): Homolog of NCBI NO: 15231416 NR Description: unknown protein; protein id: At3g13940.1, by cDNA: gi_13430583 [Arabidopsis thaliana] gene_id:MDC16.6~similar to unknown protein~sp|O14086 [Arabidopsis
  misc_feature (1)..(313): Homolog of NCBI NO: 19115294 NR Description: probable DNA-directed RNA polymerase I 49 kd
MQTNTYRVGVFNREAKTLRILPVAHNKIIRLEPRVKAQETNEEEASGSAVVKELEELKTGERDRYNTKKAVTRDKKKRALYMGDDAATQKVLDGKLSELGVNTAALEGTSSTVARNIPPYNTAATTANEAYPLEKIIEKGDWSFLEDIYWLLQQETEAATEAYPVFVRNRLYRLRDIKDDMKKQTVCGAATLLTHLVKFKDRNSMNGYDSAKDHKMPDIFRQKFNSMFKDSESDRIPVDKINLLISYVLVLSLHVDNFMTDPEDIAKDLRISTVELRKHFLQLGCKFLKQNSTTVATLPTPLNFPEVNRRRRARK

SEQ ID NO: 77501 - protein, 234 aa, Arabidopsis thaliana
  peptide (1)..(234): Ceres Seq. ID no. 12576652
  misc_feature (1)..(234): Homolog of NCBI NO: 15231416 NR Description: unknown protein; protein id: At3g13940.1, by cDNA: gi_13430583 [Arabidopsis thaliana] gene_id:MDC16.6~similar to unknown protein~sp|O14086 [Arabidopsis
  misc_feature (1)..(232): Homolog of NCBI NO: 19115294 NR Description: probable DNA-directed RNA polymerase I 49 kd
MGDDAATQKVLDGKLSELGVNTAALEGTSSTVARNIPPYNTAATTANEAYPLEKIIEKGDWSFLEDIYWLLQQETEAATEAYPVFVRNRLYRLRDIKDDMKKQTVCGAATLLTHLVKFKDRNSMNGYDSAKDHKMPDIFRQKFNSMFKDSESDRIPVDKINLLISYVLVLSLHVDNFMTDPEDIAKDLRISTVELRKHFLQLGCKFLKQNSTTVATLPTPLNFPEVNRRRRARK

SEQ ID NO: 77502 - DNA, 2122 bp, Arabidopsis thaliana
  misc_feature (1)..(2122): Ceres Seq. ID no. 12576653
  misc_feature: MA Experiment ID: 108435 Result: Down-regulated in Transcription
  misc_feature: MA Experiment 108435 PARAMETER Experiment Name: At_stm_Mutants_cDNA_P Parameter: Plant Line Value: wt Landsburg vs stm
  misc_feature: MA Experiment 108435 PARAMETER Experiment Name: At_stm_Mutants_cDNA_P Parameter: Tissue Value: Shoot Apical Meristem Region
  misc_feature: MA Experiment ID: 108461 Result: Up-regulated in Transcription
  misc_feature: MA Experiment 108461 PARAMETER Experiment Name: At_Germinating_Seeds_cDNA_P Parameter: Age (day) Value: 1 vs. 0
  misc_feature: MA Experiment 108461 PARAMETER Experiment Name: At_Germinating_Seeds_cDNA_P Parameter: Tissue Value: Germinating Seeds
  misc_feature: MA Experiment ID: 108462 Result: Up-regulated in Transcription
  misc_feature: MA Experiment 108462 PARAMETER Experiment Name: At_Germinating_Seeds_cDNA_P Parameter: Age (day) Value: 2 vs. 0
  misc_feature: MA Experiment 108462 PARAMETER Experiment Name: At_Germinating_Seeds_cDNA_P Parameter: Tissue Value: Germinating Seeds
  misc_feature: MA Experiment ID: 108463 Result: Up-regulated in Transcription
  misc_feature: MA Experiment 108463 PARAMETER Experiment Name: At_Germinating_Seeds_cDNA_P Parameter: Age (day) Value: 3 vs. 0
  misc_feature: MA Experiment 108463 PARAMETER Experiment Name: At_Germinating_Seeds_cDNA_P Parameter: Tissue Value: Germinating Seeds
  misc_feature: MA Experiment ID: 108464 Result: Up-regulated in Transcription
  misc_feature: MA Experiment 108464 PARAMETER Experiment Name: At_Germinating_Seeds_cDNA_P Parameter: Age (day) Value: 4 vs. 0
  misc_feature: MA Experiment 108464 PARAMETER Experiment Name: At_Germinating_Seeds_cDNA_P Parameter: Tissue Value: Germinating Seeds
  misc_feature: MA Experiment ID: 108607 Result: Up-regulated in Transcription
  misc_feature: MA Experiment 108607 PARAMETER Experiment Name: At_100uM_ABA_cDNA_P Parameter: Timepoint (hr) Value: 4
  misc_feature: MA Experiment 108607 PARAMETER Experiment Name: At_100uM_ABA_cDNA_P Parameter: Tissue Value: Aerial
  misc_feature: MA Experiment 108607 PARAMETER Experiment Name: At_100uM_ABA_cDNA_P Parameter: Treatment Value: 100uM ABA vs. No Treatment
  misc_feature: MA Experiment ID: 20000069 Result: Up-regulated in Transcription
  misc_feature: MA Experiment 20000069 PARAMETER Experiment Name: At_100uM_ABA_Mutants_cDNA_P Parameter: Plant Line Value: CS23
  misc_feature: MA Experiment 20000069 PARAMETER Experiment Name: At_100uM_ABA_Mutants_cDNA_P Parameter: Timepoint (hr) Value: 6
  misc_feature: MA Experiment 20000069 PARAMETER Experiment Name: At_100uM_ABA_Mutants_cDNA_P Parameter: Tissue Value: Aerial
  misc_feature: MA Experiment 20000069 PARAMETER Experiment Name: At_100uM_ABA_Mutants_cDNA_P Parameter: Treatment Value: 100uM ABA vs. No Treatment
  misc_feature: MA Experiment ID: 20000070 Result: Up-regulated in Transcription
  misc_feature: MA Experiment 20000070 PARAMETER Experiment Name: At_100uM_ABA_Mutants_cDNA_P Parameter: Plant Line Value: CS24
  misc_feature: MA Experiment 20000070 PARAMETER Experiment Name: At_100uM_ABA_Mutants_cDNA_P Parameter: Timepoint (hr) Value: 6
  misc_feature: MA Experiment 20000070 PARAMETER Experiment Name: At_100uM_ABA_Mutants_cDNA_P Parameter: Tissue Value: Aerial
  misc_feature: MA Experiment 20000070 PARAMETER Experiment Name: At_100uM_ABA_Mutants_cDNA_P Parameter: Treatment Value: 100uM ABA vs. No Treatment
  misc_feature: MA Experiment ID: 20000071 Result: Up-regulated in Transcription
  misc_feature: MA Experiment 20000071 PARAMETER Experiment Name: At_100uM_ABA_Mutants_cDNA_P Parameter: Plant Line Value: CS8104
  misc_feature: MA Experiment 20000071 PARAMETER Experiment Name: At_100uM_ABA_Mutants_cDNA_P Parameter: Timepoint (hr) Value: 6
  misc_feature: MA Experiment 20000071 PARAMETER Experiment Name: At_100uM_ABA_Mutants_cDNA_P Parameter: Tissue Value: Aerial
  misc_feature: MA Experiment 20000071 PARAMETER Experiment Name: At_100uM_ABA_Mutants_cDNA_P Parameter: Treatment Value: 100uM ABA vs. No Treatment
  misc_feature: MA Experiment ID: 20000072 Result: Up-regulated in Transcription
  misc_feature: MA Experiment 20000072 PARAMETER Experiment Name: At_100uM_ABA_Mutants_cDNA_P Parameter: Plant Line Value: CS8105
  misc_feature: MA Experiment 20000072 PARAMETER Experiment Name: At_100uM_ABA_Mutants_cDNA_P Parameter: Timepoint (hr) Value: 6
  misc_feature: MA Experiment 20000072 PARAMETER Experiment Name: At_100uM_ABA_Mutants_cDNA_P Parameter: Tissue Value: Aerial
  misc_feature: MA Experiment 20000072 PARAMETER Experiment Name: At_100uM_ABA_Mutants_cDNA_P Parameter: Treatment Value: 100uM ABA vs. No Treatment
  misc_feature: MA Experiment ID: 20000087 Result: Up-regulated in Transcription
  misc_feature: MA Experiment 20000087 PARAMETER Experiment Name: At_100uM_ABA_Mutants_cDNA_P Parameter: Plant Line Value: WS
  misc_feature: MA Experiment 20000087 PARAMETER Experiment Name: At_100uM_ABA_Mutants_cDNA_P Parameter: Timepoint (hr) Value: 6
  misc_feature: MA Experiment 20000087 PARAMETER Experiment Name: At_100uM_ABA_Mutants_cDNA_P Parameter: Tissue Value: Aerial
  misc_feature: MA Experiment 20000087 PARAMETER Experiment Name: At_100uM_ABA_Mutants_cDNA_P Parameter: Treatment Value: 100uM ABA vs. No Treatment
  misc_feature: MA Experiment ID: 20000117 Result: Up-regulated in Transcription
  misc_feature: MA Experiment 20000117 PARAMETER Experiment Name: At_100uM_ABA_Mutants_cDNA_P Parameter: Plant Line Value: Columbia
  misc_feature: MA Experiment 20000117 PARAMETER Experiment Name: At_100uM_ABA_Mutants_cDNA_P Parameter: Timepoint (hr) Value: 6
  misc_feature: MA Experiment 20000117 PARAMETER Experiment Name: At_100uM_ABA_Mutants_cDNA_P Parameter: Tissue Value: Aerial
  misc_feature: MA Experiment 20000117 PARAMETER Experiment Name: At_100uM_ABA_Mutants_cDNA_P Parameter: Treatment Value: 100uM ABA vs. No Treatment
  misc_feature: MA Experiment ID: 20000173 Result: Down-regulated in Transcription
  misc_feature: MA Experiment 20000173 PARAMETER Experiment Name: At_42deg_Heat_P Parameter: Age (day) Value: 14
  misc_feature: MA Experiment 20000173 PARAMETER Experiment Name: At_42deg_Heat_P Parameter: Organism Value: A. thaliana
  misc_feature: MA Experiment 20000173 PARAMETER Experiment Name: At_42deg_Heat_P Parameter: Plant Line Value: WS
  misc_feature: MA Experiment 20000173 PARAMETER Experiment Name: At_42deg_Heat_P Parameter: Temperature (deg C) Value: 42 vs. 22
  misc_feature: MA Experiment 20000173 PARAMETER Experiment Name: At_42deg_Heat_P Parameter: Timepoint (hr) Value: 6
  misc_feature: MA Experiment 20000173 PARAMETER Experiment Name: At_42deg_Heat_P Parameter: Tissue Value: Aerial
  misc_feature: MA Experiment ID: 20000179 Result: Up-regulated in Transcription
  misc_feature: MA Experiment 20000179 PARAMETER Experiment Name: At_Germinating_Seeds_P Parameter: Age (hr) Value: 6 vs. 0
  misc_feature: MA Experiment 20000179 PARAMETER Experiment Name: At_Germinating_Seeds_P Parameter: Tissue Value: Germinating Seeds
  misc_feature: MA Experiment ID: 20000180 Result: Up-regulated in Transcription
  misc_feature: MA Experiment 20000180 PARAMETER Experiment Name: At_Germinating_Seeds_P Parameter: Age (hr) Value: 24 vs. 0
  misc_feature: MA Experiment 20000180 PARAMETER Experiment Name: At_Germinating_Seeds_P Parameter: Tissue Value: Germinating Seeds
  misc_feature: MA Experiment ID: 20000184 Result: Down-regulated in Transcription
  misc_feature: MA Experiment 20000184 PARAMETER Experiment Name: At_Shoots__P Parameter: Age (day) Value: 7
  misc_feature: MA Experiment 20000184 PARAMETER Experiment Name: At_Shoots__P Parameter: Tissue Value: Shoots vs. Whole Plant
  misc_feature: MA Experiment ID: 20000185 Result: Down-regulated in Transcription
  misc_feature: MA Experiment 20000185 PARAMETER Experiment Name: At_Roots__P Parameter: Age (day) Value: 7 vs. 21
  misc_feature: MA Experiment 20000185 PARAMETER Experiment Name: At_Roots__P Parameter: Organism Value: A. thaliana
  misc_feature: MA Experiment 20000185 PARAMETER Experiment Name: At_Roots__P Parameter: Tissue Value: Roots vs. Whole Plant
  misc_feature: MA Experiment ID: 20000224 Result: Up-regulated in Transcription
  misc_feature: MA Experiment ID: 20000234 Result: Down-regulated in Transcription
  misc_feature: MA Experiment 20000234 PARAMETER Experiment Name: At_Siliques_P Parameter: Age (day) Value: 21
  misc_feature: MA Experiment 20000234 PARAMETER Experiment Name: At_Siliques_P Parameter: Organism Value: A. thaliana
  misc_feature: MA Experiment 20000234 PARAMETER Experiment Name: At_Siliques_P Parameter: Plant Line Value: WS
  misc_feature: MA Experiment 20000234 PARAMETER Experiment Name: At_Siliques_P Parameter: Tissue Value: Less Than 5mm Siliques vs. Whole Plant
  misc_feature: MA Experiment ID: 20000265 Result: Down-regulated in Transcription
  misc_feature: MA Experiment 20000265 PARAMETER Experiment Name: At_Open_Flower_P Parameter: Age (day) Value: 21
  misc_feature: MA Experiment 20000265 PARAMETER Experiment Name: At_Open_Flower_P Parameter: Plant Line Value: WS
  misc_feature: MA Experiment 20000265 PARAMETER Experiment Name: At_Open_Flower_P Parameter: Tissue Value: Closed Flower vs. Whole Plant
  misc_feature: MA Experiment ID: 20000439 Result: Down-regulated in Transcription
  misc_feature: MA Experiment 20000439 PARAMETER Experiment Name: At_Roots__P Parameter: Age (day) Value: 14 vs. 21
  misc_feature: MA Experiment 20000439 PARAMETER Experiment Name: At_Roots__P Parameter: Organism Value: A. thaliana
  misc_feature: MA Experiment 20000439 PARAMETER Experiment Name: At_Roots__P Parameter: Tissue Value: Roots vs. Whole Plant
  misc_feature: MA Experiment ID: 20000495 Result: Down-regulated in Transcription
  misc_feature: MA Experiment 20000495 PARAMETER Experiment Name: At_Guard_Cells_P Parameter: Harvest Date Value: 8/2/2002
  misc_feature: MA Experiment 20000495 PARAMETER Experiment Name: At_Guard_Cells_P Parameter: Organism Value: A. thaliana
  misc_feature: MA Experiment 20000495 PARAMETER Experiment Name: At_Guard_Cells_P Parameter: Tissue Value: Guard Cells vs. Leaves
  misc_feature: MA Experiment ID: 20000794 Result: Up-regulated in Transcription
  misc_feature: MA Experiment 20000794 PARAMETER Experiment Name: At_Petals_P Parameter: Age (day) Value: 23-25 days
  misc_feature: MA Experiment 20000794 PARAMETER Experiment Name: At_Petals_P Parameter: Plant Line Value: WS
  misc_feature: MA Experiment 20000794 PARAMETER Experiment Name: At_Petals_P Parameter: Tissue Value: Petals vs. Whole plant
  misc_feature: MA Experiment ID: 20001248 Result: Down-regulated in Transcription
  misc_feature: MA Experiment 20001248 PARAMETER Experiment Name: At_Far-red-induction_P Parameter: Age (day) Value: 7
  misc_feature: MA Experiment 20001248 PARAMETER Experiment Name: At_Far-red-induction_P Parameter: Light Value: Far-red vs. White
  misc_feature: MA Experiment 20001248 PARAMETER Experiment Name: At_Far-red-induction_P Parameter: Organism Value: A. thaliana
  misc_feature: MA Experiment 20001248 PARAMETER Experiment Name: At_Far-red-induction_P Parameter: Plant Line Value: Columbia
  misc_feature: MA Experiment 20001248 PARAMETER Experiment Name: At_Far-red-induction_P Parameter: Timepoint (hr) Value: 4
  misc_feature: MA Experiment 20001248 PARAMETER Experiment Name: At_Far-red-induction_P Parameter: Tissue Value: Whole Plant
  misc_feature: MA Experiment ID: 20001557 Result: Down-regulated in Transcription
  misc_feature: MA Experiment 20001557 PARAMETER Experiment Name: At_Drought_Soil_Dry_P Parameter: Age (day) Value: 27
  misc_feature: MA Experiment 20001557 PARAMETER Experiment Name: At_Drought_Soil_Dry_P Parameter: Organism Value: A. thaliana
  misc_feature: MA Experiment 20001557 PARAMETER Experiment Name: At_Drought_Soil_Dry_P Parameter: Plant Line Value: WS
  misc_feature: MA Experiment 20001557 PARAMETER Experiment Name: At_Drought_Soil_Dry_P Parameter: Post Timepoint (hr) Value: 3
  misc_feature: MA Experiment 20001557 PARAMETER Experiment Name: At_Drought_Soil_Dry_P Parameter: Post-Treatment Value: Re-Water vs. No Drought
  misc_feature: MA Experiment 20001557 PARAMETER Experiment Name: At_Drought_Soil_Dry_P Parameter: Timepoint (day) Value: 13
  misc_feature: MA Experiment 20001557 PARAMETER Experiment Name: At_Drought_Soil_Dry_P Parameter: Treatment Value: Drought vs. No Drought
  misc_feature: MA Experiment ID: 20001558 Result: Down-regulated in Transcription
  misc_feature: MA Experiment 20001558 PARAMETER Experiment Name: At_Drought_Soil_Dry_P Parameter: Age (day) Value: 27
  misc_feature: MA Experiment 20001558 PARAMETER Experiment Name: At_Drought_Soil_Dry_P Parameter: Organism Value: A. thaliana
  misc_feature: MA Experiment 20001558 PARAMETER Experiment Name: At_Drought_Soil_Dry_P Parameter: Plant Line Value: WS
  misc_feature: MA Experiment 20001558 PARAMETER Experiment Name: At_Drought_Soil_Dry_P Parameter: Post Timepoint (hr) Value: 6
  misc_feature: MA Experiment 20001558 PARAMETER Experiment Name: At_Drought_Soil_Dry_P Parameter: Post-Treatment Value: Re-Water vs. No Drought
  misc_feature: MA Experiment 20001558 PARAMETER Experiment Name: At_Drought_Soil_Dry_P Parameter: Timepoint (day) Value: 13
  misc_feature: MA Experiment 20001558 PARAMETER Experiment Name: At_Drought_Soil_Dry_P Parameter: Treatment Value: Drought vs. No Drought
  misc_feature: MA Experiment ID: 20001560 Result: Down-regulated in Transcription
  misc_feature: MA Experiment 20001560 PARAMETER Experiment Name: At_Drought_Soil_Dry_P Parameter: Age (day) Value: 28
  misc_feature: MA Experiment 20001560 PARAMETER Experiment Name: At_Drought_Soil_Dry_P Parameter: Organism Value: A. thaliana
  misc_feature: MA Experiment 20001560 PARAMETER Experiment Name: At_Drought_Soil_Dry_P Parameter: Plant Line Value: WS
  misc_feature: MA Experiment 20001560 PARAMETER Experiment Name: At_Drought_Soil_Dry_P Parameter: Post Timepoint (hr) Value: None
  misc_feature: MA Experiment 20001560 PARAMETER Experiment Name: At_Drought_Soil_Dry_P Parameter: Post-Treatment Value: None
  misc_feature: MA Experiment 20001560 PARAMETER Experiment Name: At_Drought_Soil_Dry_P Parameter: Timepoint (day) Value: 14
  misc_feature: MA Experiment 20001560 PARAMETER Experiment Name: At_Drought_Soil_Dry_P Parameter: Treatment Value: Drought vs. No Drought
  misc_feature: MA Experiment ID: 20001911 Result: Down-regulated in Transcription
  misc_feature: MA Experiment 20001911 PARAMETER Experiment Name: At_Drought_Reproduction_P Parameter: Age (day) Value: 40
  misc_feature: MA Experiment 20001911 PARAMETER Experiment Name: At_Drought_Reproduction_P Parameter: Organism Value: A. thaliana
  misc_feature: MA Experiment 20001911 PARAMETER Experiment Name: At_Drought_Reproduction_P Parameter: Plant Line Value: WS
  misc_feature: MA Experiment 20001911 PARAMETER Experiment Name: At_Drought_Reproduction_P Parameter: Timepoint (day) Value: 10
  misc_feature: MA Experiment 20001911 PARAMETER Experiment Name: At_Drought_Reproduction_P Parameter: Tissue Value: Flowers
  misc_feature: MA Experiment 20001911 PARAMETER Experiment Name: At_Drought_Reproduction_P Parameter: Treatment Value: Drought vs. No Drought
gtggccgtctctgataaaaaagacaaaggaaggaggcatcgatgtgatccaaacgtacgttttctggaacctccatgagcctaagcttggacagtatgattttagtggaagaaacgatttagtgaagtttattaaagaaattagatcacaaggtctctatgtctgtctacgtattggacccttcatcgaagccgagtggaattacgggggattgccattttggttacgggatgtacccggtatggtataccgaaccgacaatgagcccttcaagttccacatgcaaaaattcaccgctaagatcgtagatttgatgaaatctgagggcttatatgcttctcaaggaggtccaattattctttctcagatcgagaacgagtatgcaaacgtggagggggctttccatgagaaaggagcatcgtacatcaagtgggcaggtcaaatggcggtcgggcttaagaccggagtgccatggatcatgtgcaagtcgcccgacgctcctgatcccgtgatcaatacctgcaacgggatgaaatgcggcgagacttttcctggaccaaactcacccaataagccgaaaatgtggactgaggattggacttcattgtttatggaaaagagccttatattagatctgctgaggatattgctttccatgccgctcttttcgttgcaaaaaatggaagttacatcaactattacatgtaccatggtggaacaaactttggaaggacttcatcttcgtatttcattacaggatactatgatcaagctcctctcgacgaatacggtcttttaagacagcctaagtacggtcatttgaaggagcttcacgctgcgataaaatcctctgcaaatcctctgcttcaaggaaagcaaacgattctctccttgggaccaatgcaacaagcttatgtctttgaagacgcgaacaatggatgcgttgcgtttctggtaaacaatgacgctaaagccagtcaaatacaattcagaaacaatgcgtatagcttgagtcccaagtcaattggtattcttcagaactgcaaaaacctaatttatgaaactgcaaaagtgaatgtgaagatgaatacgagagttacaacgccggttcaagtgttcaacgttcccgataactggaatttgtttagagaaacaatccctgcattcccaggcacatctttgaagacaaatgctttgttggaacacactaatttgacaaaggacaaaactgattatctttggtacacttcaagctttaagctggattcaccctgcacgaacccgtctatctacacagaatcatcaggacatgttgtccacgtgttcgtcaacaatgcactagcaggatctggacatggaagcagagacataagggtagttaaactacaagctccggttagcttaatcaatggacaaaacaatatatcgatcctcagcggcatggttggtctaccggactctggagcttacatggagaggagatcttatggactaaccaaagtacaaattagctgtggcgggacaaaacccatcgatttgagtagatctcaatggggttactcggtgggtttgcttggagagaaagttaggttatatcaatggaagaatttaaatagagtgaagtggagtatgaataaagctggactaattaagaaccgccccctcgcttggtacaagacaacgtttgatgggccgaatggagatgggcccgtgggcctacacatgtcgagtatgggtaaaggagaaatttgggtgaatggtgaaagcattggtcgttattgggtctcgtttctcacccctgctggacaaccttctcaatctatatatcatattcctcgggcgttcttaaaaccatctggaaatttattggtggtatttgaagaggaaggtggtgatcctcttgggatatctttgaatacaatatcggttgttggttcgagtcaagctcaatctcaattctcctgaagattatttttttaaaaatggtttttgggtaattgggggtgttttataaaccaaacaatacattatattgaaatgatacaatacacaaattgaatgaaatatacaggtttcataaatcttagtgtcacatgtaaagaaacttcagatatatcagttt

SEQ ID NO: 77503 - protein, 420 aa, Arabidopsis thaliana
  peptide (1)..(420): Ceres Seq. ID no. 12576654
  misc_feature (1)..(420): Homolog of NCBI NO: 16649045 NR Description: beta-galactosidase [Arabidopsis thaliana]
  misc_feature (1)..(409): Homolog of NCBI NO: 26451843 NR Description: unknown protein [Arabidopsis thaliana]
  misc_feature (1)..(409): Homolog of NCBI NO: 30699255 NR Description: glycosyl hydrolase family 35 (beta-galactosidase)
  misc_feature (1)..(409): Homolog of NCBI NO: 25326165 NR Description: probable beta-galactosidase [imported] -
  misc_feature (1)..(348): Homolog of NCBI NO: 12323389 NR Description: putative beta-galactosidase, 3' partial; 3669-1
  misc_feature (1)..(408): Homolog of NCBI NO: 10862896 NR Description: putative beta-galactosidase [Nicotiana tabacum]
  misc_feature (1)..(395): Homolog of NCBI NO: 25326168 NR Description: probable beta-galactosidase [imported] -
  misc_feature (1)..(395): Homolog of NCBI NO: 30679742 NR Description: glycosyl hydrolase family 35 (beta-galactosidase)
  misc_feature (1)..(365): Homolog of NCBI NO: 18419821 NR Description: glycosyl hydrolase family 35 protein id: At4g36360.1, supported by cDNA: gi_15810492,
  misc_feature (1)..(365): Homolog of NCBI NO: 25326166 NR Description: beta-galactosidase like protein [imported] -
MYHGGTNFGRTSSSYFITGYYDQAPLDEYGLLRQPKYGHLKELHAAIKSSANPLLQGKQTILSLGPMQQAYVFEDANNGCVAFLVNNDAKASQIQFRNNAYSLSPKSIGILQNCKNLIYETAKVNVKMNTRVTTPVQVFNVPDNWNLFRETIPAFPGTSLKTNALLEHTNLTKDKTDYLWYTSSFKLDSPCTNPSIYTESSGHVVHVFVNNALAGSGHGSRDIRVVKLQAPVSLINGQNNISILSGMVGLPDSGAYMERRSYGLTKVQISCGGTKPIDLSRSQWGYSVGLLGEKVRLYQWKNLNRVKWSMNKAGLIKNRPLAWYKTTFDGPNGDGPVGLHMSSMGKGEIWVNGESIGRYWVSFLTPAGQPSQSIYHIPRAFLKPSGNLLVVFEEEGGDPLGISLNTISVVGSSQAQSQFS

SEQ ID NO: 77504 - protein, 354 aa, Arabidopsis thaliana
  peptide (1)..(354): Ceres Seq. ID no. 12576655
  misc_feature (1)..(354): Homolog of NCBI NO: 16649045 NR Description: beta-galactosidase [Arabidopsis thaliana]
  misc_feature (1)..(343): Homolog of NCBI NO: 26451843 NR Description: unknown protein [Arabidopsis thaliana]
  misc_feature (1)..(343): Homolog of NCBI NO: 30699255 NR Description: glycosyl hydrolase family 35 (beta-galactosidase)
  misc_feature (1)..(343): Homolog of NCBI NO: 25326165 NR Description: probable beta-galactosidase [imported] -
  misc_feature (1)..(282): Homolog of NCBI NO: 12323389 NR Description: putative beta-galactosidase, 3' partial; 3669-1
  misc_feature (1)..(342): Homolog of NCBI NO: 10862896 NR Description: putative beta-galactosidase [Nicotiana tabacum]
  misc_feature (1)..(329): Homolog of NCBI NO: 25326168 NR Description: probable beta-galactosidase [imported] -
  misc_feature (1)..(329): Homolog of NCBI NO: 30679742 NR Description: glycosyl hydrolase family 35 (beta-galactosidase)
  misc_feature (1)..(299): Homolog of NCBI NO: 18419821 NR Description: glycosyl hydrolase family 35 protein id: At4g36360.1, supported by cDNA: gi_15810492,
  misc_feature (1)..(299): Homolog of NCBI NO: 25326166 NR Description: beta-galactosidase like protein [imported] -
MQQAYVFEDANNGCVAFLVNNDAKASQIQFRNNAYSLSPKSIGILQNCKNLIYETAKVNVKMNTRVTTPVQVFNVPDNWNLFRETIPAFPGTSLKTNALLEHTNLTKDKTDYLWYTSSFKLDSPCTNPSIYTESSGHVVHVFVNNALAGSGHGSRDIRVVKLQAPVSLINGQNNISILSGMVGLPDSGAYMERRSYGLTKVQISCGGTKPIDLSRSQWGYSVGLLGEKVRLYQWKNLNRVKWSMNKAGLIKNRPLAWYKTTFDGPNGDGPVGLHMSSMGKGEIWVNGESIGRYWVSFLTPAGQPSQSIYHIPRAFLKPSGNLLVVFEEEGGDPLGISLNTISVVGSSQAQSQFS

SEQ ID NO: 77505 - protein, 293 aa, Arabidopsis thaliana
  peptide (1)..(293): Ceres Seq. ID no. 12576656
  misc_feature (1)..(293): Homolog of NCBI NO: 16649045 NR Description: beta-galactosidase [Arabidopsis thaliana]
  misc_feature (1)..(282): Homolog of NCBI NO: 26451843 NR Description: unknown protein [Arabidopsis thaliana]
  misc_feature (1)..(282): Homolog of NCBI NO: 30699255 NR Description: glycosyl hydrolase family 35 (beta-galactosidase)
  misc_feature (1)..(282): Homolog of NCBI NO: 25326165 NR Description: probable beta-galactosidase [imported] -
  misc_feature (1)..(221): Homolog of NCBI NO: 12323389 NR Description: putative beta-galactosidase, 3' partial; 3669-1
  misc_feature (1)..(281): Homolog of NCBI NO: 10862896 NR Description: putative beta-galactosidase [Nicotiana tabacum]
  misc_feature (1)..(268): Homolog of NCBI NO: 25326168 NR Description: probable beta-galactosidase [imported] -
  misc_feature (1)..(268): Homolog of NCBI NO: 30679742 NR Description: glycosyl hydrolase family 35 (beta-galactosidase)
  misc_feature (1)..(238): Homolog of NCBI NO: 18419821 NR Description: glycosyl hydrolase family 35 protein id: At4g36360.1, supported by cDNA: gi_15810492,
  misc_feature (1)..(238): Homolog of NCBI NO: 25326166 NR Description: beta-galactosidase like protein [imported] -
MNTRVTTPVQVFNVPDNWNLFRETIPAFPGTSLKTNALLEHTNLTKDKTDYLWYTSSFKLDSPCTNPSIYTESSGHVVHVFVNNALAGSGHGSRDIRVVKLQAPVSLINGQNNISILSGMVGLPDSGAYMERRSYGLTKVQISCGGTKPIDLSRSQWGYSVGLLGEKVRLYQWKNLNRVKWSMNKAGLIKNRPLAWYKTTFDGPNGDGPVGLHMSSMGKGEIWVNGESIGRYWVSFLTPAGQPSQSIYHIPRAFLKPSGNLLVVFEEEGGDPLGISLNTISVVGSSQAQSQFS

SEQ ID NO: 77506 - DNA, 806 bp, Arabidopsis thaliana
  misc_feature (1)..(806): Ceres Seq. ID no. 12576667
  misc_feature: MA Experiment ID: 20000173 Result: Up-regulated in Transcription
  misc_feature: MA Experiment 20000173 PARAMETER Experiment Name: At_42deg_Heat_P Parameter: Age (day) Value: 14
  misc_feature: MA Experiment 20000173 PARAMETER Experiment Name: At_42deg_Heat_P Parameter: Organism Value: A. thaliana
  misc_feature: MA Experiment 20000173 PARAMETER Experiment Name: At_42deg_Heat_P Parameter: Plant Line Value: WS
  misc_feature: MA Experiment 20000173 PARAMETER Experiment Name: At_42deg_Heat_P Parameter: Temperature (deg C) Value: 42 vs. 22
  misc_feature: MA Experiment 20000173 PARAMETER Experiment Name: At_42deg_Heat_P Parameter: Timepoint (hr) Value: 6
  misc_feature: MA Experiment 20000173 PARAMETER Experiment Name: At_42deg_Heat_P Parameter: Tissue Value: Aerial
  misc_feature: MA Experiment ID: 20000214 Result: Down-regulated in Transcription
  misc_feature: MA Experiment 20000214 PARAMETER Experiment Name: At_4deg_Cold_P Parameter: Timepoint (hr) Value: 6
  misc_feature: MA Experiment ID: 20000235 Result: Down-regulated in Transcription
  misc_feature: MA Experiment 20000235 PARAMETER Experiment Name: At_Siliques_P Parameter: Age (day) Value: 21
  misc_feature: MA Experiment 20000235 PARAMETER Experiment Name: At_Siliques_P Parameter: Organism Value: A. thaliana
  misc_feature: MA Experiment 20000235 PARAMETER Experiment Name: At_Siliques_P Parameter: Plant Line Value: WS
  misc_feature: MA Experiment 20000235 PARAMETER Experiment Name: At_Siliques_P Parameter: Tissue Value: 5-10mm Siliques vs. Whole Plant
  misc_feature: MA Experiment ID: 20000265 Result: Down-regulated in Transcription
  misc_feature: MA Experiment 20000265 PARAMETER Experiment Name: At_Open_Flower_P Parameter: Age (day) Value: 21
  misc_feature: MA Experiment 20000265 PARAMETER Experiment Name: At_Open_Flower_P Parameter: Plant Line Value: WS
  misc_feature: MA Experiment 20000265 PARAMETER Experiment Name: At_Open_Flower_P Parameter: Tissue Value: Closed Flower vs. Whole Plant
  misc_feature: MA Experiment ID: 20000436 Result: Up-regulated in Transcription
  misc_feature: MA Experiment 20000436 PARAMETER Experiment Name: At_Drought_P Parameter: Age (day) Value: 7
  misc_feature: MA Experiment 20000436 PARAMETER Experiment Name: At_Drought_P Parameter: Organism Value: A. thaliana
  misc_feature: MA Experiment 20000436 PARAMETER Experiment Name: At_Drought_P Parameter: Plant Line Value: WS
  misc_feature: MA Experiment 20000436 PARAMETER Experiment Name: At_Drought_P Parameter: Timepoint (hr) Value: 12
  misc_feature: MA Experiment 20000436 PARAMETER Experiment Name: At_Drought_P Parameter: Tissue Value: Whole Plant
  misc_feature: MA Experiment 20000436 PARAMETER Experiment Name: At_Drought_P Parameter: Treatment Value: Drought vs. No Drought
  misc_feature: MA Experiment ID: 20000438 Result: Down-regulated in Transcription
  misc_feature: MA Experiment 20000438 PARAMETER Experiment Name: At_Shoots__P Parameter: Age (day) Value: 14
  misc_feature: MA Experiment 20000438 PARAMETER Experiment Name: At_Shoots__P Parameter: Tissue Value: Shoots vs. Whole Plant
  misc_feature: MA Experiment ID: 20000495 Result: Up-regulated in Transcription
  misc_feature: MA Experiment 20000495 PARAMETER Experiment Name: At_Guard_Cells_P Parameter: Harvest Date Value: 8/2/2002
  misc_feature: MA Experiment 20000495 PARAMETER Experiment Name: At_Guard_Cells_P Parameter: Organism Value: A. thaliana
  misc_feature: MA Experiment 20000495 PARAMETER Experiment Name: At_Guard_Cells_P Parameter: Tissue Value: Guard Cells vs. Leaves
  misc_feature: MA Experiment ID: 20001450 Result: Up-regulated in Transcription
  misc_feature: MA Experiment 20001450 PARAMETER Experiment Name: At_Far-red-induction_P Parameter: Age (day) Value: 7
  misc_feature: MA Experiment 20001450 PARAMETER Experiment Name: At_Far-red-induction_P Parameter: Light Value: Far-red vs. White
  misc_feature: MA Experiment 20001450 PARAMETER Experiment Name: At_Far-red-induction_P Parameter: Organism Value: A. thaliana
  misc_feature: MA Experiment 20001450 PARAMETER Experiment Name: At_Far-red-induction_P Parameter: Plant Line Value: Columbia
  misc_feature: MA Experiment 20001450 PARAMETER Experiment Name: At_Far-red-induction_P Parameter: Timepoint (hr) Value: 8
  misc_feature: MA Experiment 20001450 PARAMETER Experiment Name: At_Far-red-induction_P Parameter: Tissue Value: Whole Plant
  misc_feature: MA Experiment ID: 20001451 Result: Up-regulated in Transcription
  misc_feature: MA Experiment 20001451 PARAMETER Experiment Name: At_Far-red-induction_P Parameter: Age (day) Value: 7
  misc_feature: MA Experiment 20001451 PARAMETER Experiment Name: At_Far-red-induction_P Parameter: Light Value: Far-red vs. White
  misc_feature: MA Experiment 20001451 PARAMETER Experiment Name: At_Far-red-induction_P Parameter: Organism Value: A. thaliana
  misc_feature: MA Experiment 20001451 PARAMETER Experiment Name: At_Far-red-induction_P Parameter: Plant Line Value: Columbia
  misc_feature: MA Experiment 20001451 PARAMETER Experiment Name: At_Far-red-induction_P Parameter: Timepoint (hr) Value: 24
  misc_feature: MA Experiment 20001451 PARAMETER Experiment Name: At_Far-red-induction_P Parameter: Tissue Value: Whole Plant
  misc_feature: MA Experiment ID: 20001559 Result: Up-regulated in Transcription
  misc_feature: MA Experiment 20001559 PARAMETER Experiment Name: At_Drought_Soil_Dry_P Parameter: Age (day) Value: 28
  misc_feature: MA Experiment 20001559 PARAMETER Experiment Name: At_Drought_Soil_Dry_P Parameter: Organism Value: A. thaliana
  misc_feature: MA Experiment 20001559 PARAMETER Experiment Name: At_Drought_Soil_Dry_P Parameter: Plant Line Value: WS
  misc_feature: MA Experiment 20001559 PARAMETER Experiment Name: At_Drought_Soil_Dry_P Parameter: Post Timepoint (hr) Value: 29
  misc_feature: MA Experiment 20001559 PARAMETER Experiment Name: At_Drought_Soil_Dry_P Parameter: Post-Treatment Value: Re-Water vs. No Drought
  misc_feature: MA Experiment 20001559 PARAMETER Experiment Name: At_Drought_Soil_Dry_P Parameter: Timepoint (day) Value: 14
  misc_feature: MA Experiment 20001559 PARAMETER Experiment Name: At_Drought_Soil_Dry_P Parameter: Treatment Value: Drought vs. No Drought
  misc_feature: MA Experiment ID: 20001911 Result: Up-regulated in Transcription
  misc_feature: MA Experiment 20001911 PARAMETER Experiment Name: At_Drought_Reproduction_P Parameter: Age (day) Value: 40
  misc_feature: MA Experiment 20001911 PARAMETER Experiment Name: At_Drought_Reproduction_P Parameter: Organism Value: A. thaliana
  misc_feature: MA Experiment 20001911 PARAMETER Experiment Name: At_Drought_Reproduction_P Parameter: Plant Line Value: WS
  misc_feature: MA Experiment 20001911 PARAMETER Experiment Name: At_Drought_Reproduction_P Parameter: Timepoint (day) Value: 10
  misc_feature: MA Experiment 20001911 PARAMETER Experiment Name: At_Drought_Reproduction_P Parameter: Tissue Value: Flowers
  misc_feature: MA Experiment 20001911 PARAMETER Experiment Name: At_Drought_Reproduction_P Parameter: Treatment Value: Drought vs. No Drought
ccacgcgtccgggttctctgactccgtcgtctctttctccgtcgccaccgttcctaaaacgtctcccgtctncttctaatggcgatcaatcgtagctccgatcatgaatccgacgaaaacacccgtctttaccatccttaccagaactaccaggtcccgatcaaatctcagtatctatacaagcttccgacttctccggaatttctattcacggaagagtctctcaagcagcgtcgatcatggggagaaaatctcactttctacacagggacgggttatctagccggctctgtagccggtgcttcagctgggatcttctctggtatcaagagtttcgaaaatggagacacgacgaagctgaaaatcaacaggattttgaattcgtctggtcaggcaggtcgtacttggggtaatagggttgggattgttgggttgatctacgcagggattgagagtggtgtggtggcggtaactgataaggacgatgtttggaccagtgttgtcgctggtctgggaactggagcggtctttagggcagcacgaggagtgagatctgcggctgtggctggtgcttttggcggaagtgcggctggtgcagttgtggcggggaagcaggttttcaagcggtatgctcacatatgaagaaccggagtgatctttagagccccacctatatgggaaaatcataaaaatcaaagctttttcgggtttctagggtagaattctggtttacattttagcgtatgttaacctgcgaacctttctttatagatataataataacaataataaaggttttacttttg

SEQ ID NO: 77507 - protein, 187 aa, Arabidopsis thaliana
  peptide (1)..(187): Ceres Seq. ID no. 12576668
  misc_feature (48)..(181): Pfam Name: Tim17/Tim22/Tim23 family Pfam Description: Tim17/Tim22/Tim23 family
  misc_feature (1)..(187): Homolog of NCBI NO: 13641346 NR Description: translocase of inner mitochondrial membrane TIM23
  misc_feature (1)..(187): Homolog of NCBI NO: 18394498 NR Description: inner mitochondrial membrane protein, putative; id: At1g17530.1, supported by cDNA: gi_13641345, supported by gi_15010569, supported by cDNA: gi_20147386 [Arabidopsis
  misc_feature (1)..(187): Homolog of NCBI NO: 15218593 NR Description: inner mitochondrial membrane protein; protein id: supported by cDNA: 6793., supported by cDNA: gi_14596208, by cDNA: gi_18377493, supported by cDNA: gi_603055 [Arabidopsis
  misc_feature (1)..(184): Homolog of NCBI NO: 34902184 NR Description: Putative mitochondrial inner membrane protein
  misc_feature (1)..(184): Homolog of NCBI NO: 37536126 NR Description: putaive mitochondrial inner membrane protein
  misc_feature (3)..(187): Homolog of NCBI NO: 15229350 NR Description: putative inner mitochondrial membrane protein; id: At3g04800.1 [Arabidopsis thaliana] putative inner mitochondrial membrane protein [Arabidopsis
  misc_feature (53)..(183): Homolog of NCBI NO: 19075496 NR Description: putative mitochondrial import inner membrane subunit [Schizosaccharomyces pombe] Probable mitochondrial import inner membrane translocase subunit
  misc_feature (16)..(95): Homolog of NCBI NO: 38344267 NR Description: OSJNBa0005N02.5 [Oryza sativa (japonica
  misc_feature (87)..(185): Homolog of NCBI NO: 34394286 NR Description: hypothetical protein [Oryza sativa (japonica
  misc_feature (47)..(179): Homolog of NCBI NO: 40739542 NR Description: hypothetical protein AN6348.2 [Aspergillus
MAINRSSDHESDENTRLYHPYQNYQVPIKSQYLYKLPTSPEFLFTEESLKQRRSWGENLTFYTGTGYLAGSVAGASAGIFSGIKSFENGDTTKLKINRILNSSGQAGRTWGNRVGIVGLIYAGIESGVVAVTDKDDVWTSVVAGLGTGAVFRAARGVRSAAVAGAFGGSAAGAVVAGKQVFKRYAHI

SEQ ID NO: 77508 - DNA, 2303 bp, Arabidopsis thaliana
  misc_feature (1)..(2303): Ceres Seq. ID no. 12576673
  misc_feature: MA Experiment ID: 20000347 Result: Up-regulated in Transcription
  misc_feature: MA Experiment 20000347 PARAMETER Experiment Name: At_2mM_SA_Sub_P Parameter: Age (day) Value: 14
  misc_feature: MA Experiment 20000347 PARAMETER Experiment Name: At_2mM_SA_Sub_P Parameter: Organism Value: A. thaliana
  misc_feature: MA Experiment 20000347 PARAMETER Experiment Name: At_2mM_SA_Sub_P Parameter: Plant Line Value: WS
  misc_feature: MA Experiment 20000347 PARAMETER Experiment Name: At_2mM_SA_Sub_P Parameter: Timepoint (hr) Value: 6
  misc_feature: MA Experiment 20000347 PARAMETER Experiment Name: At_2mM_SA_Sub_P Parameter: Tissue Value: Aerial
  misc_feature: MA Experiment 20000347 PARAMETER Experiment Name: At_2mM_SA_Sub_P Parameter: Treatment Value: 2mM SA vs. No Treatment
ttttgtacgccattagattgaaccctaaaaactctattattggattggatcatcatcgttaaagctccacgccttgtcccaatttcctctttggttctttccttctggtaagaatccgctctctttctctctttcttttttcttcatatggtacgtcatcggcgacatcaattggctcgatttgattcacctgtagctatcaatcaatccctgatctgtttaggtttgatctcctctgttttttcctagggcttgttattgttgtttctcgaaaaagaagaagaagcgatggtattgggattttagggattattgcggtttgttgtatatatatatatagaagctgagggattttgtgttgtgaagaacatcgaatcctgtttttttccgtaagaaagttcttagatttctccaagtgaaagaagatgtcatcagctggtgttgcgttaagtccggttcgtagcgagccattgattatgcctctggttcgtgccaattcttgtcttgattcttatcctgacgacaccatcatgatttaccttacacttcctggatcggtgataccaatgcgagtgcttgagtctgattccattgagtctgttaagcttcggattcagtcttaccgcggctttgttgtgaggaatcagaagcttgttttcggtggtcgagagctagctagaagcaattctaatatgcgtgattatggtgttagtgaaggcaacattctccacttggttcttaagctctctgatcttcaggttcttgatgttaagactacctgtgggaaacactgcaggtttcatgtcgagagagggagaaacattgggtatgtgaagaagcagatttcgaaaaagcgtggagactttgttgatcctgatgaacaggagattctttacgaaggtgagaagttggaagaccagagtcttattaatgacatttgtagaaacgatgactcggttttgcatctgcttgtgcggagatctgctaaagttcgagttaagccggtggagaagaactttgagttgtctattgttgccccacaagcaaaagataagaagggtcgtgaagctaagagcattgtgccaccaaaaaagctttctttggagccggtagttgttaactccaaggctaaagtacctctggtggttaaagatatgattcagtctgcttctgatggacttaaaagtgggaattctccggtcaggtcaagcgaaggtacgggaggagcttatttcatgcagggtccatctggcaacaaatttgtgggtgtgtttaagccaatagatgaggaaccaatggctgagaacaatcctcagggtttaccactttcgccaaacggtgaaggtttgaagaaaggaacaaaggttggagaaggtgcattaagggaagtcgctgcatacattttggatcatcccaaaagtggaaacaaatctatgtttggtgaagagataggttttgctggtgtacctcccacagctatgattgaatgtttgcatccagggtttaaccatcccaaaggaatcaaaaccaagattggatcacttcagatgtttactgagaacgatggcagctgtgaagatatgggtccactttcatttccagtagaagaagttcataagatttctgtgttggatattagactggccaacgcagacagacatggtgggaacattttgatgaccaaggacgaaagcgggaagctcgttttggttcctatagaccatggatactgcttgcctgaaagctttgaagattgcacgtttgagtggctatattggccacaagcccggaaaccgtactctgcagagacccaagagtacataagatcactggacgcagaggaagatattgatctactaaagtttcatggatggaaaatgccggcagagacggctcaaacgctcagaatctcaacgatgctactgaagaaaggagtggaaagaggactaacagcatttgagattggaaccataatgtgcagagaaacacttagcaagaagtctctggtggaggaaatggtagaggaagctcaagaagctgtgcttccagggacgagcgaagctgcattcctcgaagccctatccgatgtgatggattaccatctcgatcactctcaggaacactaaaaatggttcttgtttaattcaaaactctggtatatactctttggtttgctttttataaacctgttggcttttgtatttttaaaactttttcatttctgtcattctttggacatgttcaaggtgttttgttaacttcactcagacatatttcatggtaatgacaatttaagtgtttac

SEQ ID NO: 77509 - protein, 566 aa, Arabidopsis thaliana; identical to SEQ ID NO: 44429
  peptide (1)..(566): Ceres Seq. ID no. 12576674
  misc_feature (264)..(520): Pfam Name: Phosphatidylinositol 3- and 4-kinase Pfam Description: Phosphatidylinositol 3- and 4-kinase
  misc_feature (1)..(566): Homolog of NCBI NO: 18407090 NR Description: expressed protein; protein id: At2g46500.1, by cDNA: gi_16930424 [Arabidopsis thaliana]
  misc_feature (1)..(561): Homolog of NCBI NO: 15237921 NR Description: ubiquitin; protein id: At5g24240.1 [Arabidopsis
  misc_feature (1)..(561): Homolog of NCBI NO: 34904388 NR Description: unnamed protein product [Oryza sativa (japonica group)] >gi|8468000|dbj|BAA96601.1| unnamed protein product
  misc_feature (253)..(561): Homolog of NCBI NO: 6633833 NR Description: F1N19.4 [Arabidopsis thaliana]
  misc_feature (271)..(561): Homolog of NCBI NO: 15217655 NR Description: unknown protein; protein id: At1g64460.1
  misc_feature (240)..(520): Homolog of NCBI NO: 18395629 NR Description: expressed protein; protein id: At2g03890.1, by cDNA: gi_15810174 [Arabidopsis thaliana] At2g03890/T18C20.9 [Arabidopsis thaliana]
  misc_feature (240)..(520): Homolog of NCBI NO: 25363315 NR Description: hypothetical protein At2g03890 [imported] -
  misc_feature (241)..(561): Homolog of NCBI NO: 18395825 NR Description: expressed protein; protein id: At1g26270.1, by cDNA: gi_14334681, supported by cDNA: gi_16648786, supported cDNA: gi_18700158 [Arabidopsis thaliana] >gi|25363317|pir||A86389
  misc_feature (236)..(545): Homolog of NCBI NO: 15228965 NR Description: putative protein; protein id: At3g56600.1
  misc_feature (1)..(280): Homolog of NCBI NO: 6633833 NR Description: F1N19.4 [Arabidopsis thaliana]

SEQ ID NO: 77510 - protein, 549 aa, Arabidopsis thaliana; identical to SEQ ID NO: 44430
  peptide (1)..(549): Ceres Seq. ID no. 12576675
  misc_feature (247)..(503): Pfam Name: Phosphatidylinositol 3- and 4-kinase Pfam Description: Phosphatidylinositol 3- and 4-kinase
  misc_feature (1)..(549): Homolog of NCBI NO: 18407090 NR Description: expressed protein; protein id: At2g46500.1, by cDNA: gi_16930424 [Arabidopsis thaliana]
  misc_feature (1)..(544): Homolog of NCBI NO: 15237921 NR Description: ubiquitin; protein id: At5g24240.1 [Arabidopsis
  misc_feature (1)..(544): Homolog of NCBI NO: 34904388 NR Description: unnamed protein product [Oryza sativa (japonica group)] >gi|8468000|dbj|BAA96601.1| unnamed protein product
  misc_feature (236)..(544): Homolog of NCBI NO: 6633833 NR Description: F1N19.4 [Arabidopsis thaliana]
  misc_feature (254)..(544): Homolog of NCBI NO: 15217655 NR Description: unknown protein; protein id: At1g64460.1
  misc_feature (223)..(503): Homolog of NCBI NO: 18395629 NR Description: expressed protein; protein id: At2g03890.1, by cDNA: gi_15810174 [Arabidopsis thaliana] At2g03890/T18C20.9 [Arabidopsis thaliana]
  misc_feature (223)..(503): Homolog of NCBI NO: 25363315 NR Description: hypothetical protein At2g03890 [imported] -
  misc_feature (224)..(544): Homolog of NCBI NO: 18395825 NR Description: expressed protein; protein id: At1g26270.1, by cDNA: gi_14334681, supported by cDNA: gi_16648786, supported cDNA: gi_18700158 [Arabidopsis thaliana] >gi|25363317|pir||A86389
  misc_feature (219)..(528): Homolog of NCBI NO: 15228965 NR Description: putative protein; protein id: At3g56600.1
  misc_feature (1)..(263): Homolog of NCBI NO: 6633833 NR Description: F1N19.4 [Arabidopsis thaliana]

SEQ ID NO: 77511 - protein, 531 aa, Arabidopsis thaliana; identical to SEQ ID NO: 44431
  peptide (1)..(531): Ceres Seq. ID no. 12576676
  misc_feature (229)..(485): Pfam Name: Phosphatidylinositol 3- and 4-kinase Pfam Description: Phosphatidylinositol 3- and 4-kinase
  misc_feature (1)..(531): Homolog of NCBI NO: 18407090 NR Description: expressed protein; protein id: At2g46500.1, by cDNA: gi_16930424 [Arabidopsis thaliana]
  misc_feature (1)..(526): Homolog of NCBI NO: 15237921 NR Description: ubiquitin; protein id: At5g24240.1 [Arabidopsis
  misc_feature (1)..(526): Homolog of NCBI NO: 34904388 NR Description: unnamed protein product [Oryza sativa (japonica group)] >gi|8468000|dbj|BAA96601.1| unnamed protein product
  misc_feature (218)..(526): Homolog of NCBI NO: 6633833 NR Description: F1N19.4 [Arabidopsis thaliana]
  misc_feature (236)..(526): Homolog of NCBI NO: 15217655 NR Description: unknown protein; protein id: At1g64460.1
  misc_feature (205)..(485): Homolog of NCBI NO: 18395629 NR Description: expressed protein; protein id: At2g03890.1, by cDNA: gi_15810174 [Arabidopsis thaliana] At2g03890/T18C20.9 [Arabidopsis thaliana]
  misc_feature (205)..(485): Homolog of NCBI NO: 25363315 NR Description: hypothetical protein At2g03890 [imported] -
  misc_feature (206)..(526): Homolog of NCBI NO: 18395825 NR Description: expressed protein; protein id: At1g26270.1, by cDNA: gi_14334681, supported by cDNA: gi_16648786, supported cDNA: gi_18700158 [Arabidopsis thaliana] >gi|25363317|pir||A86389
  misc_feature (201)..(510): Homolog of NCBI NO: 15228965 NR Description: putative protein; protein id: At3g56600.1
  misc_feature (1)..(245): Homolog of NCBI NO: 6633833 NR Description: F1N19.4 [Arabidopsis thaliana]

SEQ ID NO: 77512 - DNA, 2433 bp, Arabidopsis thaliana
  misc_feature (1)..(2433): Ceres Seq. ID no. 12576688
  misc_feature: MA Experiment ID: 20000214 Result: Down-regulated in Transcription
  misc_feature: MA Experiment 20000214 PARAMETER Experiment Name: At_4deg_Cold_P Parameter: Timepoint (hr) Value: 6
  misc_feature: MA Experiment ID: 20001450 Result: Up-regulated in Transcription
  misc_feature: MA Experiment 20001450 PARAMETER Experiment Name: At_Far-red-induction_P Parameter: Age (day) Value: 7
  misc_feature: MA Experiment 20001450 PARAMETER Experiment Name: At_Far-red-induction_P Parameter: Light Value: Far-red vs. White
  misc_feature: MA Experiment 20001450 PARAMETER Experiment Name: At_Far-red-induction_P Parameter: Organism Value: A. thaliana
  misc_feature: MA Experiment 20001450 PARAMETER Experiment Name: At_Far-red-induction_P Parameter: Plant Line Value: Columbia
  misc_feature: MA Experiment 20001450 PARAMETER Experiment Name: At_Far-red-induction_P Parameter: Timepoint (hr) Value: 8
  misc_feature: MA Experiment 20001450 PARAMETER Experiment Name: At_Far-red-induction_P Parameter: Tissue Value: Whole Plant
ctctcctcttcttcggatcgtcttttactttgtgaacgatggaccaacaaccggagaggcgagaaggccggagttttccggagcgtaaaggacagaagcggaagctagaggaaggagccgccgccgtagaagatcgagagatctctgccgtcagcaccgacggaggccaagcgcttcttagcgaggttgctgctcaagtctcggtactaaactctgccttctcttggcaagagtccgatcgcgctgctgccaagcgagccactcaagttctggctgagctagccaaaaacgaggatttagtgaacgtgattgtcgacggaggtgctgttccagctcttatgacgcatctacaggcgccaccatacaacgacggggacttggctgagaagccgtacgaacacgaagttgagaagggaagcgcttttgcgcttggtcttcttgctattaagccagagtatcagaaactgatagtagacaaaggtgccttacctcatttagtgaatttgttgaagagaaacaaagatggttctagctctcgagctgtgaatagtgttatcagaagagcggctgatgccatcaccaatcttgctcatgagaacagcagtatcaagacccgtgttagggtagaaggcggtattccacctctcgtggagttgcttgaattttctgattcaaaggtccagagagcagcagcaggggcattgagaacccttgcatttaaaaatgatgataacaagaatcagatagttgaatgcaatgctcttcccacacttattctaatgctaggatcagaggatgctgctatacattatgaagcggttggagttataggcaatctagtacactcgtctccacacattaaaaaagaggttcttactgccggggcgttgcaacctgtcattggtcttcttagctcctgttgccctgagagtcaaagagaggcggctttattacttgggcagtttgcctcaactgattctgattgtaaggtgcacattgtgcaaaggggtgctgtccgtcctttaattgagatgcttcagtccccggatgtccagttgaaggaaatgtcggcctttgcactgggtagattggcacaggatgcccacaatcaagctggtattgcccatagtggtggtttaggacctttattgaagcttctcgattcaagaaatggatcattgcaacacaatgctgcatttgctctttatggccttgccgataatgaggataatgtgtcagattttatcagggtgggaggtatccaaaagctacaggatggagagtttattgttcaagcaactaaagattgtgtttccaaaacactaaagagattggaggagaagattcatggaagagttctgagacatctgttgtacctaatgcgcatttcagagaagtctatccaaagacgagttgctcttgcccttgctcatctctgttcacccgaggatcaacgaaccatattcatagatgacaacgggttggagttgctactcggtcttcttggttctttaaacactaagcagcaacttgacggtgcagcagcgttgtacaaattagcaaataaatctatggcactttctccagttgatgctgctcctccttctccaacacaaagggtttatctcggagagcaatatgtaaataatgctacgctgtctgatgtaacctttctagtcgaaggaaggacattctatgcacacagaatttgtctgctggcatcctcagatgcatttcgtgcaatgtttgatggtggttacagagaaaaagacgctagagatattgagattccaaatatcaaatgggaggtgtttgagttaatgatgaggtttatatacactggatctgtcgacataacaaatgagatatcaaaagatcttctaagagcagcggatcagtatctcttggagggcctgaaacgactctgtgaatacacaattgctcaggatattacgttggaaagtataggagacatgtacgagctatcagaagcattccatgcgatgtcgctgaggcaagcttgtatcatgttcatcctggagcatttcgataaactgagttcaatgccttggcagaacgagctggtgcagagaacaataccagagataagagagtacttttgtagagccctaacaaagtctactacaaacctgcaaagcttgaggttgtagaatgcggaagaagaagactgcacttaactagaggtaagtagacaaggaattatatagagagaaagagagagagagatcaagagccgccattagaggtctttatcgtcctgtactgggttgtcttagttatttgctgtgctttttggttcgttttggtcattttgtattgtattaattaatctcctctgatcacaatcggtcttgaatgaaatcgctaccctttgtatccaaaaataccattgtggtataacttccactattc

SEQ ID NO: 77513 - protein, 710 aa, Arabidopsis thaliana
  peptide (1)..(710): Ceres Seq. ID no. 12576689
  misc_feature (530)..(638): Pfam Name: BTB/POZ domain Pfam Description: BTB/POZ domain
  misc_feature (1)..(447): Homolog of NCBI NO: 15239713 NR Description: putative protein; protein id: At5g19330.1
  misc_feature (1)..(700): Homolog of NCBI NO: 18491179 NR Description: unknown protein [Arabidopsis thaliana]
  misc_feature (1)..(700): Homolog of NCBI NO: 30684235 NR Description: expressed protein [Arabidopsis thaliana]
  misc_feature (1)..(700): Homolog of NCBI NO: 9955550 NR Description: putative protein [Arabidopsis thaliana]
  misc_feature (67)..(639): Homolog of NCBI NO: 15239713 NR Description: putative protein; protein id: At5g19330.1
  misc_feature (122)..(489): Homolog of NCBI NO: 6320824 NR Description: An armadillo repeat-containing protein localized the vacuolar membrane; Vac8p [Saccharomyces cerevisiae]
  misc_feature (481)..(673): Homolog of NCBI NO: 34365118 NR Description: hypothetical protein [Homo sapiens]
  misc_feature (481)..(673): Homolog of NCBI NO: 21749964 NR Description: unnamed protein product [Homo sapiens]
  misc_feature (530)..(698): Homolog of NCBI NO: 24646733 NR Description: CG9924-PA [Drosophila melanogaster]
  misc_feature (481)..(677): Homolog of NCBI NO: 19705529 NR Description: Cca3 protein [Rattus norvegicus]
MDQQPERREGRSFPERKGQKRKLEEGAAAVEDREISAVSTDGGQALLSEVAAQVSVLNSAFSWQESDRAAAKRATQVLAELAKNEDLVNVIVDGGAVPALMTHLQAPPYNDGDLAEKPYEHEVEKGSAFALGLLAIKPEYQKLIVDKGALPHLVNLLKRNKDGSSSRAVNSVIRRAADAITNLAHENSSIKTRVRVEGGIPPLVELLEFSDSKVQRAAAGALRTLAFKNDDNKNQIVECNALPTLILMLGSEDAAIHYEAVGVIGNLVHSSPHIKKEVLTAGALQPVIGLLSSCCPESQREAALLLGQFASTDSDCKVHIVQRGAVRPLIEMLQSPDVQLKEMSAFALGRLAQDAHNQAGIAHSGGLGPLLKLLDSRNGSLQHNAAFALYGLADNEDNVSDFIRVGGIQKLQDGEFIVQATKDCVSKTLKRLEEKIHGRVLRHLLYLMRISEKSIQRRVALALAHLCSPEDQRTIFIDDNGLELLLGLLGSLNTKQQLDGAAALYKLANKSMALSPVDAAPPSPTQRVYLGEQYVNNATLSDVTFLVEGRTFYAHRICLLASSDAFRAMFDGGYREKDARDIEIPNIKWEVFELMMRFIYTGSVDITNEISKDLLRAADQYLLEGLKRLCEYTIAQDITLESIGDMYELSEAFHAMSLRQACIMFILEHFDKLSSMPWQNELVQRTIPEIREYFCRALTKSTTNLQSLRL

SEQ ID NO: 77514 - protein, 610 aa, Arabidopsis thaliana
  peptide (1)..(610): Ceres Seq. ID no. 12576690
  misc_feature (430)..(538): Pfam Name: BTB/POZ domain Pfam Description: BTB/POZ domain
  misc_feature (1)..(347): Homolog of NCBI NO: 15239713 NR Description: putative protein; protein id: At5g19330.1
  misc_feature (1)..(600): Homolog of NCBI NO: 18491179 NR Description: unknown protein [Arabidopsis thaliana]
  misc_feature (1)..(600): Homolog of NCBI NO: 30684235 NR Description: expressed protein [Arabidopsis thaliana]
  misc_feature (1)..(600): Homolog of NCBI NO: 9955550 NR Description: putative protein [Arabidopsis thaliana]
  misc_feature (1)..(539): Homolog of NCBI NO: 15239713 NR Description: putative protein; protein id: At5g19330.1
  misc_feature (22)..(389): Homolog of NCBI NO: 6320824 NR Description: An armadillo repeat-containing protein localized the vacuolar membrane; Vac8p [Saccharomyces cerevisiae]
  misc_feature (381)..(573): Homolog of NCBI NO: 34365118 NR Description: hypothetical protein [Homo sapiens]
  misc_feature (381)..(573): Homolog of NCBI NO: 21749964 NR Description: unnamed protein product [Homo sapiens]
  misc_feature (430)..(598): Homolog of NCBI NO: 24646733 NR Description: CG9924-PA [Drosophila melanogaster]
  misc_feature (381)..(577): Homolog of NCBI NO: 19705529 NR Description: Cca3 protein [Rattus norvegicus]
MTHLQAPPYNDGDLAEKPYEHEVEKGSAFALGLLAIKPEYQKLIVDKGALPHLVNLLKRNKDGSSSRAVNSVIRRAADAITNLAHENSSIKTRVRVEGGIPPLVELLEFSDSKVQRAAAGALRTLAFKNDDNKNQIVECNALPTLILMLGSEDAAIHYEAVGVIGNLVHSSPHIKKEVLTAGALQPVIGLLSSCCPESQREAALLLGQFASTDSDCKVHIVQRGAVRPLIEMLQSPDVQLKEMSAFALGRLAQDAHNQAGIAHSGGLGPLLKLLDSRNGSLQHNAAFALYGLADNEDNVSDFIRVGGIQKLQDGEFIVQATKDCVSKTLKRLEEKIHGRVLRHLLYLMRISEKSIQRRVALALAHLCSPEDQRTIFIDDNGLELLLGLLGSLNTKQQLDGAAALYKLANKSMALSPVDAAPPSPTQRVYLGEQYVNNATLSDVTFLVEGRTFYAHRICLLASSDAFRAMFDGGYREKDARDIEIPNIKWEVFELMMRFIYTGSVDITNEISKDLLRAADQYLLEGLKRLCEYTIAQDITLESIGDMYELSEAFHAMSLRQACIMFILEHFDKLSSMPWQNELVQRTIPEIREYFCRALTKSTTNLQSLRL

SEQ ID NO: 77515 - protein, 463 aa, Arabidopsis thaliana
  peptide (1)..(463): Ceres Seq. ID no. 12576691
  misc_feature (283)..(391): Pfam Name: BTB/POZ domain Pfam Description: BTB/POZ domain
  misc_feature (1)..(200): Homolog of NCBI NO: 15239713 NR Description: putative protein; protein id: At5g19330.1
  misc_feature (1)..(453): Homolog of NCBI NO: 18491179 NR Description: unknown protein [Arabidopsis thaliana]
  misc_feature (1)..(453): Homolog of NCBI NO: 30684235 NR Description: expressed protein [Arabidopsis thaliana]
  misc_feature (1)..(453): Homolog of NCBI NO: 9955550 NR Description: putative protein [Arabidopsis thaliana]
  misc_feature (1)..(392): Homolog of NCBI NO: 15239713 NR Description: putative protein; protein id: At5g19330.1
  misc_feature (1)..(242): Homolog of NCBI NO: 6320824 NR Description: An armadillo repeat-containing protein localized the vacuolar membrane; Vac8p [Saccharomyces cerevisiae]
  misc_feature (234)..(426): Homolog of NCBI NO: 34365118 NR Description: hypothetical protein [Homo sapiens]
  misc_feature (234)..(426): Homolog of NCBI NO: 21749964 NR Description: unnamed protein product [Homo sapiens]
  misc_feature (283)..(451): Homolog of NCBI NO: 24646733 NR Description: CG9924-PA [Drosophila melanogaster]
  misc_feature (234)..(430): Homolog of NCBI NO: 19705529 NR Description: Cca3 protein [Rattus norvegicus]
MLGSEDAAIHYEAVGVIGNLVHSSPHIKKEVLTAGALQPVIGLLSSCCPESQREAALLLGQFASTDSDCKVHIVQRGAVRPLIEMLQSPDVQLKEMSAFALGRLAQDAHNQAGIAHSGGLGPLLKLLDSRNGSLQHNAAFALYGLADNEDNVSDFIRVGGIQKLQDGEFIVQATKDCVSKTLKRLEEKIHGRVLRHLLYLMRISEKSIQRRVALALAHLCSPEDQRTIFIDDNGLELLLGLLGSLNTKQQLDGAAALYKLANKSMALSPVDAAPPSPTQRVYLGEQYVNNATLSDVTFLVEGRTFYAHRICLLASSDAFRAMFDGGYREKDARDIEIPNIKWEVFELMMRFIYTGSVDITNEISKDLLRAADQYLLEGLKRLCEYTIAQDITLESIGDMYELSEAFHAMSLRQACIMFILEHFDKLSSMPWQNELVQRTIPEIREYFCRALTKSTTNLQSLRL

SEQ ID NO: 77516 - DNA, 2120 bp, Arabidopsis thaliana
  misc_feature (1)..(2120): Ceres Seq. ID no. 12576716
  misc_feature: MA Experiment ID: 108434 Result: Up-regulated in Transcription
  misc_feature: MA Experiment 108434 PARAMETER Experiment Name: At_Root_Tips_cDNA_P Parameter: Tissue Value: Root Tips
  misc_feature: MA Experiment ID: 108488 Result: Up-regulated in Transcription
  misc_feature: MA Experiment ID: 108595 Result: Down-regulated in Transcription
  misc_feature: MA Experiment 108595 PARAMETER Experiment Name: At_Ler-pi_Ovule_cDNA_P Parameter: Plant Line Value: null
  misc_feature: MA Experiment ID: 20000113 Result: Down-regulated in Transcription
  misc_feature: MA Experiment 20000113 PARAMETER Experiment Name: At_42deg_Heat_cDNA_P Parameter: Temperature (deg C) Value: 42 vs. 22
  misc_feature: MA Experiment 20000113 PARAMETER Experiment Name: At_42deg_Heat_cDNA_P Parameter: Timepoint (hr) Value: 8
  misc_feature: MA Experiment 20000113 PARAMETER Experiment Name: At_42deg_Heat_cDNA_P Parameter: Tissue Value: Aerial
  misc_feature: MA Experiment ID: 20000179 Result: Up-regulated in Transcription
  misc_feature: MA Experiment 20000179 PARAMETER Experiment Name: At_Germinating_Seeds_P Parameter: Age (hr) Value: 6 vs. 0
  misc_feature: MA Experiment 20000179 PARAMETER Experiment Name: At_Germinating_Seeds_P Parameter: Tissue Value: Germinating Seeds
  misc_feature: MA Experiment ID: 20000214 Result: Down-regulated in Transcription
  misc_feature: MA Experiment 20000214 PARAMETER Experiment Name: At_4deg_Cold_P Parameter: Timepoint (hr) Value: 6
  misc_feature: MA Experiment ID: 20000224 Result: Down-regulated in Transcription
  misc_feature: MA Experiment ID: 20000234 Result: Down-regulated in Transcription
  misc_feature: MA Experiment 20000234 PARAMETER Experiment Name: At_Siliques_P Parameter: Age (day) Value: 21
  misc_feature: MA Experiment 20000234 PARAMETER Experiment Name: At_Siliques_P Parameter: Organism Value: A. thaliana
  misc_feature: MA Experiment 20000234 PARAMETER Experiment Name: At_Siliques_P Parameter: Plant Line Value: WS
  misc_feature: MA Experiment 20000234 PARAMETER Experiment Name: At_Siliques_P Parameter: Tissue Value: Less Than 5mm Siliques vs. Whole Plant
  misc_feature: MA Experiment ID: 20000264 Result: Down-regulated in Transcription
  misc_feature: MA Experiment 20000264 PARAMETER Experiment Name: At_Open_Flower_P Parameter: Age (day) Value: 21
  misc_feature: MA Experiment 20000264 PARAMETER Experiment Name: At_Open_Flower_P Parameter: Plant Line Value: WS
  misc_feature: MA Experiment 20000264 PARAMETER Experiment Name: At_Open_Flower_P Parameter: Tissue Value: Open Flower vs. Whole Plant
  misc_feature: MA Experiment ID: 20000265 Result: Down-regulated in Transcription
  misc_feature: MA Experiment 20000265 PARAMETER Experiment Name: At_Open_Flower_P Parameter: Age (day) Value: 21
  misc_feature: MA Experiment 20000265 PARAMETER Experiment Name: At_Open_Flower_P Parameter: Plant Line Value: WS
  misc_feature: MA Experiment 20000265 PARAMETER Experiment Name: At_Open_Flower_P Parameter: Tissue Value: Closed Flower vs. Whole Plant
  misc_feature: MA Experiment ID: 20000286 Result: Down-regulated in Transcription
  misc_feature: MA Experiment 20000286 PARAMETER Experiment Name: At_Open_Flower_P Parameter: Age (day) Value: 21
  misc_feature: MA Experiment 20000286 PARAMETER Experiment Name: At_Open_Flower_P Parameter: Plant Line Value: WS
  misc_feature: MA Experiment 20000286 PARAMETER Experiment Name: At_Open_Flower_P Parameter: Tissue Value: Half Open vs. Whole Plant
  misc_feature: MA Experiment ID: 20000794 Result: Down-regulated in Transcription
  misc_feature: MA Experiment 20000794 PARAMETER Experiment Name: At_Petals_P Parameter: Age (day) Value: 23-25 days
  misc_feature: MA Experiment 20000794 PARAMETER Experiment Name: At_Petals_P Parameter: Plant Line Value: WS
  misc_feature: MA Experiment 20000794 PARAMETER Experiment Name: At_Petals_P Parameter: Tissue Value: Petals vs. Whole plant
  misc_feature: MA Experiment ID: 20001248 Result: Up-regulated in Transcription
  misc_feature: MA Experiment 20001248 PARAMETER Experiment Name: At_Far-red-induction_P Parameter: Age (day) Value: 7
  misc_feature: MA Experiment 20001248 PARAMETER Experiment Name: At_Far-red-induction_P Parameter: Light Value: Far-red vs. White
  misc_feature: MA Experiment 20001248 PARAMETER Experiment Name: At_Far-red-induction_P Parameter: Organism Value: A. thaliana
  misc_feature: MA Experiment 20001248 PARAMETER Experiment Name: At_Far-red-induction_P Parameter: Plant Line Value: Columbia
  misc_feature: MA Experiment 20001248 PARAMETER Experiment Name: At_Far-red-induction_P Parameter: Timepoint (hr) Value: 4
  misc_feature: MA Experiment 20001248 PARAMETER Experiment Name: At_Far-red-induction_P Parameter: Tissue Value: Whole Plant
  misc_feature: MA Experiment ID: 20001450 Result: Up-regulated in Transcription
  misc_feature: MA Experiment 20001450 PARAMETER Experiment Name: At_Far-red-induction_P Parameter: Age (day) Value: 7
  misc_feature: MA Experiment 20001450 PARAMETER Experiment Name: At_Far-red-induction_P Parameter: Light Value: Far-red vs. White
  misc_feature: MA Experiment 20001450 PARAMETER Experiment Name: At_Far-red-induction_P Parameter: Organism Value: A. thaliana
  misc_feature: MA Experiment 20001450 PARAMETER Experiment Name: At_Far-red-induction_P Parameter: Plant Line Value: Columbia
  misc_feature: MA Experiment 20001450 PARAMETER Experiment Name: At_Far-red-induction_P Parameter: Timepoint (hr) Value: 8
  misc_feature: MA Experiment 20001450 PARAMETER Experiment Name: At_Far-red-induction_P Parameter: Tissue Value: Whole Plant
aaaaaaaaaaaaaaatccaaattcaacactctcacacttcgatatctccgccttcattctcctcagagccaactgtcctgagatttcgatttcgatttctccgatctctcttcctccgtcgccggcgaaaccatgtctcagtctattcaattctccactccttcacacactcctcaccttctccatctccctcactcacaattcaaccgtcctctctcctctatctccttccgtcgcttccctctaacaaccatcaaatacacttccatcagagcctcctcgtcatcatctccttcaccggatctcgattcatcgtcctcatcatcatcctcgcaagtacttctctcacctaacggtactggtgctgtgaagtctgatgagagatccgttgtcgctacggcggttacgactgatacgtctgggattgaggttgatactgtgacggaagctgagcttaaggagaatggatttagaagtacgaggaggacgaagctgatctgtacgatcggaccggcgacttgtggatttgagcagcttgaggcgcttgctgtgggaggtatgaatgtggcaaggcttaatatgtgtcacggtacgcgtgattggcaccgcggtgtgattcgtagtgttcggaggcttaatgaggagaaaggctttgcggttgctattatgatggatactgaaggtagtgagattcatatgggagatcttggtggtgaagcttcagctaaagcagaggatggtgaggtttggactttcactgttagagcttttgattcttctcgtcctgaacgtaccattagtgttagctacgatggtttcgctgaagatgtaagagttggggatgaacttttggttgatggtgggatggtgagatttgaagtgattgagaagattggtcctgatgttaagtgtctatgtaccgatcctggattgttgcttcctcgagctaacttgacgttttggagagatggaagtcttgtacgagagcgtaatgccatgcttccaacaatttcttccaaggactggttggatattgattttggaattgctgaaggtgtggatttcattgctgtatcgtttgtcaagtcggctgaagtcattaatcaccttaaaagttatcttgctgctcgttcccgtggaggggaaattggagtgattgcaaagatcgagagtatcgattcactgaccaatttggaagaaattattctagcatcagatggggccatggttgcaagaggagatctgggagctcagatacctcttgagcaagttccagcagctcaacagagaatcgtccaagtatgcagagctcttaacaaacccgtcattgtcgcttcacagctattggagtccatgattgagtacccaactccaaccagagcagaagttgccgacgtgtctgaagcagtaagacaaagatcagatgcattgatgctctctggagaatcagctatgggacaattcccagacaaggcgctcacggttctaaggactgtcagtttaagaatcgagagatggtggagggaagagaaacgccatgagtctgtaccgcttcaagccataggctcttcattttcagacaaaatctcagaagagatctgtaactcagctgctaaaatggctaacaatcttggagtggacgcggttttcgtttacacaacgagcggacacatggcatcactggtctcccgatgtcgcccggactgcccgatctttgctttcacaaccacaacctcagtgagaagacgcttaaacctacaatggggacttatcccattccgtctcagcttctcagacgacatggaaagcaacttgaacaaaacattctcgttactgaaatcaagaggtatgatcaaatctggtgacctcgtgatcgcagtctcggacatgctgcaatcaatccaggtaatgaacgtcccgtaattctctctctttatacaatttcgcaatcccgcaaaagagtgttttgtttcctacttttgttactgtttttagactactcttacattagattccagaggcatcatcatcttcggtttgttaacaacagtaatgtgtaagctttgtttgtagtgtgtactgtttgtttttggttttcaataatatcagtaatcttattc

SEQ ID NO: 77517 - protein, 596 aa, Arabidopsis thaliana; identical to SEQ ID NO: 29225
  peptide (1)..(596): Ceres Seq. ID no. 12576717
  misc_feature (486)..(596): Pfam Name: Pyruvate kinase, alpha/beta domain Pfam Description: Pyruvate kinase, alpha/beta domain
  misc_feature (1)..(596): Homolog of NCBI NO: 18403597 NR Description: pyruvate kinase, putative; protein id: supported by cDNA: 13351., supported by cDNA: gi_15983774, by cDNA: gi_16604371 [Arabidopsis thaliana]
  misc_feature (1)..(596): Homolog of NCBI NO: 21537361 NR Description: pyruvate kinase, putative [Arabidopsis thaliana]
  misc_feature (1)..(596): Homolog of NCBI NO: 2497539 NR Description: Pyruvate kinase isozyme A, chloroplast precursor
  misc_feature (1)..(596): Homolog of NCBI NO: 2497541 NR Description: Pyruvate kinase isozyme A, chloroplast precursor
  misc_feature (1)..(596): Homolog of NCBI NO: 2129963 NR Description: pyruvate kinase (EC 2.7.1.40) A, chloroplast -
  misc_feature (140)..(596): Homolog of NCBI NO: 7434450 NR Description: pyruvate kinase (EC 2.7.1.40) isoform beta -
  misc_feature (143)..(596): Homolog of NCBI NO: 34393488 NR Description: putative Pyruvate kinase isozyme A, chloroplast
  misc_feature (273)..(596): Homolog of NCBI NO: 21954080 NR Description: putative pyruvate kinase [Arabidopsis thaliana]
  misc_feature (60)..(585): Homolog of NCBI NO: 29788835 NR Description: putative pyruvate kinase [Oryza sativa (japonica
  misc_feature (115)..(590): Homolog of NCBI NO: 37537030 NR Description: putative pyruvate kinase [Oryza sativa (japonica group)] >gi|19225011|gb|AAL86487.1| putative pyruvate kinase

SEQ ID NO: 77518 - protein, 454 aa, Arabidopsis thaliana; identical to SEQ ID NO: 29226
  peptide (1)..(454): Ceres Seq. ID no. 12576718
  misc_feature (344)..(454): Pfam Name: Pyruvate kinase, alpha/beta domain Pfam Description: Pyruvate kinase, alpha/beta domain
  misc_feature (1)..(454): Homolog of NCBI NO: 18403597 NR Description: pyruvate kinase, putative; protein id: supported by cDNA: 13351., supported by cDNA: gi_15983774, by cDNA: gi_16604371 [Arabidopsis thaliana]
  misc_feature (1)..(454): Homolog of NCBI NO: 21537361 NR Description: pyruvate kinase, putative [Arabidopsis thaliana]
  misc_feature (1)..(454): Homolog of NCBI NO: 2497539 NR Description: Pyruvate kinase isozyme A, chloroplast precursor
  misc_feature (1)..(454): Homolog of NCBI NO: 2497541 NR Description: Pyruvate kinase isozyme A, chloroplast precursor
  misc_feature (1)..(454): Homolog of NCBI NO: 2129963 NR Description: pyruvate kinase (EC 2.7.1.40) A, chloroplast -
  misc_feature (1)..(454): Homolog of NCBI NO: 7434450 NR Description: pyruvate kinase (EC 2.7.1.40) isoform beta -
  misc_feature (1)..(454): Homolog of NCBI NO: 34393488 NR Description: putative Pyruvate kinase isozyme A, chloroplast
  misc_feature (131)..(454): Homolog of NCBI NO: 21954080 NR Description: putative pyruvate kinase [Arabidopsis thaliana]
  misc_feature (1)..(443): Homolog of NCBI NO: 29788835 NR Description: putative pyruvate kinase [Oryza sativa (japonica
  misc_feature (1)..(448): Homolog of NCBI NO: 37537030 NR Description: putative pyruvate kinase [Oryza sativa (japonica group)] >gi|19225011|gb|AAL86487.1| putative pyruvate kinase

SEQ ID NO: 77519 - protein, 447 aa, Arabidopsis thaliana; identical to SEQ ID NO: 29227
  peptide (1)..(447): Ceres Seq. ID no. 12576719
  misc_feature (337)..(447): Pfam Name: Pyruvate kinase, alpha/beta domain Pfam Description: Pyruvate kinase, alpha/beta domain
  misc_feature (1)..(447): Homolog of NCBI NO: 18403597 NR Description: pyruvate kinase, putative; protein id: supported by cDNA: 13351., supported by cDNA: gi_15983774, by cDNA: gi_16604371 [Arabidopsis thaliana]
  misc_feature (1)..(447): Homolog of NCBI NO: 21537361 NR Description: pyruvate kinase, putative [Arabidopsis thaliana]
  misc_feature (1)..(447): Homolog of NCBI NO: 2497539 NR Description: Pyruvate kinase isozyme A, chloroplast precursor
  misc_feature (1)..(447): Homolog of NCBI NO: 2497541 NR Description: Pyruvate kinase isozyme A, chloroplast precursor
  misc_feature (1)..(447): Homolog of NCBI NO: 2129963 NR Description: pyruvate kinase (EC 2.7.1.40) A, chloroplast -
  misc_feature (1)..(447): Homolog of NCBI NO: 7434450 NR Description: pyruvate kinase (EC 2.7.1.40) isoform beta -
  misc_feature (1)..(447): Homolog of NCBI NO: 34393488 NR Description: putative Pyruvate kinase isozyme A, chloroplast
  misc_feature (124)..(447): Homolog of NCBI NO: 21954080 NR Description: putative pyruvate kinase [Arabidopsis thaliana]
  misc_feature (1)..(436): Homolog of NCBI NO: 29788835 NR Description: putative pyruvate kinase [Oryza sativa (japonica
  misc_feature (1)..(441): Homolog of NCBI NO: 37537030 NR Description: putative pyruvate kinase [Oryza sativa (japonica group)] >gi|19225011|gb|AAL86487.1| putative pyruvate kinase

SEQ ID NO: 77520 - DNA, 1072 bp, Arabidopsis thaliana
  misc_feature (1)..(1072): Ceres Seq. ID no. 12576740
  misc_feature: MA Experiment ID: 108434 Result: Up-regulated in Transcription
  misc_feature: MA Experiment 108434 PARAMETER Experiment Name: At_Root_Tips_cDNA_P Parameter: Tissue Value: Root Tips
  misc_feature: MA Experiment ID: 108461 Result: Up-regulated in Transcription
  misc_feature: MA Experiment 108461 PARAMETER Experiment Name: At_Germinating_Seeds_cDNA_P Parameter: Age (day) Value: 1 vs. 0
  misc_feature: MA Experiment 108461 PARAMETER Experiment Name: At_Germinating_Seeds_cDNA_P Parameter: Tissue Value: Germinating Seeds
  misc_feature: MA Experiment ID: 108608 Result: Up-regulated in Transcription
  misc_feature: MA Experiment 108608 PARAMETER Experiment Name: At_100uM_ABA_cDNA_P Parameter: Timepoint (hr) Value: 1
  misc_feature: MA Experiment 108608 PARAMETER Experiment Name: At_100uM_ABA_cDNA_P Parameter: Tissue Value: Aerial
  misc_feature: MA Experiment 108608 PARAMETER Experiment Name: At_100uM_ABA_cDNA_P Parameter: Treatment Value: 100uM ABA vs. No Treatment
  misc_feature: MA Experiment ID: 20000166 Result: Up-regulated in Transcription
  misc_feature: MA Experiment 20000166 PARAMETER Experiment Name: At_100uM_ABA_P Parameter: Age (day) Value: 14
  misc_feature: MA Experiment 20000166 PARAMETER Experiment Name: At_100uM_ABA_P Parameter: Organism Value: A. thaliana
  misc_feature: MA Experiment 20000166 PARAMETER Experiment Name: At_100uM_ABA_P Parameter: Plant Line Value: WS
  misc_feature: MA Experiment 20000166 PARAMETER Experiment Name: At_100uM_ABA_P Parameter: Timepoint (hr) Value: 1
  misc_feature: MA Experiment 20000166 PARAMETER Experiment Name: At_100uM_ABA_P Parameter: Tissue Value: Aerial
  misc_feature: MA Experiment 20000166 PARAMETER Experiment Name: At_100uM_ABA_P Parameter: Treatment Value: 100uM ABA vs. No Treatment
  misc_feature: MA Experiment ID: 20000794 Result: Down-regulated in Transcription
  misc_feature: MA Experiment 20000794 PARAMETER Experiment Name: At_Petals_P Parameter: Age (day) Value: 23-25 days
  misc_feature: MA Experiment 20000794 PARAMETER Experiment Name: At_Petals_P Parameter: Plant Line Value: WS
  misc_feature: MA Experiment 20000794 PARAMETER Experiment Name: At_Petals_P Parameter: Tissue Value: Petals vs. Whole plant
acacgcttttattcgtcacagtctcctcccacactcttcaatcagtaaagagttttaggtttttttttcttcttctcggaggtttgtagaatcaacaaaaatggtggaagaccacaagcacgaggaatcgatcttggagaagattgttgagaagatccatggccacggtgactcgtcttctctgtccgattccgacgacgataagaaatctacatcgtcttcgtcgtcgtccttcaagtcaaagatttaccgacttttcggaagggagaaacctgttcacaaggttctcggtggtggaaaacctgctgatatattcctttggaggaacaagaaggtatctggtggagtcttgggtgctgtaactgcgtcttgggtcttattcgagttattcgaataccatctcctcgcttttctctgtcactttgcgatttttgctcttgcagcattgttcttgtggtctaatgcttgtacattcatccacaagtcaactcctcacatcccggaagttcacatccctgaagatcctattcttcaacttgtttctggattaaggattgaaatcaatcgtggtttgacccttcttaggaacattgcatcaggaaaagatgtcaagaaatttatcctggtaattgctggcttgtgggttttgtccattattggcagctgctacaacttcttgacattgttctacactgctactgtccttctcttcaccattcctgtactctacgagaagtatgaggacaaagtagatgcctatggggagaaggcgatgagggagatcaaaaagcaatatgcagtacttgatgagaaggtattgcgtaaggtcataagcaagattccaagaggagctctgaacaagaagaaggattaaggaatgtgagttactctctcattggaatcgtagtaatggttcaagacatgttttgttagaagctgttggttgataaaccctttgatctcttgttattattatgttcattataaatttgggggttttaactaaaaatatttagattatgagagaacacggatggatgataattattgttgttagttatttgtcttagtt

SEQ ID NO: 77521 - protein, 257 aa, Arabidopsis thaliana; identical to SEQ ID NO: 28439
  peptide (1)..(257): Ceres Seq. ID no. 12576741
  misc_feature (1)..(257): Homolog of NCBI NO: 15238125 NR Description: putative protein; protein id: At5g41600.1, by cDNA: gi_14334529, supported by cDNA: gi_16323068 [Arabidopsis >gi|10178014|dbj|BAB11466.1| contains similarity to 24 kDa seed
  misc_feature (1)..(257): Homolog of NCBI NO: 15222616 NR Description: hypothetical protein; protein id: At1g64090.1, by cDNA: gi_17381217 [Arabidopsis thaliana] F22C12.15 [Arabidopsis thaliana] >gi|17381218|gb|AAL36421.1|
  misc_feature (9)..(257): Homolog of NCBI NO: 15237093 NR Description: putative protein; protein id: At4g11220.1, by cDNA: 23536., supported by cDNA: gi_14334419, supported by gi_15081760, supported by cDNA: gi_16209686 [Arabidopsis
  misc_feature (9)..(257): Homolog of NCBI NO: 15236556 NR Description: putative protein; protein id: At4g23630.1, by cDNA: 39185., supported by cDNA: gi_15215585 [Arabidopsis
  misc_feature (4)..(256): Homolog of NCBI NO: 34909318 NR Description: OSJNBb0021A09.5 [Oryza sativa (japonica
  misc_feature (8)..(255): Homolog of NCBI NO: 18406991 NR Description: expressed protein; protein id: At2g46170.1, by cDNA: gi_15450758, supported by cDNA: gi_18491130 [Arabidopsis >gi|25408969|pir||E84899 hypothetical protein At2g46170
  misc_feature (37)..(256): Homolog of NCBI NO: 34904202 NR Description: P0492F05.25 [Oryza sativa (japonica
  misc_feature (5)..(255): Homolog of NCBI NO: 15233147 NR Description: putative protein; protein id: At3g61560.1
  misc_feature (8)..(243): Homolog of NCBI NO: 15234108 NR Description: hypothetical protein; protein id: At4g01230.1
  misc_feature (13)..(256): Homolog of NCBI NO: 18398810 NR Description: expressed protein; protein id: At3g10260.1, by cDNA: 15153., supported by cDNA: gi_20259182 [Arabidopsis >gi|6056199|gb|AAF02816.1|AC009400_12 unknown protein

SEQ ID NO: 77522 - DNA, 1819 bp, Arabidopsis thaliana
  misc_feature (1)..(1819): Ceres Seq. ID no. 12576742
  misc_feature: MA Experiment ID: 20000265 Result: Up-regulated in Transcription
  misc_feature: MA Experiment 20000265 PARAMETER Experiment Name: At_Open_Flower_P Parameter: Age (day) Value: 21
  misc_feature: MA Experiment 20000265 PARAMETER Experiment Name: At_Open_Flower_P Parameter: Plant Line Value: WS
  misc_feature: MA Experiment 20000265 PARAMETER Experiment Name: At_Open_Flower_P Parameter: Tissue Value: Closed Flower vs. Whole Plant
  misc_feature: MA Experiment ID: 20000495 Result: Down-regulated in Transcription
  misc_feature: MA Experiment 20000495 PARAMETER Experiment Name: At_Guard_Cells_P Parameter: Harvest Date Value: 8/2/2002
  misc_feature: MA Experiment 20000495 PARAMETER Experiment Name: At_Guard_Cells_P Parameter: Organism Value: A. thaliana
  misc_feature: MA Experiment 20000495 PARAMETER Experiment Name: At_Guard_Cells_P Parameter: Tissue Value: Guard Cells vs. Leaves
gttgtaagaatcgaattctctccttccctcatctcatctcctacctagatctctctcttctcttcctctcatttccttctcccttactaaatttccttctctaatctctactttgtccaaaagcatttaactttaaccggaaaaatcttacatttttttcctcctggatctctctctctatatctgcagattcacactacagctgatttagatctatttcgtaagtgggtctttcaaagtcgtctcctttgatctactttgattcaggggtcgttgatttggtgataagtcagtagaaatggataaggagaaatctccagcacctccttgtggaggtcttcctcctccatctccatcaggtcgatgctctgcattctcagaagctggtcccattggtcatggttcagatgctaatcgaatgagtcatgatattagccgtatgcttgataacccacctaagaagattggacatcggcgagctcattctgaaatacttactctccctgatgatttgagctttgatagtgatcttggtgtggttggtaatgctgctgatggagcttctttctctgatgagactgaagaagatttgctctctatgtatcttgatatggataagtttaattcttctgctacatcttctgcccaagttggtgagccatcaggaactgcttggaaaaatgagacaatgatgcagacaggcacaggctcaacttccaatcctcagaatacggttaatagtcttggcgaaaggccaagaatcaggcatcaacatagccaatctatggatggttcaatgaatatcaatgagatgcttatgtcgggaaatgaagatgattctgctattgatgctaagaagtctatgtctgctactaaacttgctgagcttgctctcattgatcctaaacgtgctaagaggatatgggcaaacaggcagtccgcagcacgatcaaaagaaaggaagacgagatacatatttgagcttgagagaaaagtacagactttgcaaacagaggctacaactctctcagcccagttgaccctcttacagagagacacaaatggcttgactgttgaaaacaatgagctgaagctgcggttacaaacaatggagcagcaggttcacttgcaggatgaactaaacgaagcactaaaggaggaaatccagcatctgaaggtgttgactggccaagttgctccatcagcgttgaactatgggtcgtttggatcaaaccagcagcaattctattccaacaatcagtcaatgcaaacaatcttagctgcaaaacagttccagcaacttcagattcattcacagaagcagcaacaacaacaacaacaacaacaacagcaacaccaacagcagcagcagcaacagcaacagtatcagtttcaacagcaacagatgcaacagcttatgcagcagcggcttcaacagcaagaacaacaaaatggagtaagactcaagccttcacaagcccagaaagagaactgaggaatatgaatatgtcccacggtattggcgttttggtacgtagaagaaaccttttggtaaggtcattgaagataaacatttgggtaagcccaaagaaacagagttccgtgcattgcaaatatgcaatgcactgcaattattagttgtttggatttgatatagagactgagtctcgaaaccatagtatgtaaaaatataatcacgttcaaaagctgttaatttgttataatcttataacaattgtgttttaagatacaaacctactttgtgttatgatatttgttcactattggttttggtatatatccaaatcatttttcaggg

SEQ ID NO: 77523 - protein, 398 aa, Arabidopsis thaliana; identical to SEQ ID NO: 40516
  peptide (1)..(398): Ceres Seq. ID no. 12576743
  misc_feature (201)..(263): Pfam Name: bZIP transcription factor Pfam Description: bZIP transcription factor
  misc_feature (1)..(398): Homolog of NCBI NO: 15224665 NR Description: bZIP transcription factor (POSF21); protein id: supported by cDNA: gi_15982853 [Arabidopsis thaliana] Possible transcription factor PosF21 >gi|99685|pir||S21883 bZIP
  misc_feature (1)..(398): Homolog of NCBI NO: 15221391 NR Description: bZIP protein; protein id: At1g06070.1, supported cDNA: 17213. [Arabidopsis thaliana] >gi|25406894|pir||H86195
  misc_feature (1)..(398): Homolog of NCBI NO: 21553831 NR Description: transcriptional activator RF2a, putative
  misc_feature (1)..(251): Homolog of NCBI NO: 30684938 NR Description: bZIP transcription factor (POSF21) [Arabidopsis
  misc_feature (75)..(386): Homolog of NCBI NO: 7489564 NR Description: probable transcription activator RF2a - rice
  misc_feature (19)..(360): Homolog of NCBI NO: 21740783 NR Description: OSJNBa0067K08.24 [Oryza sativa (japonica
  misc_feature (120)..(378): Homolog of NCBI NO: 21740783 NR Description: OSJNBa0067K08.24 [Oryza sativa (japonica
  misc_feature (150)..(357): Homolog of NCBI NO: 2921823 NR Description: shoot-forming PKSF1 [Paulownia kawakamii]
  misc_feature (166)..(360): Homolog of NCBI NO: 2921823 NR Description: shoot-forming PKSF1 [Paulownia kawakamii]
  misc_feature (185)..(361): Homolog of NCBI NO: 2921823 NR Description: shoot-forming PKSF1 [Paulownia kawakamii]

SEQ ID NO: 77524 - protein, 358 aa, Arabidopsis thaliana; identical to SEQ ID NO: 40517
  peptide (1)..(358): Ceres Seq. ID no. 12576744
  misc_feature (161)..(223): Pfam Name: bZIP transcription factor Pfam Description: bZIP transcription factor
  misc_feature (1)..(358): Homolog of NCBI NO: 15224665 NR Description: bZIP transcription factor (POSF21); protein id: supported by cDNA: gi_15982853 [Arabidopsis thaliana] Possible transcription factor PosF21 >gi|99685|pir||S21883 bZIP
  misc_feature (1)..(358): Homolog of NCBI NO: 15221391 NR Description: bZIP protein; protein id: At1g06070.1, supported cDNA: 17213. [Arabidopsis thaliana] >gi|25406894|pir||H86195
  misc_feature (1)..(358): Homolog of NCBI NO: 21553831 NR Description: transcriptional activator RF2a, putative
  misc_feature (1)..(211): Homolog of NCBI NO: 30684938 NR Description: bZIP transcription factor (POSF21) [Arabidopsis
  misc_feature (35)..(346): Homolog of NCBI NO: 7489564 NR Description: probable transcription activator RF2a - rice
  misc_feature (1)..(320): Homolog of NCBI NO: 21740783 NR Description: OSJNBa0067K08.24 [Oryza sativa (japonica
  misc_feature (80)..(338): Homolog of NCBI NO: 21740783 NR Description: OSJNBa0067K08.24 [Oryza sativa (japonica
  misc_feature (110)..(317): Homolog of NCBI NO: 2921823 NR Description: shoot-forming PKSF1 [Paulownia kawakamii]
  misc_feature (126)..(320): Homolog of NCBI NO: 2921823 NR Description: shoot-forming PKSF1 [Paulownia kawakamii]
  misc_feature (145)..(321): Homolog of NCBI NO: 2921823 NR Description: shoot-forming PKSF1 [Paulownia kawakamii]

SEQ ID NO: 77525 - protein, 351 aa, Arabidopsis thaliana; identical to SEQ ID NO: 40518
  peptide (1)..(351): Ceres Seq. ID no. 12576745
  misc_feature (154)..(216): Pfam Name: bZIP transcription factor Pfam Description: bZIP transcription factor
  misc_feature (1)..(351): Homolog of NCBI NO: 15224665 NR Description: bZIP transcription factor (POSF21); protein id: supported by cDNA: gi_15982853 [Arabidopsis thaliana] Possible transcription factor PosF21 >gi|99685|pir||S21883 bZIP
  misc_feature (1)..(351): Homolog of NCBI NO: 15221391 NR Description: bZIP protein; protein id: At1g06070.1, supported cDNA: 17213. [Arabidopsis thaliana] >gi|25406894|pir||H86195
  misc_feature (1)..(351): Homolog of NCBI NO: 21553831 NR Description: transcriptional activator RF2a, putative
  misc_feature (1)..(204): Homolog of NCBI NO: 30684938 NR Description: bZIP transcription factor (POSF21) [Arabidopsis
  misc_feature (28)..(339): Homolog of NCBI NO: 7489564 NR Description: probable transcription activator RF2a - rice
  misc_feature (1)..(313): Homolog of NCBI NO: 21740783 NR Description: OSJNBa0067K08.24 [Oryza sativa (japonica
  misc_feature (73)..(331): Homolog of NCBI NO: 21740783 NR Description: OSJNBa0067K08.24 [Oryza sativa (japonica
  misc_feature (103)..(310): Homolog of NCBI NO: 2921823 NR Description: shoot-forming PKSF1 [Paulownia kawakamii]
  misc_feature (119)..(313): Homolog of NCBI NO: 2921823 NR Description: shoot-forming PKSF1 [Paulownia kawakamii]
  misc_feature (138)..(314): Homolog of NCBI NO: 2921823 NR Description: shoot-forming PKSF1 [Paulownia kawakamii]

SEQ ID NO: 77526 - DNA, 1583 bp, Arabidopsis thaliana
  misc_feature (1)..(1583): Ceres Seq. ID no. 12576746
  misc_feature: MA Experiment ID: 108462 Result: Down-regulated in Transcription
  misc_feature: MA Experiment 108462 PARAMETER Experiment Name: At_Germinating_Seeds_cDNA_P Parameter: Age (day) Value: 2 vs. 0
  misc_feature: MA Experiment 108462 PARAMETER Experiment Name: At_Germinating_Seeds_cDNA_P Parameter: Tissue Value: Germinating Seeds
  misc_feature: MA Experiment ID: 108463 Result: Down-regulated in Transcription
  misc_feature: MA Experiment 108463 PARAMETER Experiment Name: At_Germinating_Seeds_cDNA_P Parameter: Age (day) Value: 3 vs. 0
  misc_feature: MA Experiment 108463 PARAMETER Experiment Name: At_Germinating_Seeds_cDNA_P Parameter: Tissue Value: Germinating Seeds
  misc_feature: MA Experiment ID: 108464 Result: Down-regulated in Transcription
  misc_feature: MA Experiment 108464 PARAMETER Experiment Name: At_Germinating_Seeds_cDNA_P Parameter: Age (day) Value: 4 vs. 0
  misc_feature: MA Experiment 108464 PARAMETER Experiment Name: At_Germinating_Seeds_cDNA_P Parameter: Tissue Value: Germinating Seeds
  misc_feature: MA Experiment ID: 20000087 Result: Down-regulated in Transcription
  misc_feature: MA Experiment 20000087 PARAMETER Experiment Name: At_100uM_ABA_Mutants_cDNA_P Parameter: Plant Line Value: WS
  misc_feature: MA Experiment 20000087 PARAMETER Experiment Name: At_100uM_ABA_Mutants_cDNA_P Parameter: Timepoint (hr) Value: 6
  misc_feature: MA Experiment 20000087 PARAMETER Experiment Name: At_100uM_ABA_Mutants_cDNA_P Parameter: Tissue Value: Aerial
  misc_feature: MA Experiment 20000087 PARAMETER Experiment Name: At_100uM_ABA_Mutants_cDNA_P Parameter: Treatment Value: 100uM ABA vs. No Treatment
  misc_feature: MA Experiment ID: 20000179 Result: Up-regulated in Transcription
  misc_feature: MA Experiment 20000179 PARAMETER Experiment Name: At_Germinating_Seeds_P Parameter: Age (hr) Value: 6 vs. 0
  misc_feature: MA Experiment 20000179 PARAMETER Experiment Name: At_Germinating_Seeds_P Parameter: Tissue Value: Germinating Seeds
  misc_feature: MA Experiment ID: 20000180 Result: Up-regulated in Transcription
  misc_feature: MA Experiment 20000180 PARAMETER Experiment Name: At_Germinating_Seeds_P Parameter: Age (hr) Value: 24 vs. 0
  misc_feature: MA Experiment 20000180 PARAMETER Experiment Name: At_Germinating_Seeds_P Parameter: Tissue Value: Germinating Seeds
  misc_feature: MA Experiment ID: 20000437 Result: Up-regulated in Transcription
  misc_feature: MA Experiment 20000437 PARAMETER Experiment Name: At_Drought_P Parameter: Age (day) Value: 8
  misc_feature: MA Experiment 20000437 PARAMETER Experiment Name: At_Drought_P Parameter: Organism Value: A. thaliana
  misc_feature: MA Experiment 20000437 PARAMETER Experiment Name: At_Drought_P Parameter: Plant Line Value: WS
  misc_feature: MA Experiment 20000437 PARAMETER Experiment Name: At_Drought_P Parameter: Timepoint (hr) Value: 24
  misc_feature: MA Experiment 20000437 PARAMETER Experiment Name: At_Drought_P Parameter: Tissue Value: Whole Plant
  misc_feature: MA Experiment 20000437 PARAMETER Experiment Name: At_Drought_P Parameter: Treatment Value: Drought vs. No Drought
  misc_feature: MA Experiment ID: 20000794 Result: Up-regulated in Transcription
  misc_feature: MA Experiment 20000794 PARAMETER Experiment Name: At_Petals_P Parameter: Age (day) Value: 23-25 days
  misc_feature: MA Experiment 20000794 PARAMETER Experiment Name: At_Petals_P Parameter: Plant Line Value: WS
  misc_feature: MA Experiment 20000794 PARAMETER Experiment Name: At_Petals_P Parameter: Tissue Value: Petals vs. Whole plant
  misc_feature: MA Experiment ID: 20001556 Result: Up-regulated in Transcription
  misc_feature: MA Experiment 20001556 PARAMETER Experiment Name: At_Drought_Soil_Dry_P Parameter: Age (day) Value: 26
  misc_feature: MA Experiment 20001556 PARAMETER Experiment Name: At_Drought_Soil_Dry_P Parameter: Organism Value: A. thaliana
  misc_feature: MA Experiment 20001556 PARAMETER Experiment Name: At_Drought_Soil_Dry_P Parameter: Plant Line Value: WS
  misc_feature: MA Experiment 20001556 PARAMETER Experiment Name: At_Drought_Soil_Dry_P Parameter: Post Timepoint (hr) Value: None
  misc_feature: MA Experiment 20001556 PARAMETER Experiment Name: At_Drought_Soil_Dry_P Parameter: Post-Treatment Value: None
  misc_feature: MA Experiment 20001556 PARAMETER Experiment Name: At_Drought_Soil_Dry_P Parameter: Timepoint (day) Value: 12
  misc_feature: MA Experiment 20001556 PARAMETER Experiment Name: At_Drought_Soil_Dry_P Parameter: Treatment Value: Drought vs. No Drought
  misc_feature: MA Experiment ID: 20001557 Result: Up-regulated in Transcription
  misc_feature: MA Experiment 20001557 PARAMETER Experiment Name: At_Drought_Soil_Dry_P Parameter: Age (day) Value: 27
  misc_feature: MA Experiment 20001557 PARAMETER Experiment Name: At_Drought_Soil_Dry_P Parameter: Organism Value: A. thaliana
  misc_feature: MA Experiment 20001557 PARAMETER Experiment Name: At_Drought_Soil_Dry_P Parameter: Plant Line Value: WS
  misc_feature: MA Experiment 20001557 PARAMETER Experiment Name: At_Drought_Soil_Dry_P Parameter: Post Timepoint (hr) Value: 3
  misc_feature: MA Experiment 20001557 PARAMETER Experiment Name: At_Drought_Soil_Dry_P Parameter: Post-Treatment Value: Re-Water vs. No Drought
  misc_feature: MA Experiment 20001557 PARAMETER Experiment Name: At_Drought_Soil_Dry_P Parameter: Timepoint (day) Value: 13
  misc_feature: MA Experiment 20001557 PARAMETER Experiment Name: At_Drought_Soil_Dry_P Parameter: Treatment Value: Drought vs. No Drought
  misc_feature: MA Experiment ID: 20001559 Result: Up-regulated in Transcription
  misc_feature: MA Experiment 20001559 PARAMETER Experiment Name: At_Drought_Soil_Dry_P Parameter: Age (day) Value: 28
  misc_feature: MA Experiment 20001559 PARAMETER Experiment Name: At_Drought_Soil_Dry_P Parameter: Organism Value: A. thaliana
  misc_feature: MA Experiment 20001559 PARAMETER Experiment Name: At_Drought_Soil_Dry_P Parameter: Plant Line Value: WS
  misc_feature: MA Experiment 20001559 PARAMETER Experiment Name: At_Drought_Soil_Dry_P Parameter: Post Timepoint (hr) Value: 29
  misc_feature: MA Experiment 20001559 PARAMETER Experiment Name: At_Drought_Soil_Dry_P Parameter: Post-Treatment Value: Re-Water vs. No Drought
  misc_feature: MA Experiment 20001559 PARAMETER Experiment Name: At_Drought_Soil_Dry_P Parameter: Timepoint (day) Value: 14
  misc_feature: MA Experiment 20001559 PARAMETER Experiment Name: At_Drought_Soil_Dry_P Parameter: Treatment Value: Drought vs. No Drought
  misc_feature: MA Experiment ID: 20001904 Result: Up-regulated in Transcription
  misc_feature: MA Experiment 20001904 PARAMETER Experiment Name: At_Drought_Reproduction_P Parameter: Age (day) Value: 37
  misc_feature: MA Experiment 20001904 PARAMETER Experiment Name: At_Drought_Reproduction_P Parameter: Organism Value: A. thaliana
  misc_feature: MA Experiment 20001904 PARAMETER Experiment Name: At_Drought_Reproduction_P Parameter: Plant Line Value: WS
  misc_feature: MA Experiment 20001904 PARAMETER Experiment Name: At_Drought_Reproduction_P Parameter: Timepoint (day) Value: 7
  misc_feature: MA Experiment 20001904 PARAMETER Experiment Name: At_Drought_Reproduction_P Parameter: Tissue Value: Rosettes
  misc_feature: MA Experiment 20001904 PARAMETER Experiment Name: At_Drought_Reproduction_P Parameter: Treatment Value: Drought vs. No Drought
  misc_feature: MA Experiment ID: 20001905 Result: Up-regulated in Transcription
  misc_feature: MA Experiment 20001905 PARAMETER Experiment Name: At_Drought_Reproduction_P Parameter: Age (day) Value: 40
  misc_feature: MA Experiment 20001905 PARAMETER Experiment Name: At_Drought_Reproduction_P Parameter: Organism Value: A. thaliana
  misc_feature: MA Experiment 20001905 PARAMETER Experiment Name: At_Drought_Reproduction_P Parameter: Plant Line Value: WS
  misc_feature: MA Experiment 20001905 PARAMETER Experiment Name: At_Drought_Reproduction_P Parameter: Timepoint (day) Value: 10
  misc_feature: MA Experiment 20001905 PARAMETER Experiment Name: At_Drought_Reproduction_P Parameter: Tissue Value: Rosettes
  misc_feature: MA Experiment 20001905 PARAMETER Experiment Name: At_Drought_Reproduction_P Parameter: Treatment Value: Drought vs. No Drought
  misc_feature: MA Experiment ID: 20001911 Result: Up-regulated in Transcription
  misc_feature: MA Experiment 20001911 PARAMETER Experiment Name: At_Drought_Reproduction_P Parameter: Age (day) Value: 40
  misc_feature: MA Experiment 20001911 PARAMETER Experiment Name: At_Drought_Reproduction_P Parameter: Organism Value: A. thaliana
  misc_feature: MA Experiment 20001911 PARAMETER Experiment Name: At_Drought_Reproduction_P Parameter: Plant Line Value: WS
  misc_feature: MA Experiment 20001911 PARAMETER Experiment Name: At_Drought_Reproduction_P Parameter: Timepoint (day) Value: 10
  misc_feature: MA Experiment 20001911 PARAMETER Experiment Name: At_Drought_Reproduction_P Parameter: Tissue Value: Flowers
  misc_feature: MA Experiment 20001911 PARAMETER Experiment Name: At_Drought_Reproduction_P Parameter: Treatment Value: Drought vs. No Drought
ccaatacatggatccattttgacgtcatctttatcactatctctctattatataaatctcttcgtacccttttaccgattcttcaccgtgatcgcttaatcagacctcaatttcgttgttaaagaacaaagctttaagcagccatggatccaaaccaacgtatcgcgagaatctctgctcatctcaatcctcctaatcttcataatcagattgctgacgggtcaggtttgaatcgggtggcttgtcgggcaaaaggtggatcacccggattcaaagtggcgatacttggagcagctggtggaattggacaacctcttgcgatgttgatgaagatgaatcctttggtttcggttcttcatctctatgatgttgctaatgctcctggtgttactgctgatattagtcatatggatactagtgccgttgttcgtggatttctcgggcagccgcagttagaggaagcacttacgggtatggatttagtgatcatacctgctggtgttccgaggaaaccagggatgacgagggatgatctgtttaacattaatgctgggattgtgaggacactctctgaagctatagctaaatgttgtcctaaagcaattgtgaatataatcagtaatccggtgaactccacggtgccaatcgcagctgaggttttcaagaaagctggaacctttgatccaaagaaactcatgggtgtcactatgcttgatgttgttagagctaatacctttgtggcggaagtaatgagtcttgatccccgtgaagttgaagttccggttgttggaggacacgcaggagttacgattttaccactgctttcgcaggtgaaacctccttgctcgttcactcaaaaagagattgaatatctcacagaccgcatccaaaacggtggcactgaagttgttgaggctaaagctggagcaggttctgcaacactatccatggcatatgcagcagtggagtttgcagatgcttgcctcaggggtctacgaggtgatgcaaacatcgttgagtgcgcatatgtggcatcccatgtgactgagcttcccttcttcgcatcgaaggtgcgtctgggacgatgtgggatcgatgaagtgtacggccttggaccattgaacgaatatgagaggatgggattagagaaggcaaagaaagagctttcagtaagtattcataaaggtgttacctttgcgaagaaataaagagactcgatcgtgaataaacacacttaagcgatggttttggaatagtcagagttttggaataagaataatgcctcacaataaaagctcttgcggtcttcttggatccaatcttaaaggttcaagaaactcatctcctttaggtaaaatcttcgattgttttatcgttccatcgaaccactttgttcttagatacaagaacgtttatgatttatgtagttgggctataaaagtgagaacagagcaataatcttgcaacattttttctcatcttcttggtgtgttttttttttgttggttttcatctttttgttcttgctcatgagagcatctttagaaggctattgttgggaagtaaataagtttgcatcgcgg

SEQ ID NO: 77527 - protein, 354 aa, Arabidopsis thaliana
  peptide (1)..(354): Ceres Seq. ID no. 12576747
  misc_feature (188)..(352): Pfam Name: lactate/malate dehydrogenase, alpha/beta Pfam Description: lactate/malate dehydrogenase, alpha/beta
  misc_feature (1)..(354): Homolog of NCBI NO: 15227752 NR Description: putative glyoxysomal malate dehydrogenase protein id: At2g22780.1, supported by cDNA: gi_16226836 thaliana] >gi|11133398|sp|O82399|MDHI_ARATH Probable malate
  misc_feature (2)..(353): Homolog of NCBI NO: 126894 NR Description: MALATE DEHYDROGENASE, GLYOXYSOMAL PRECURSOR
  misc_feature (2)..(353): Homolog of NCBI NO: 1170897 NR Description: MALATE DEHYDROGENASE, GLYOXYSOMAL PRECURSOR
  misc_feature (4)..(354): Homolog of NCBI NO: 7431179 NR Description: malate dehydrogenase (EC 1.1.1.37) precursor, - alfalfa >gi|2827078|gb|AAB99754.1| malate dehydrogenase
  misc_feature (5)..(354): Homolog of NCBI NO: 3183079 NR Description: MALATE DEHYDROGENASE, GLYOXYSOMAL PRECURSOR
  misc_feature (2)..(354): Homolog of NCBI NO: 15242466 NR Description: microbody NAD-dependent malate dehydrogenase; id: At5g09660.1, supported by cDNA: gi_14335145, supported by gi_16226936, supported by cDNA: gi_16323156, supported by cDNA:
  misc_feature (2)..(354): Homolog of NCBI NO: 16323157 NR Description: AT5g09660/F17I14_150 [Arabidopsis thaliana]
  misc_feature (4)..(354): Homolog of NCBI NO: 169977 NR Description: malate dehydrogenase
  misc_feature (4)..(354): Homolog of NCBI NO: 1346501 NR Description: MALATE DEHYDROGENASE, GLYOXYSOMAL PRECURSOR
  misc_feature (2)..(354): Homolog of NCBI NO: 11133654 NR Description: Malate dehydrogenase 2, glyoxysomal precursor
MDPNQRIARISAHLNPPNLHNQIADGSGLNRVACRAKGGSPGFKVAILGAAGGIGQPLAMLMKMNPLVSVLHLYDVANAPGVTADISHMDTSAVVRGFLGQPQLEEALTGMDLVIIPAGVPRKPGMTRDDLFNINAGIVRTLSEAIAKCCPKAIVNIISNPVNSTVPIAAEVFKKAGTFDPKKLMGVTMLDVVRANTFVAEVMSLDPREVEVPVVGGHAGVTILPLLSQVKPPCSFTQKEIEYLTDRIQNGGTEVVEAKAGAGSATLSMAYAAVEFADACLRGLRGDANIVECAYVASHVTELPFFASKVRLGRCGIDEVYGLGPLNEYERMGLEKAKKELSVSIHKGVTFAKK

SEQ ID NO: 77528 - protein, 295 aa, Arabidopsis thaliana
  peptide (1)..(295): Ceres Seq. ID no. 12576748
  misc_feature (129)..(293): Pfam Name: lactate/malate dehydrogenase, alpha/beta Pfam Description: lactate/malate dehydrogenase, alpha/beta
  misc_feature (1)..(295): Homolog of NCBI NO: 15227752 NR Description: putative glyoxysomal malate dehydrogenase protein id: At2g22780.1, supported by cDNA: gi_16226836 thaliana] >gi|11133398|sp|O82399|MDHI_ARATH Probable malate
  misc_feature (1)..(294): Homolog of NCBI NO: 126894 NR Description: MALATE DEHYDROGENASE, GLYOXYSOMAL PRECURSOR
  misc_feature (1)..(294): Homolog of NCBI NO: 1170897 NR Description: MALATE DEHYDROGENASE, GLYOXYSOMAL PRECURSOR
  misc_feature (1)..(295): Homolog of NCBI NO: 7431179 NR Description: malate dehydrogenase (EC 1.1.1.37) precursor, - alfalfa >gi|2827078|gb|AAB99754.1| malate dehydrogenase
  misc_feature (1)..(295): Homolog of NCBI NO: 3183079 NR Description: MALATE DEHYDROGENASE, GLYOXYSOMAL PRECURSOR
  misc_feature (1)..(295): Homolog of NCBI NO: 15242466 NR Description: microbody NAD-dependent malate dehydrogenase; id: At5g09660.1, supported by cDNA: gi_14335145, supported by gi_16226936, supported by cDNA: gi_16323156, supported by cDNA:
  misc_feature (1)..(295): Homolog of NCBI NO: 16323157 NR Description: AT5g09660/F17I14_150 [Arabidopsis thaliana]
  misc_feature (1)..(295): Homolog of NCBI NO: 169977 NR Description: malate dehydrogenase
  misc_feature (1)..(295): Homolog of NCBI NO: 1346501 NR Description: MALATE DEHYDROGENASE, GLYOXYSOMAL PRECURSOR
  misc_feature (1)..(295): Homolog of NCBI NO: 11133654 NR Description: Malate dehydrogenase 2, glyoxysomal precursor
MLMKMNPLVSVLHLYDVANAPGVTADISHMDTSAVVRGFLGQPQLEEALTGMDLVIIPAGVPRKPGMTRDDLFNINAGIVRTLSEAIAKCCPKAIVNIISNPVNSTVPIAAEVFKKAGTFDPKKLMGVTMLDVVRANTFVAEVMSLDPREVEVPVVGGHAGVTILPLLSQVKPPCSFTQKEIEYLTDRIQNGGTEVVEAKAGAGSATLSMAYAAVEFADACLRGLRGDANIVECAYVASHVTELPFFASKVRLGRCGIDEVYGLGPLNEYERMGLEKAKKELSVSIHKGVTFAKK

SEQ ID NO: 77529 - protein, 293 aa, Arabidopsis thaliana
  peptide (1)..(293): Ceres Seq. ID no. 12576749
  misc_feature (127)..(291): Pfam Name: lactate/malate dehydrogenase, alpha/beta Pfam Description: lactate/malate dehydrogenase, alpha/beta
  misc_feature (1)..(293): Homolog of NCBI NO: 15227752 NR Description: putative glyoxysomal malate dehydrogenase protein id: At2g22780.1, supported by cDNA: gi_16226836 thaliana] >gi|11133398|sp|O82399|MDHI_ARATH Probable malate
  misc_feature (1)..(292): Homolog of NCBI NO: 126894 NR Description: MALATE DEHYDROGENASE, GLYOXYSOMAL PRECURSOR
  misc_feature (1)..(292): Homolog of NCBI NO: 1170897 NR Description: MALATE DEHYDROGENASE, GLYOXYSOMAL PRECURSOR
  misc_feature (1)..(293): Homolog of NCBI NO: 7431179 NR Description: malate dehydrogenase (EC 1.1.1.37) precursor, - alfalfa >gi|2827078|gb|AAB99754.1| malate dehydrogenase
  misc_feature (1)..(293): Homolog of NCBI NO: 3183079 NR Description: MALATE DEHYDROGENASE, GLYOXYSOMAL PRECURSOR
  misc_feature (1)..(293): Homolog of NCBI NO: 15242466 NR Description: microbody NAD-dependent malate dehydrogenase; id: At5g09660.1, supported by cDNA: gi_14335145, supported by gi_16226936, supported by cDNA: gi_16323156, supported by cDNA:
  misc_feature (1)..(293): Homolog of NCBI NO: 16323157 NR Description: AT5g09660/F17I14_150 [Arabidopsis thaliana]
  misc_feature (1)..(293): Homolog of NCBI NO: 169977 NR Description: malate dehydrogenase
  misc_feature (1)..(293): Homolog of NCBI NO: 1346501 NR Description: MALATE DEHYDROGENASE, GLYOXYSOMAL PRECURSOR
  misc_feature (1)..(293): Homolog of NCBI NO: 11133654 NR Description: Malate dehydrogenase 2, glyoxysomal precursor
MKMNPLVSVLHLYDVANAPGVTADISHMDTSAVVRGFLGQPQLEEALTGMDLVIIPAGVPRKPGMTRDDLFNINAGIVRTLSEAIAKCCPKAIVNIISNPVNSTVPIAAEVFKKAGTFDPKKLMGVTMLDVVRANTFVAEVMSLDPREVEVPVVGGHAGVTILPLLSQVKPPCSFTQKEIEYLTDRIQNGGTEVVEAKAGAGSATLSMAYAAVEFADACLRGLRGDANIVECAYVASHVTELPFFASKVRLGRCGIDEVYGLGPLNEYERMGLEKAKKELSVSIHKGVTFAKK

SEQ ID NO: 77530 - DNA, 1463 bp, Arabidopsis thaliana
  misc_feature (1)..(1463): Ceres Seq. ID no. 12576754
  misc_feature: MA Experiment ID: 108434 Result: Down-regulated in Transcription
  misc_feature: MA Experiment 108434 PARAMETER Experiment Name: At_Root_Tips_cDNA_P Parameter: Tissue Value: Root Tips
  misc_feature: MA Experiment ID: 108461 Result: Up-regulated in Transcription
  misc_feature: MA Experiment 108461 PARAMETER Experiment Name: At_Germinating_Seeds_cDNA_P Parameter: Age (day) Value: 1 vs. 0
  misc_feature: MA Experiment 108461 PARAMETER Experiment Name: At_Germinating_Seeds_cDNA_P Parameter: Tissue Value: Germinating Seeds
  misc_feature: MA Experiment ID: 108462 Result: Up-regulated in Transcription
  misc_feature: MA Experiment 108462 PARAMETER Experiment Name: At_Germinating_Seeds_cDNA_P Parameter: Age (day) Value: 2 vs. 0
  misc_feature: MA Experiment 108462 PARAMETER Experiment Name: At_Germinating_Seeds_cDNA_P Parameter: Tissue Value: Germinating Seeds
  misc_feature: MA Experiment ID: 108463 Result: Up-regulated in Transcription
  misc_feature: MA Experiment 108463 PARAMETER Experiment Name: At_Germinating_Seeds_cDNA_P Parameter: Age (day) Value: 3 vs. 0
  misc_feature: MA Experiment 108463 PARAMETER Experiment Name: At_Germinating_Seeds_cDNA_P Parameter: Tissue Value: Germinating Seeds
  misc_feature: MA Experiment ID: 108464 Result: Up-regulated in Transcription
  misc_feature: MA Experiment 108464 PARAMETER Experiment Name: At_Germinating_Seeds_cDNA_P Parameter: Age (day) Value: 4 vs. 0
  misc_feature: MA Experiment 108464 PARAMETER Experiment Name: At_Germinating_Seeds_cDNA_P Parameter: Tissue Value: Germinating Seeds
  misc_feature: MA Experiment ID: 108488 Result: Down-regulated in Transcription
  misc_feature: MA Experiment ID: 108595 Result: Down-regulated in Transcription
  misc_feature: MA Experiment 108595 PARAMETER Experiment Name: At_Ler-pi_Ovule_cDNA_P Parameter: Plant Line Value: null
  misc_feature: MA Experiment ID: 20000495 Result: Down-regulated in Transcription
  misc_feature: MA Experiment 20000495 PARAMETER Experiment Name: At_Guard_Cells_P Parameter: Harvest Date Value: 8/2/2002
  misc_feature: MA Experiment 20000495 PARAMETER Experiment Name: At_Guard_Cells_P Parameter: Organism Value: A. thaliana
  misc_feature: MA Experiment 20000495 PARAMETER Experiment Name: At_Guard_Cells_P Parameter: Tissue Value: Guard Cells vs. Leaves
  misc_feature: MA Experiment ID: 20001558 Result: Down-regulated in Transcription
  misc_feature: MA Experiment 20001558 PARAMETER Experiment Name: At_Drought_Soil_Dry_P Parameter: Age (day) Value: 27
  misc_feature: MA Experiment 20001558 PARAMETER Experiment Name: At_Drought_Soil_Dry_P Parameter: Organism Value: A. thaliana
  misc_feature: MA Experiment 20001558 PARAMETER Experiment Name: At_Drought_Soil_Dry_P Parameter: Plant Line Value: WS
  misc_feature: MA Experiment 20001558 PARAMETER Experiment Name: At_Drought_Soil_Dry_P Parameter: Post Timepoint (hr) Value: 6
  misc_feature: MA Experiment 20001558 PARAMETER Experiment Name: At_Drought_Soil_Dry_P Parameter: Post-Treatment Value: Re-Water vs. No Drought
  misc_feature: MA Experiment 20001558 PARAMETER Experiment Name: At_Drought_Soil_Dry_P Parameter: Timepoint (day) Value: 13
  misc_feature: MA Experiment 20001558 PARAMETER Experiment Name: At_Drought_Soil_Dry_P Parameter: Treatment Value: Drought vs. No Drought
  misc_feature: MA Experiment ID: 20001560 Result: Down-regulated in Transcription
  misc_feature: MA Experiment 20001560 PARAMETER Experiment Name: At_Drought_Soil_Dry_P Parameter: Age (day) Value: 28
  misc_feature: MA Experiment 20001560 PARAMETER Experiment Name: At_Drought_Soil_Dry_P Parameter: Organism Value: A. thaliana
  misc_feature: MA Experiment 20001560 PARAMETER Experiment Name: At_Drought_Soil_Dry_P Parameter: Plant Line Value: WS
  misc_feature: MA Experiment 20001560 PARAMETER Experiment Name: At_Drought_Soil_Dry_P Parameter: Post Timepoint (hr) Value: None
  misc_feature: MA Experiment 20001560 PARAMETER Experiment Name: At_Drought_Soil_Dry_P Parameter: Post-Treatment Value: None
  misc_feature: MA Experiment 20001560 PARAMETER Experiment Name: At_Drought_Soil_Dry_P Parameter: Timepoint (day) Value: 14
  misc_feature: MA Experiment 20001560 PARAMETER Experiment Name: At_Drought_Soil_Dry_P Parameter: Treatment Value: Drought vs. No Drought
gattcttacggttctgtttttttttttgtttaaagttttgtaattttcagtgagttcttagctgaaaagtgtcgattttgggggtacccacccacgagatttgattagtttccctagttttgtgaaagattgaatctgatgacaggcacgccaagtgcatccagataaaaaccctaatgatcctcaggctgctcataatttccaggtattgggagaggcctaccaagtgctaagtgatccagggcaacgtcaggcctatgacacatctgggaagtcagggatttcaactgagatcattgatcctgcggctatatttgctatgctttttgggagtgaactctttgaagaatacatagggcagcttgctatggcatcaatggcttcacttgatatcttcactgaaggggatcagattgatactaaaaagattatagaaaaaatgagggctgttcagaaagaaagagaagacaaacttgctcagattcttaaggaccgcctcaacctatatatgacgaacaaagatgaatttactagcaatgctgaagctgaagtaacaagactctcaaatgcagcatacggggtggaaatgttgaacacaatcggatatatatatgtcagacaagcggcaaaagagcttgggaagaaagctatttatctcggtgtgccattcgtagctgaatggtttaggacgaaaggtcacttcatcaaatcccaagtaacagctgcaacaggtgcatacgctttattccagctgcaagaggaaatgaaaaggcaactaagtgctgaaggcaattataccgagaaggaacttgaagagtacatgaagacccataagaaagtaatgattgattctctgtggaagctcaatgttgctgatatcgaaagcactatctcccgtgtttgtgagcaggtacttcaagatcccactgccaagagagaggagcttcgtgcaagggccaaggggttaaaaactctgggaaagatcttccagaagaacaagatagccagtgagagtgatcctttagtaagagccgaacttcacaaactaaacggaaatggtcaagaacatgatcattcatccacatcaccaaaatctgatgaagcatctcgctctaccgttggacctcaggaaccgcaaagcccttatgtggaagcaccgaaacttggagaagagcaaatcaactattacttcccaaggcctgcgccgcctccaggagcacagagacactcttaaactggcaatggattgattcacagatgaacgaaaaggttattttttcctttttttgctatataatataagtctttatgcatatttgatatatttgcaggcgttggtattaccattatgtaatttttattattgttagaagaagaaattattggatctttgaaaaaagcacatgttatctcatcttagacaatgtataatgtttttattctatttatatatttgatgtttg

SEQ ID NO: 77531 - protein, 304 aa, Arabidopsis thaliana; identical to SEQ ID NO: 24956
  peptide (1)..(304): Ceres Seq. ID no. 12576755
  misc_feature (1)..(304): Homolog of NCBI NO: 18394951 NR Description: expressed protein; protein id: At1g21080.1, by cDNA: gi_15028270 [Arabidopsis thaliana]
  misc_feature (1)..(304): Homolog of NCBI NO: 15223142 NR Description: putative DnaJ protein; protein id: At1g76700.1
  misc_feature (1)..(304): Homolog of NCBI NO: 26449747 NR Description: putative DnaJ protein [Arabidopsis thaliana]
  misc_feature (1)..(304): Homolog of NCBI NO: 15982848 NR Description: At1g21080/T22I11_9 [Arabidopsis thaliana]
  misc_feature (1)..(299): Homolog of NCBI NO: 2230757 NR Description: dnaJ-like protein [Arabidopsis thaliana]
  misc_feature (43)..(302): Homolog of NCBI NO: 27817868 NR Description: OJ1081_B12.17 [Oryza sativa (japonica
  misc_feature (1)..(43): Homolog of NCBI NO: 27817868 NR Description: OJ1081_B12.17 [Oryza sativa (japonica
  misc_feature (1)..(268): Homolog of NCBI NO: 30699227 NR Description: DnaJ protein family [Arabidopsis thaliana]
  misc_feature (1)..(257): Homolog of NCBI NO: 15234962 NR Description: dnaJ-like protein; protein id: At4g39150.1, by cDNA: gi_18086430, supported by cDNA: gi_20147306 [Arabidopsis
  misc_feature (1)..(227): Homolog of NCBI NO: 15226572 NR Description: putative DnaJ protein; protein id: At2g21510.1, by cDNA: 151802. [Arabidopsis thaliana] >gi|25412044|pir||B84602

SEQ ID NO: 77532 - protein, 288 aa, Arabidopsis thaliana; identical to SEQ ID NO: 24957
  peptide (1)..(288): Ceres Seq. ID no. 12576756
  misc_feature (1)..(288): Homolog of NCBI NO: 18394951 NR Description: expressed protein; protein id: At1g21080.1, by cDNA: gi_15028270 [Arabidopsis thaliana]
  misc_feature (1)..(288): Homolog of NCBI NO: 15223142 NR Description: putative DnaJ protein; protein id: At1g76700.1
  misc_feature (1)..(288): Homolog of NCBI NO: 26449747 NR Description: putative DnaJ protein [Arabidopsis thaliana]
  misc_feature (1)..(288): Homolog of NCBI NO: 15982848 NR Description: At1g21080/T22I11_9 [Arabidopsis thaliana]
  misc_feature (1)..(283): Homolog of NCBI NO: 2230757 NR Description: dnaJ-like protein [Arabidopsis thaliana]
  misc_feature (27)..(286): Homolog of NCBI NO: 27817868 NR Description: OJ1081_B12.17 [Oryza sativa (japonica
  misc_feature (1)..(27): Homolog of NCBI NO: 27817868 NR Description: OJ1081_B12.17 [Oryza sativa (japonica
  misc_feature (1)..(252): Homolog of NCBI NO: 30699227 NR Description: DnaJ protein family [Arabidopsis thaliana]
  misc_feature (1)..(241): Homolog of NCBI NO: 15234962 NR Description: dnaJ-like protein; protein id: At4g39150.1, by cDNA: gi_18086430, supported by cDNA: gi_20147306 [Arabidopsis
  misc_feature (1)..(211): Homolog of NCBI NO: 15226572 NR Description: putative DnaJ protein; protein id: At2g21510.1, by cDNA: 151802. [Arabidopsis thaliana] >gi|25412044|pir||B84602

SEQ ID NO: 77533 - protein, 285 aa, Arabidopsis thaliana
  peptide (1)..(285): Ceres Seq. ID no. 12576757
  misc_feature (1)..(285): Homolog of NCBI NO: 18394951 NR Description: expressed protein; protein id: At1g21080.1, by cDNA: gi_15028270 [Arabidopsis thaliana]
  misc_feature (1)..(285): Homolog of NCBI NO: 15223142 NR Description: putative DnaJ protein; protein id: At1g76700.1
  misc_feature (1)..(285): Homolog of NCBI NO: 26449747 NR Description: putative DnaJ protein [Arabidopsis thaliana]
  misc_feature (1)..(285): Homolog of NCBI NO: 15982848 NR Description: At1g21080/T22I11_9 [Arabidopsis thaliana]
  misc_feature (1)..(280): Homolog of NCBI NO: 2230757 NR Description: dnaJ-like protein [Arabidopsis thaliana]
  misc_feature (24)..(283): Homolog of NCBI NO: 27817868 NR Description: OJ1081_B12.17 [Oryza sativa (japonica
  misc_feature (1)..(24): Homolog of NCBI NO: 27817868 NR Description: OJ1081_B12.17 [Oryza sativa (japonica
  misc_feature (1)..(249): Homolog of NCBI NO: 30699227 NR Description: DnaJ protein family [Arabidopsis thaliana]
  misc_feature (1)..(238): Homolog of NCBI NO: 15234962 NR Description: dnaJ-like protein; protein id: At4g39150.1, by cDNA: gi_18086430, supported by cDNA: gi_20147306 [Arabidopsis
  misc_feature (1)..(208): Homolog of NCBI NO: 15226572 NR Description: putative DnaJ protein; protein id: At2g21510.1, by cDNA: 151802. [Arabidopsis thaliana] >gi|25412044|pir||B84602
MASLDIFTEGDQIDTKKIIEKMRAVQKEREDKLAQILKDRLNLYMTNKDEFTSNAEAEVTRLSNAAYGVEMLNTIGYIYVRQAAKELGKKAIYLGVPFVAEWFRTKGHFIKSQVTAATGAYALFQLQEEMKRQLSAEGNYTEKELEEYMKTHKKVMIDSLWKLNVADIESTISRVCEQVLQDPTAKREELRARAKGLKTLGKIFQKNKIASESDPLVRAELHKLNGNGQEHDHSSTSPKSDEASRSTVGPQEPQSPYVEAPKLGEEQINYYFPRPAPPPGAQRHS

SEQ ID NO: 77534 - DNA, 1569 bp, Arabidopsis thaliana
  misc_feature (1)..(1569): Ceres Seq. ID no. 12576762
  misc_feature: MA Experiment ID: 108435 Result: Down-regulated in Transcription
  misc_feature: MA Experiment 108435 PARAMETER Experiment Name: At_stm_Mutants_cDNA_P Parameter: Plant Line Value: wt Landsburg vs stm
  misc_feature: MA Experiment 108435 PARAMETER Experiment Name: At_stm_Mutants_cDNA_P Parameter: Tissue Value: Shoot Apical Meristem Region
  misc_feature: MA Experiment ID: 108569 Result: Up-regulated in Transcription
  misc_feature: MA Experiment 108569 PARAMETER Experiment Name: At_0.001%_MeJA__cDNA_P Parameter: Timepoint (hr) Value: 6
  misc_feature: MA Experiment 108569 PARAMETER Experiment Name: At_0.001%_MeJA__cDNA_P Parameter: Tissue Value: Aerial
  misc_feature: MA Experiment 108569 PARAMETER Experiment Name: At_0.001%_MeJA__cDNA_P Parameter: Treatment Value: 0.001% MeJA vs. No Treatment
  misc_feature: MA Experiment ID: 108573 Result: Up-regulated in Transcription
  misc_feature: MA Experiment 108573 PARAMETER Experiment Name: At_Drought_cDNA_P Parameter: Timepoint (hr) Value: 6
  misc_feature: MA Experiment 108573 PARAMETER Experiment Name: At_Drought_cDNA_P Parameter: Tissue Value: Aerial
  misc_feature: MA Experiment 108573 PARAMETER Experiment Name: At_Drought_cDNA_P Parameter: Treatment Value: Drought vs. No Drought
  misc_feature: MA Experiment ID: 108595 Result: Down-regulated in Transcription
  misc_feature: MA Experiment 108595 PARAMETER Experiment Name: At_Ler-pi_Ovule_cDNA_P Parameter: Plant Line Value: null
  misc_feature: MA Experiment ID: 20000113 Result: Up-regulated in Transcription
  misc_feature: MA Experiment 20000113 PARAMETER Experiment Name: At_42deg_Heat_cDNA_P Parameter: Temperature (deg C) Value: 42 vs. 22
  misc_feature: MA Experiment 20000113 PARAMETER Experiment Name: At_42deg_Heat_cDNA_P Parameter: Timepoint (hr) Value: 8
  misc_feature: MA Experiment 20000113 PARAMETER Experiment Name: At_42deg_Heat_cDNA_P Parameter: Tissue Value: Aerial
  misc_feature: MA Experiment ID: 20000234 Result: Up-regulated in Transcription
  misc_feature: MA Experiment 20000234 PARAMETER Experiment Name: At_Siliques_P Parameter: Age (day) Value: 21
  misc_feature: MA Experiment 20000234 PARAMETER Experiment Name: At_Siliques_P Parameter: Organism Value: A. thaliana
  misc_feature: MA Experiment 20000234 PARAMETER Experiment Name: At_Siliques_P Parameter: Plant Line Value: WS
  misc_feature: MA Experiment 20000234 PARAMETER Experiment Name: At_Siliques_P Parameter: Tissue Value: Less Than 5mm Siliques vs. Whole Plant
  misc_feature: MA Experiment ID: 20000264 Result: Up-regulated in Transcription
  misc_feature: MA Experiment 20000264 PARAMETER Experiment Name: At_Open_Flower_P Parameter: Age (day) Value: 21
  misc_feature: MA Experiment 20000264 PARAMETER Experiment Name: At_Open_Flower_P Parameter: Plant Line Value: WS
  misc_feature: MA Experiment 20000264 PARAMETER Experiment Name: At_Open_Flower_P Parameter: Tissue Value: Open Flower vs. Whole Plant
  misc_feature: MA Experiment ID: 20000265 Result: Up-regulated in Transcription
  misc_feature: MA Experiment 20000265 PARAMETER Experiment Name: At_Open_Flower_P Parameter: Age (day) Value: 21
  misc_feature: MA Experiment 20000265 PARAMETER Experiment Name: At_Open_Flower_P Parameter: Plant Line Value: WS
  misc_feature: MA Experiment 20000265 PARAMETER Experiment Name: At_Open_Flower_P Parameter: Tissue Value: Closed Flower vs. Whole Plant
  misc_feature: MA Experiment ID: 20000286 Result: Up-regulated in Transcription
  misc_feature: MA Experiment 20000286 PARAMETER Experiment Name: At_Open_Flower_P Parameter: Age (day) Value: 21
  misc_feature: MA Experiment 20000286 PARAMETER Experiment Name: At_Open_Flower_P Parameter: Plant Line Value: WS
  misc_feature: MA Experiment 20000286 PARAMETER Experiment Name: At_Open_Flower_P Parameter: Tissue Value: Half Open vs. Whole Plant
  misc_feature: MA Experiment ID: 20000438 Result: Up-regulated in Transcription
  misc_feature: MA Experiment 20000438 PARAMETER Experiment Name: At_Shoots__P Parameter: Age (day) Value: 14
  misc_feature: MA Experiment 20000438 PARAMETER Experiment Name: At_Shoots__P Parameter: Tissue Value: Shoots vs. Whole Plant
  misc_feature: MA Experiment ID: 20000573 Result: Up-regulated in Transcription
  misc_feature: MA Experiment 20000573 PARAMETER Experiment Name: At_100uM_ABA_Mutants__P Parameter: Organism Value: A. thaliana
  misc_feature: MA Experiment 20000573 PARAMETER Experiment Name: At_100uM_ABA_Mutants__P Parameter: Plant Line Value: CS22 vs. Ler wt
  misc_feature: MA Experiment 20000573 PARAMETER Experiment Name: At_100uM_ABA_Mutants__P Parameter: Timepoint (hr) Value: N/A
  misc_feature: MA Experiment 20000573 PARAMETER Experiment Name: At_100uM_ABA_Mutants__P Parameter: Tissue Value: Whole Plant
  misc_feature: MA Experiment 20000573 PARAMETER Experiment Name: At_100uM_ABA_Mutants__P Parameter: Treatment Value: None
  misc_feature: MA Experiment ID: 20000794 Result: Up-regulated in Transcription
  misc_feature: MA Experiment 20000794 PARAMETER Experiment Name: At_Petals_P Parameter: Age (day) Value: 23-25 days
  misc_feature: MA Experiment 20000794 PARAMETER Experiment Name: At_Petals_P Parameter: Plant Line Value: WS
  misc_feature: MA Experiment 20000794 PARAMETER Experiment Name: At_Petals_P Parameter: Tissue Value: Petals vs. Whole plant
ggtgaaaggcgaggagatataggggagagagaatcccattcccatattcagagcacaaacaaaaaagcttcaatttttggggacaaagtttttatcttttcgttgtttggaatttgggggaggaagaaggaaaggtgtaaggatagggtcgtgcgtgtcaacgagaggtgctgctggacgtgaagcctcctcctccgcatcggcgaggaggcttccgtcgcagcaccacctcagcggtagccttagctcttctggctacggcggagaaccgtcggatcaatctgatatcggcggtgcgaagatgaaagggcttttcaagtctaagccacgcactcctgctgaccttgttcgacaaacccgcgatctccttctcttctccgatcgatctacctctttgcctgacctccgagattccaaacgcgacgaaaagatggcggaattaagccggaatatccgtgacatgaagtcgattctctacgggaacagcgaagcagagcctgtggcagaagcttgtgcacagttgactcaagaattctttaaagaggatactctacgtctcttgattacttgtctccctaaacttaacttggagacgaggaaagatgctacacaagttgttgcaaatctacagaggcaacaggttaattcacggttgattgcttctgattatttagaagccaacattgatctcatggatgttttgattgaaggcttcgagaacacagacatggctttacactatggtgctatgtttagggagtgtatccgtcatcagattgtggctaaatatgttttggagtctgaccatgtgaagaaattctttgattacatacagcttccaaatttcgacattgctgccgatgctgctgctacttttaaggaactgctgacaaggcataagtctactgttgccgagtttctcaccaagaatgaagactggtttttcgcagactacaactcaaagcttcttgaatcaagtaattatataaccagacggcaagctattaagttgttgggtgatatattattggatcgatcaaattcagctgtgatgacgaaatatgtgagctcgagggataacttgaggattctcatgaatcttctaagagagtcaagcaagagtatccaaatagaagcattccatgtctttaagctgtttgcagcgaaccaaaacaagcctgcggatatagtcaacattctggtggccaacagaagcaagcttctgagattgttggctgatttgaaaccagacaaagaggatgagaggtttgaagcagacaaaagtcaggttttgagagaaatcgcagcccttgaacctcgagatcttgcttgaaccaactaatgcaattcatccttccttcccttttaaaacactcgaaaagacatttttgaagcatcttgttgtttttttacattaggtaaccaatcttcctctcactttctcaccacacacacacacacacacacacacacacacacacatacacatacgagatatctattcgatatatgtattcatatgtacactacttcactgtcgatgaaataaaatggtttgtcaaaagctca

SEQ ID NO: 77535 - protein, 343 aa, Arabidopsis thaliana
  peptide (1)..(343): Ceres Seq. ID no. 12576763
  misc_feature (39)..(339): Pfam Name: Mo25 protein family Pfam Description: Mo25 protein family
  misc_feature (1)..(343): Homolog of NCBI NO: 15214076 NR Description: Hypothetical MO25-like protein At5g47540 emb|CAB78730.1~gene_id:MNJ7.13~similar to unknown protein thaliana] >gi|16226301|gb|AAL16128.1|AF428296_1 AT5g47540/MNJ7_13
  misc_feature (1)..(343): Homolog of NCBI NO: 15238126 NR Description: putative protein; protein id: At5g47540.1
  misc_feature (1)..(343): Homolog of NCBI NO: 15236013 NR Description: putative protein; protein id: At4g17270.1, by cDNA: gi_14190518, supported by cDNA: gi_15810066 [Arabidopsis
  misc_feature (44)..(343): Homolog of NCBI NO: 7485184 NR Description: hypothetical protein - Arabidopsis thaliana
  misc_feature (1)..(337): Homolog of NCBI NO: 34901086 NR Description: putative MO25 protein (CGI-66) [Oryza sativa
  misc_feature (1)..(342): Homolog of NCBI NO: 15227629 NR Description: unknown protein; protein id: At2g03410.1
  misc_feature (5)..(338): Homolog of NCBI NO: 7706481 NR Description: MO25 protein [Homo sapiens]
  misc_feature (5)..(338): Homolog of NCBI NO: 34877516 NR Description: similar to MO25 protein [Rattus norvegicus]
  misc_feature (4)..(338): Homolog of NCBI NO: 7459568 NR Description: hypothetical protein R02E12.2 - Caenorhabditis
  misc_feature (4)..(338): Homolog of NCBI NO: 17569177 NR Description: Mouse Mo25 protein like family member elegans] >gi|14670179|gb|AAA96186.2| Hypothetical protein
MKGLFKSKPRTPADLVRQTRDLLLFSDRSTSLPDLRDSKRDEKMAELSRNIRDMKSILYGNSEAEPVAEACAQLTQEFFKEDTLRLLITCLPKLNLETRKDATQVVANLQRQQVNSRLIASDYLEANIDLMDVLIEGFENTDMALHYGAMFRECIRHQIVAKYVLESDHVKKFFDYIQLPNFDIAADAAATFKELLTRHKSTVAEFLTKNEDWFFADYNSKLLESSNYITRRQAIKLLGDILLDRSNSAVMTKYVSSRDNLRILMNLLRESSKSIQIEAFHVFKLFAANQNKPADIVNILVANRSKLLRLLADLKPDKEDERFEADKSQVLREIAALEPRDLA

SEQ ID NO: 77536 - protein, 300 aa, Arabidopsis thaliana; identical to SEQ ID NO: 27829
  peptide (1)..(300): Ceres Seq. ID no. 12576764
  misc_feature (1)..(296): Pfam Name: Mo25 protein family Pfam Description: Mo25 protein family
  misc_feature (1)..(300): Homolog of NCBI NO: 15214076 NR Description: Hypothetical MO25-like protein At5g47540 emb|CAB78730.1~gene_id:MNJ7.13~similar to unknown protein thaliana] >gi|16226301|gb|AAL16128.1|AF428296_1 AT5g47540/MNJ7_13
  misc_feature (1)..(300): Homolog of NCBI NO: 15238126 NR Description: putative protein; protein id: At5g47540.1
  misc_feature (1)..(300): Homolog of NCBI NO: 15236013 NR Description: putative protein; protein id: At4g17270.1, by cDNA: gi_14190518, supported by cDNA: gi_15810066 [Arabidopsis
  misc_feature (1)..(300): Homolog of NCBI NO: 7485184 NR Description: hypothetical protein - Arabidopsis thaliana
  misc_feature (1)..(294): Homolog of NCBI NO: 34901086 NR Description: putative MO25 protein (CGI-66) [Oryza sativa
  misc_feature (1)..(299): Homolog of NCBI NO: 15227629 NR Description: unknown protein; protein id: At2g03410.1
  misc_feature (1)..(295): Homolog of NCBI NO: 7706481 NR Description: MO25 protein [Homo sapiens]
  misc_feature (1)..(295): Homolog of NCBI NO: 34877516 NR Description: similar to MO25 protein [Rattus norvegicus]
  misc_feature (1)..(295): Homolog of NCBI NO: 7459568 NR Description: hypothetical protein R02E12.2 - Caenorhabditis
  misc_feature (1)..(295): Homolog of NCBI NO: 17569177 NR Description: Mouse Mo25 protein like family member elegans] >gi|14670179|gb|AAA96186.2| Hypothetical protein

SEQ ID NO: 77537 - protein, 290 aa, Arabidopsis thaliana; identical to SEQ ID NO: 27830
  peptide (1)..(290): Ceres Seq. ID no. 12576765
  misc_feature (1)..(286): Pfam Name: Mo25 protein family Pfam Description: Mo25 protein family
  misc_feature (1)..(290): Homolog of NCBI NO: 15214076 NR Description: Hypothetical MO25-like protein At5g47540 emb|CAB78730.1~gene_id:MNJ7.13~similar to unknown protein thaliana] >gi|16226301|gb|AAL16128.1|AF428296_1 AT5g47540/MNJ7_13
  misc_feature (1)..(290): Homolog of NCBI NO: 15238126 NR Description: putative protein; protein id: At5g47540.1
  misc_feature (1)..(290): Homolog of NCBI NO: 15236013 NR Description: putative protein; protein id: At4g17270.1, by cDNA: gi_14190518, supported by cDNA: gi_15810066 [Arabidopsis
  misc_feature (1)..(290): Homolog of NCBI NO: 7485184 NR Description: hypothetical protein - Arabidopsis thaliana
  misc_feature (1)..(284): Homolog of NCBI NO: 34901086 NR Description: putative MO25 protein (CGI-66) [Oryza sativa
  misc_feature (1)..(289): Homolog of NCBI NO: 15227629 NR Description: unknown protein; protein id: At2g03410.1
  misc_feature (1)..(285): Homolog of NCBI NO: 7706481 NR Description: MO25 protein [Homo sapiens]
  misc_feature (1)..(285): Homolog of NCBI NO: 34877516 NR Description: similar to MO25 protein [Rattus norvegicus]
  misc_feature (1)..(285): Homolog of NCBI NO: 7459568 NR Description: hypothetical protein R02E12.2 - Caenorhabditis
  misc_feature (1)..(285): Homolog of NCBI NO: 17569177 NR Description: Mouse Mo25 protein like family member elegans] >gi|14670179|gb|AAA96186.2| Hypothetical protein

SEQ ID NO: 77538 - DNA, 2540 bp, Arabidopsis thaliana
  misc_feature (1)..(2540): Ceres Seq. ID no. 12576770
  misc_feature: MA Experiment ID: 20000184 Result: Down-regulated in Transcription
  misc_feature: MA Experiment 20000184 PARAMETER Experiment Name: At_Shoots__P Parameter: Age (day) Value: 7
  misc_feature: MA Experiment 20000184 PARAMETER Experiment Name: At_Shoots__P Parameter: Tissue Value: Shoots vs. Whole Plant
  misc_feature: MA Experiment ID: 20001560 Result: Down-regulated in Transcription
  misc_feature: MA Experiment 20001560 PARAMETER Experiment Name: At_Drought_Soil_Dry_P Parameter: Age (day) Value: 28
  misc_feature: MA Experiment 20001560 PARAMETER Experiment Name: At_Drought_Soil_Dry_P Parameter: Organism Value: A. thaliana
  misc_feature: MA Experiment 20001560 PARAMETER Experiment Name: At_Drought_Soil_Dry_P Parameter: Plant Line Value: WS
  misc_feature: MA Experiment 20001560 PARAMETER Experiment Name: At_Drought_Soil_Dry_P Parameter: Post Timepoint (hr) Value: None
  misc_feature: MA Experiment 20001560 PARAMETER Experiment Name: At_Drought_Soil_Dry_P Parameter: Post-Treatment Value: None
  misc_feature: MA Experiment 20001560 PARAMETER Experiment Name: At_Drought_Soil_Dry_P Parameter: Timepoint (day) Value: 14
  misc_feature: MA Experiment 20001560 PARAMETER Experiment Name: At_Drought_Soil_Dry_P Parameter: Treatment Value: Drought vs. No Drought
aatccaatctacttttatttttgcgtacatctctctccatcttccattaaagtcttaccctttcttcatcacttgctcttgaaattttctctcccaaaaaagattcaaattcttcatcaagatcgttgttttctctgaaagttgttgcctttttgctatggagggatggtgttgggtctcgctgagccattaaagttgttgtctttgttatggatgaattagggattaggattttgagctgttgttgttgttgattcttctctatcgaaaagaagttgttatgggttgcataatctctaagaagaagtctccaaagaggaatccaccatggaaagaaacattagagaagcgttcttcaaggatcaattcgtcgaggattgatgattctagccaaactaaagaggaacaagataggtcgaataaagttaggttgattgaatctgaaaagtttagttcaagtaggttttctgagaaacatcaggagattgctgagattggtgatactgatgaagatgaagatgatgatcatcatccacctgaggagttgaagagagagcctagtgttgtgattcctccaagtcctgaaaccgtttcaaaggaggctgaattggctgctggatggcctgcttggctagtctcagtggctggtgaggcacttgtgaattggactccacgacgtgctagtacctttgagaaattggagaaaattggccaaggtacatatagcagtgtatacaaggctcgtgatcttactaataacaagattgttgcactcaaaagagtccggtttgatcttagcgatttagagagtgttaagtttatggcgagagagattattgtaatgagaaggcttgatcatcctaatgtacttaagttagaagggttgatcactgcctctgtttcatcttctctgtacttggtttttgagtatatggatcatgatctcgtcggacttgcttccatacctggtatcaagttttcagagcctcaggttaaatgttatatgcaacaacttctaagcgggcttcatcattgtcacagtcgtggtgttctgcatcgtgatataaagggctctaatctactgattgatagtaatggagtcttgaagattgcagattttgggttagcaacgtttttcgatccacagaactgcgttccattaactagccgtgttgtgactctttggtatcgacccccagagcttctacttggagcttgtcattatggtgttggggttgatttgtggagcacaggctgtatcttaggtgaactatattccgggaaaccaatcctggccgggaaaaccgaggtagagcaactgcataaaatcttcaagctatgtggttcaccgacagaagattactggaggaaactaaagctaccaccttcagctgcatttagacccgctcttccatatggaagacgtgtagcagagatgtttaaagacttgccaacgaatgttctttcccttttggaggctttactctccatagatcccgatcggagaggctctgcagctagagctcttgagagtgagtatttcagaacagagccgtttgcttgtgatccatcttctctaccaaaatatcctcccagcaaagagattgatgccaaaatccgcgatgatgcgaaaaggcaacgacccacccaggagaagcatgagagacaagactctcagacaagacgatcacacgaaagaaaactgatcccgccggtaaaagctaataatccatcactttcaacagctgtggagaatccttatctaagaagctgtgttccgggtaattcacaaagacaaatgcaggacatgacctgcaacaatccaacaagcggaagagtctctcactcaggtccgatgatgaaaaaccggaatcttagtcggttaacatacgtgaaggacaatgcagcccctagaataccttcatatagggctaactcagcaggacaaggaggcggttatgttgggtcagatcaacaaatgatggatcagcaaaggaaggaattgagaacattcaacagagctgacactatggataatagtaaaagacaaaccaaaatcccaaatgacccatcttggtatgattcaggggataacaagatgtacatgtccggtccattactggctcagccaagaaaagtggatcagatgctggaagaacacgaccggcagctccaagatttcaccagacagaaagcaaaacactgcagaaactaaatcacgtatctgaatgattttgctgggagtcttttatcagaggacaaaaacagagaaccattcaagtcttgttgtatcaagaagagtcttatttggttcgtagattttgaaaaatttgtttgtaatatatagagattaaaagattgttgttggcttataaaaagctaagctctgtggttatagagtgatgtgtataacatttatacagactcatcatagagtttggttctttgtgtatattacatgtatgtacacttcttcatatattacagagatgtgtacataacataacatatccatatatgtttcatagattcctattatc

SEQ ID NO: 77539 - protein, 644 aa, Arabidopsis thaliana
  peptide (1)..(644): Ceres Seq. ID no. 12576771
  misc_feature (137)..(421): Pfam Name: Protein kinase domain Pfam Description: Protein kinase domain
  misc_feature (19)..(591): Homolog of NCBI NO: 9280653 NR Description: F21B7.34 [Arabidopsis thaliana] putative protein kinase [Arabidopsis thaliana]
  misc_feature (19)..(467): Homolog of NCBI NO: 15218897 NR Description: putative protein kinase; protein id: At1g03740.1, by cDNA: gi_13430451, supported by cDNA: gi_14532735 [Arabidopsis
  misc_feature (1)..(482): Homolog of NCBI NO: 15219169 NR Description: cell division-related protein, putative; protein At1g53050.1 [Arabidopsis thaliana] >gi|25405618|pir||A96571
  misc_feature (439)..(637): Homolog of NCBI NO: 15219169 NR Description: cell division-related protein, putative; protein At1g53050.1 [Arabidopsis thaliana] >gi|25405618|pir||A96571
  misc_feature (1)..(482): Homolog of NCBI NO: 28393523 NR Description: putative cell division-related protein
  misc_feature (439)..(637): Homolog of NCBI NO: 28393523 NR Description: putative cell division-related protein
  misc_feature (61)..(628): Homolog of NCBI NO: 34903662 NR Description: putative CRK1 protein [Oryza sativa (japonica group)] >gi|20804521|dbj|BAB92215.1| putative CRK1 protein [Oryza
  misc_feature (91)..(488): Homolog of NCBI NO: 15217565 NR Description: putative protein kinase; protein id: At1g09600.1
  misc_feature (91)..(488): Homolog of NCBI NO: 25402555 NR Description: hypothetical protein [imported] - Arabidopsis >gi|3482933|gb|AAC33218.1| Similar to cdc2 protein kinases
  misc_feature (602)..(640): Homolog of NCBI NO: 15217565 NR Description: putative protein kinase; protein id: At1g09600.1
MGCIISKKKSPKRNPPWKETLEKRSSRINSSRIDDSSQTKEEQDRSNKVRLIESEKFSSSRFSEKHQEIAEIGDTDEDEDDDHHPPEELKREPSVVIPPSPETVSKEAELAAGWPAWLVSVAGEALVNWTPRRASTFEKLEKIGQGTYSSVYKARDLTNNKIVALKRVRFDLSDLESVKFMAREIIVMRRLDHPNVLKLEGLITASVSSSLYLVFEYMDHDLVGLASIPGIKFSEPQVKCYMQQLLSGLHHCHSRGVLHRDIKGSNLLIDSNGVLKIADFGLATFFDPQNCVPLTSRVVTLWYRPPELLLGACHYGVGVDLWSTGCILGELYSGKPILAGKTEVEQLHKIFKLCGSPTEDYWRKLKLPPSAAFRPALPYGRRVAEMFKDLPTNVLSLLEALLSIDPDRRGSAARALESEYFRTEPFACDPSSLPKYPPSKEIDAKIRDDAKRQRPTQEKHERQDSQTRRSHERKLIPPVKANNPSLSTAVENPYLRSCVPGNSQRQMQDMTCNNPTSGRVSHSGPMMKNRNLSRLTYVKDNAAPRIPSYRANSAGQGGGYVGSDQQMMDQQRKELRTFNRADTMDNSKRQTKIPNDPSWYDSGDNKMYMSGPLLAQPRKVDQMLEEHDRQLQDFTRQKAKHCRN

SEQ ID NO: 77540 - protein, 464 aa, Arabidopsis thaliana
  peptide (1)..(464): Ceres Seq. ID no. 12576772
  misc_feature (1)..(241): Pfam Name: Protein kinase domain Pfam Description: Protein kinase domain
  misc_feature (1)..(411): Homolog of NCBI NO: 9280653 NR Description: F21B7.34 [Arabidopsis thaliana] putative protein kinase [Arabidopsis thaliana]
  misc_feature (1)..(287): Homolog of NCBI NO: 15218897 NR Description: putative protein kinase; protein id: At1g03740.1, by cDNA: gi_13430451, supported by cDNA: gi_14532735 [Arabidopsis
  misc_feature (1)..(302): Homolog of NCBI NO: 15219169 NR Description: cell division-related protein, putative; protein At1g53050.1 [Arabidopsis thaliana] >gi|25405618|pir||A96571
  misc_feature (259)..(457): Homolog of NCBI NO: 15219169 NR Description: cell division-related protein, putative; protein At1g53050.1 [Arabidopsis thaliana] >gi|25405618|pir||A96571
  misc_feature (1)..(302): Homolog of NCBI NO: 28393523 NR Description: putative cell division-related protein
  misc_feature (259)..(457): Homolog of NCBI NO: 28393523 NR Description: putative cell division-related protein
  misc_feature (1)..(448): Homolog of NCBI NO: 34903662 NR Description: putative CRK1 protein [Oryza sativa (japonica group)] >gi|20804521|dbj|BAB92215.1| putative CRK1 protein [Oryza
  misc_feature (1)..(308): Homolog of NCBI NO: 15217565 NR Description: putative protein kinase; protein id: At1g09600.1
  misc_feature (1)..(308): Homolog of NCBI NO: 25402555 NR Description: hypothetical protein [imported] - Arabidopsis >gi|3482933|gb|AAC33218.1| Similar to cdc2 protein kinases
  misc_feature (422)..(460): Homolog of NCBI NO: 15217565 NR Description: putative protein kinase; protein id: At1g09600.1
MAREIIVMRRLDHPNVLKLEGLITASVSSSLYLVFEYMDHDLVGLASIPGIKFSEPQVKCYMQQLLSGLHHCHSRGVLHRDIKGSNLLIDSNGVLKIADFGLATFFDPQNCVPLTSRVVTLWYRPPELLLGACHYGVGVDLWSTGCILGELYSGKPILAGKTEVEQLHKIFKLCGSPTEDYWRKLKLPPSAAFRPALPYGRRVAEMFKDLPTNVLSLLEALLSIDPDRRGSAARALESEYFRTEPFACDPSSLPKYPPSKEIDAKIRDDAKRQRPTQEKHERQDSQTRRSHERKLIPPVKANNPSLSTAVENPYLRSCVPGNSQRQMQDMTCNNPTSGRVSHSGPMMKNRNLSRLTYVKDNAAPRIPSYRANSAGQGGGYVGSDQQMMDQQRKELRTFNRADTMDNSKRQTKIPNDPSWYDSGDNKMYMSGPLLAQPRKVDQMLEEHDRQLQDFTRQKAKHCRN

SEQ ID NO: 77541 - protein, 457 aa, Arabidopsis thaliana
  peptide (1)..(457): Ceres Seq. ID no. 12576773
  misc_feature (1)..(234): Pfam Name: Protein kinase domain Pfam Description: Protein kinase domain
  misc_feature (1)..(404): Homolog of NCBI NO: 9280653 NR Description: F21B7.34 [Arabidopsis thaliana] putative protein kinase [Arabidopsis thaliana]
  misc_feature (1)..(280): Homolog of NCBI NO: 15218897 NR Description: putative protein kinase; protein id: At1g03740.1, by cDNA: gi_13430451, supported by cDNA: gi_14532735 [Arabidopsis
  misc_feature (1)..(295): Homolog of NCBI NO: 15219169 NR Description: cell division-related protein, putative; protein At1g53050.1 [Arabidopsis thaliana] >gi|25405618|pir||A96571
  misc_feature (252)..(450): Homolog of NCBI NO: 15219169 NR Description: cell division-related protein, putative; protein At1g53050.1 [Arabidopsis thaliana] >gi|25405618|pir||A96571
  misc_feature (1)..(295): Homolog of NCBI NO: 28393523 NR Description: putative cell division-related protein
  misc_feature (252)..(450): Homolog of NCBI NO: 28393523 NR Description: putative cell division-related protein
  misc_feature (1)..(441): Homolog of NCBI NO: 34903662 NR Description: putative CRK1 protein [Oryza sativa (japonica group)] >gi|20804521|dbj|BAB92215.1| putative CRK1 protein [Oryza
  misc_feature (1)..(301): Homolog of NCBI NO: 15217565 NR Description: putative protein kinase; protein id: At1g09600.1
  misc_feature (1)..(301): Homolog of NCBI NO: 25402555 NR Description: hypothetical protein [imported] - Arabidopsis >gi|3482933|gb|AAC33218.1| Similar to cdc2 protein kinases
  misc_feature (415)..(453): Homolog of NCBI NO: 15217565 NR Description: putative protein kinase; protein id: At1g09600.1
MRRLDHPNVLKLEGLITASVSSSLYLVFEYMDHDLVGLASIPGIKFSEPQVKCYMQQLLSGLHHCHSRGVLHRDIKGSNLLIDSNGVLKIADFGLATFFDPQNCVPLTSRVVTLWYRPPELLLGACHYGVGVDLWSTGCILGELYSGKPILAGKTEVEQLHKIFKLCGSPTEDYWRKLKLPPSAAFRPALPYGRRVAEMFKDLPTNVLSLLEALLSIDPDRRGSAARALESEYFRTEPFACDPSSLPKYPPSKEIDAKIRDDAKRQRPTQEKHERQDSQTRRSHERKLIPPVKANNPSLSTAVENPYLRSCVPGNSQRQMQDMTCNNPTSGRVSHSGPMMKNRNLSRLTYVKDNAAPRIPSYRANSAGQGGGYVGSDQQMMDQQRKELRTFNRADTMDNSKRQTKIPNDPSWYDSGDNKMYMSGPLLAQPRKVDQMLEEHDRQLQDFTRQKAKHCRN

SEQ ID NO: 77542 - DNA, 1053 bp, Arabidopsis thaliana
  misc_feature (1)..(1053): Ceres Seq. ID no. 12576774
  misc_feature: MA Experiment ID: 108434 Result: Up-regulated in Transcription
  misc_feature: MA Experiment 108434 PARAMETER Experiment Name: At_Root_Tips_cDNA_P Parameter: Tissue Value: Root Tips
  misc_feature: MA Experiment ID: 108462 Result: Down-regulated in Transcription
  misc_feature: MA Experiment 108462 PARAMETER Experiment Name: At_Germinating_Seeds_cDNA_P Parameter: Age (day) Value: 2 vs. 0
  misc_feature: MA Experiment 108462 PARAMETER Experiment Name: At_Germinating_Seeds_cDNA_P Parameter: Tissue Value: Germinating Seeds
  misc_feature: MA Experiment ID: 108463 Result: Down-regulated in Transcription
  misc_feature: MA Experiment 108463 PARAMETER Experiment Name: At_Germinating_Seeds_cDNA_P Parameter: Age (day) Value: 3 vs. 0
  misc_feature: MA Experiment 108463 PARAMETER Experiment Name: At_Germinating_Seeds_cDNA_P Parameter: Tissue Value: Germinating Seeds
  misc_feature: MA Experiment ID: 108464 Result: Down-regulated in Transcription
  misc_feature: MA Experiment 108464 PARAMETER Experiment Name: At_Germinating_Seeds_cDNA_P Parameter: Age (day) Value: 4 vs. 0
  misc_feature: MA Experiment 108464 PARAMETER Experiment Name: At_Germinating_Seeds_cDNA_P Parameter: Tissue Value: Germinating Seeds
  misc_feature: MA Experiment ID: 20000089 Result: Up-regulated in Transcription
  misc_feature: MA Experiment ID: 20000111 Result: Up-regulated in Transcription
  misc_feature: MA Experiment 20000111 PARAMETER Experiment Name: At_42deg_Heat_cDNA_P Parameter: Temperature (deg C) Value: 42 vs. 22
  misc_feature: MA Experiment 20000111 PARAMETER Experiment Name: At_42deg_Heat_cDNA_P Parameter: Timepoint (hr) Value: 6
  misc_feature: MA Experiment 20000111 PARAMETER Experiment Name: At_42deg_Heat_cDNA_P Parameter: Tissue Value: Aerial
  misc_feature: MA Experiment ID: 20000113 Result: Up-regulated in Transcription
  misc_feature: MA Experiment 20000113 PARAMETER Experiment Name: At_42deg_Heat_cDNA_P Parameter: Temperature (deg C) Value: 42 vs. 22
  misc_feature: MA Experiment 20000113 PARAMETER Experiment Name: At_42deg_Heat_cDNA_P Parameter: Timepoint (hr) Value: 8
  misc_feature: MA Experiment 20000113 PARAMETER Experiment Name: At_42deg_Heat_cDNA_P Parameter: Tissue Value: Aerial
  misc_feature: MA Experiment ID: 20000173 Result: Up-regulated in Transcription
  misc_feature: MA Experiment 20000173 PARAMETER Experiment Name: At_42deg_Heat_P Parameter: Age (day) Value: 14
  misc_feature: MA Experiment 20000173 PARAMETER Experiment Name: At_42deg_Heat_P Parameter: Organism Value: A. thaliana
  misc_feature: MA Experiment 20000173 PARAMETER Experiment Name: At_42deg_Heat_P Parameter: Plant Line Value: WS
  misc_feature: MA Experiment 20000173 PARAMETER Experiment Name: At_42deg_Heat_P Parameter: Temperature (deg C) Value: 42 vs. 22
  misc_feature: MA Experiment 20000173 PARAMETER Experiment Name: At_42deg_Heat_P Parameter: Timepoint (hr) Value: 6
  misc_feature: MA Experiment 20000173 PARAMETER Experiment Name: At_42deg_Heat_P Parameter: Tissue Value: Aerial
  misc_feature: MA Experiment ID: 20000234 Result: Down-regulated in Transcription
  misc_feature: MA Experiment 20000234 PARAMETER Experiment Name: At_Siliques_P Parameter: Age (day) Value: 21
  misc_feature: MA Experiment 20000234 PARAMETER Experiment Name: At_Siliques_P Parameter: Organism Value: A. thaliana
  misc_feature: MA Experiment 20000234 PARAMETER Experiment Name: At_Siliques_P Parameter: Plant Line Value: WS
  misc_feature: MA Experiment 20000234 PARAMETER Experiment Name: At_Siliques_P Parameter: Tissue Value: Less Than 5mm Siliques vs. Whole Plant
  misc_feature: MA Experiment ID: 20000235 Result: Down-regulated in Transcription
  misc_feature: MA Experiment 20000235 PARAMETER Experiment Name: At_Siliques_P Parameter: Age (day) Value: 21
  misc_feature: MA Experiment 20000235 PARAMETER Experiment Name: At_Siliques_P Parameter: Organism Value: A. thaliana
  misc_feature: MA Experiment 20000235 PARAMETER Experiment Name: At_Siliques_P Parameter: Plant Line Value: WS
  misc_feature: MA Experiment 20000235 PARAMETER Experiment Name: At_Siliques_P Parameter: Tissue Value: 5-10mm Siliques vs. Whole Plant
  misc_feature: MA Experiment ID: 20000264 Result: Down-regulated in Transcription
  misc_feature: MA Experiment 20000264 PARAMETER Experiment Name: At_Open_Flower_P Parameter: Age (day) Value: 21
  misc_feature: MA Experiment 20000264 PARAMETER Experiment Name: At_Open_Flower_P Parameter: Plant Line Value: WS
  misc_feature: MA Experiment 20000264 PARAMETER Experiment Name: At_Open_Flower_P Parameter: Tissue Value: Open Flower vs. Whole Plant
  misc_feature: MA Experiment ID: 20000265 Result: Down-regulated in Transcription
  misc_feature: MA Experiment 20000265 PARAMETER Experiment Name: At_Open_Flower_P Parameter: Age (day) Value: 21
  misc_feature: MA Experiment 20000265 PARAMETER Experiment Name: At_Open_Flower_P Parameter: Plant Line Value: WS
  misc_feature: MA Experiment 20000265 PARAMETER Experiment Name: At_Open_Flower_P Parameter: Tissue Value: Closed Flower vs. Whole Plant
  misc_feature: MA Experiment ID: 20000794 Result: Down-regulated in Transcription
  misc_feature: MA Experiment 20000794 PARAMETER Experiment Name: At_Petals_P Parameter: Age (day) Value: 23-25 days
  misc_feature: MA Experiment 20000794 PARAMETER Experiment Name: At_Petals_P Parameter: Plant Line Value: WS
  misc_feature: MA Experiment 20000794 PARAMETER Experiment Name: At_Petals_P Parameter: Tissue Value: Petals vs. Whole plant
  misc_feature: MA Experiment ID: 20001451 Result: Up-regulated in Transcription
  misc_feature: MA Experiment 20001451 PARAMETER Experiment Name: At_Far-red-induction_P Parameter: Age (day) Value: 7
  misc_feature: MA Experiment 20001451 PARAMETER Experiment Name: At_Far-red-induction_P Parameter: Light Value: Far-red vs. White
  misc_feature: MA Experiment 20001451 PARAMETER Experiment Name: At_Far-red-induction_P Parameter: Organism Value: A. thaliana
  misc_feature: MA Experiment 20001451 PARAMETER Experiment Name: At_Far-red-induction_P Parameter: Plant Line Value: Columbia
  misc_feature: MA Experiment 20001451 PARAMETER Experiment Name: At_Far-red-induction_P Parameter: Timepoint (hr) Value: 24
  misc_feature: MA Experiment 20001451 PARAMETER Experiment Name: At_Far-red-induction_P Parameter: Tissue Value: Whole Plant
tctttttgtcgactgcttcttcacgccgtcgaggaattcttctccaccaacgaatccggcgacgtcttatcaccaccttgtcgaatctttagttgatgttgtttaaaggttttagctaataagggcatgaaacggatctgctcggtttcaagtgttcaactttaagtttcagagctttagcatcgccacgttccttgaactatcccctgcagtgtatcaagcgttcatcagttcggatggagagtagcaacttttcttctggtgtcagaaccgagagtagtgtgaagccaagaggagcattgatagttctagaaggtcttgatcgcagcgggaaatcaacacagtgtgctaagctactctctttcttgaatggtttaggacatccgaccgagctctggagattccccgatagagagacgagtgtcggtcagatgatatccgcgtatctttctaataagtcgcagttagatgatcacacaattcatctccttttcagcgccaatcgttgggagaaaaggtcgttgatggaggaaaagctaaaaacaggaactacgcttatcgtggatcgttattcgtattctggtgttgcattctcatcagctaaaggtctcgatatcgaatggtgcaaggctcccgaaatcgggttactggctccagattctgtactttacctggacatttcacctgaaagagctgctgagagaggtggatatggagatgagaggtatgagcgagtggagtttcagaagaaagttgcagacttttatcaaacccttggcgattcttcatggaagataatcaatgccagtgatgccatggaggaagtagagaagaagattcaacaagtggtattagatcaagtcaaagaatgtactgaaggaaagcctctgtctctcctatggtcgtcatagaacgttttcgagtcatagcacttgcaagtttagtgattttgaaggaacttttgttgaagtttatactatgttgtgccatctaagcccattaacaggcccaaaagtttagtttatgtcgtcactcatgacatcttaatcgatt

SEQ ID NO: 77543 - protein, 224 aa, Arabidopsis thaliana
  peptide (1)..(224): Ceres Seq. ID no. 12576775
  misc_feature (27)..(183): Pfam Name: Thymidylate kinase Pfam Description: Thymidylate kinase
  misc_feature (1)..(224): Homolog of NCBI NO: 30697225 NR Description: thymidylate kinase - like protein [Arabidopsis
  misc_feature (1)..(224): Homolog of NCBI NO: 21553651 NR Description: thymidylate kinase-like protein [Arabidopsis
  misc_feature (1)..(224): Homolog of NCBI NO: 30697228 NR Description: thymidylate kinase - like protein [Arabidopsis
  misc_feature (1)..(224): Homolog of NCBI NO: 15912289 NR Description: AT5g59440/f2o15_100 [Arabidopsis thaliana]
  misc_feature (26)..(183): Homolog of NCBI NO: 25288285 NR Description: dTMP kinase (EC 2.7.4.9) [imported] - Arabidopsis (fragment) >gi|3493131|gb|AAC33288.1| thymidylate kinase
  misc_feature (14)..(222): Homolog of NCBI NO: 27261100 NR Description: putative thymidylate kinase [Oryza sativa
  misc_feature (19)..(222): Homolog of NCBI NO: 291900 NR Description: thymidylate kinase
  misc_feature (19)..(222): Homolog of NCBI NO: 16975360 NR Description: Chain A, Wild Type Human Thymidylate Kinase
  misc_feature (19)..(222): Homolog of NCBI NO: 12804775 NR Description: Similar to deoxythymidylate kinase (thymidylate
  misc_feature (19)..(222): Homolog of NCBI NO: 23831251 NR Description: Thymidylate kinase (dTMP kinase)
MESSNFSSGVRTESSVKPRGALIVLEGLDRSGKSTQCAKLLSFLNGLGHPTELWRFPDRETSVGQMISAYLSNKSQLDDHTIHLLFSANRWEKRSLMEEKLKTGTTLIVDRYSYSGVAFSSAKGLDIEWCKAPEIGLLAPDSVLYLDISPERAAERGGYGDERYERVEFQKKVADFYQTLGDSSWKIINASDAMEEVEKKIQQVVLDQVKECTEGKPLSLLWSS

SEQ ID NO: 77544 - protein, 159 aa, Arabidopsis thaliana
  peptide (1)..(159): Ceres Seq. ID no. 12576776
  misc_feature (1)..(118): Pfam Name: Thymidylate kinase Pfam Description: Thymidylate kinase
  misc_feature (1)..(159): Homolog of NCBI NO: 30697225 NR Description: thymidylate kinase - like protein [Arabidopsis
  misc_feature (1)..(159): Homolog of NCBI NO: 21553651 NR Description: thymidylate kinase-like protein [Arabidopsis
  misc_feature (1)..(159): Homolog of NCBI NO: 30697228 NR Description: thymidylate kinase - like protein [Arabidopsis
  misc_feature (1)..(159): Homolog of NCBI NO: 15912289 NR Description: AT5g59440/f2o15_100 [Arabidopsis thaliana]
  misc_feature (1)..(118): Homolog of NCBI NO: 25288285 NR Description: dTMP kinase (EC 2.7.4.9) [imported] - Arabidopsis (fragment) >gi|3493131|gb|AAC33288.1| thymidylate kinase
  misc_feature (1)..(157): Homolog of NCBI NO: 27261100 NR Description: putative thymidylate kinase [Oryza sativa
  misc_feature (1)..(157): Homolog of NCBI NO: 291900 NR Description: thymidylate kinase
  misc_feature (1)..(157): Homolog of NCBI NO: 16975360 NR Description: Chain A, Wild Type Human Thymidylate Kinase
  misc_feature (1)..(157): Homolog of NCBI NO: 12804775 NR Description: Similar to deoxythymidylate kinase (thymidylate
  misc_feature (1)..(157): Homolog of NCBI NO: 23831251 NR Description: Thymidylate kinase (dTMP kinase)
MISAYLSNKSQLDDHTIHLLFSANRWEKRSLMEEKLKTGTTLIVDRYSYSGVAFSSAKGLDIEWCKAPEIGLLAPDSVLYLDISPERAAERGGYGDERYERVEFQKKVADFYQTLGDSSWKIINASDAMEEVEKKIQQVVLDQVKECTEGKPLSLLWSS

SEQ ID NO: 77545 - protein, 128 aa, Arabidopsis thaliana
  peptide (1)..(128): Ceres Seq. ID no. 12576777
  misc_feature (1)..(87): Pfam Name: Thymidylate kinase Pfam Description: Thymidylate kinase
  misc_feature (1)..(128): Homolog of NCBI NO: 30697225 NR Description: thymidylate kinase - like protein [Arabidopsis
  misc_feature (1)..(128): Homolog of NCBI NO: 21553651 NR Description: thymidylate kinase-like protein [Arabidopsis
  misc_feature (1)..(128): Homolog of NCBI NO: 30697228 NR Description: thymidylate kinase - like protein [Arabidopsis
  misc_feature (1)..(128): Homolog of NCBI NO: 15912289 NR Description: AT5g59440/f2o15_100 [Arabidopsis thaliana]
  misc_feature (1)..(87): Homolog of NCBI NO: 25288285 NR Description: dTMP kinase (EC 2.7.4.9) [imported] - Arabidopsis (fragment) >gi|3493131|gb|AAC33288.1| thymidylate kinase
  misc_feature (1)..(126): Homolog of NCBI NO: 27261100 NR Description: putative thymidylate kinase [Oryza sativa
  misc_feature (1)..(126): Homolog of NCBI NO: 291900 NR Description: thymidylate kinase
  misc_feature (1)..(126): Homolog of NCBI NO: 12804775 NR Description: Similar to deoxythymidylate kinase (thymidylate
  misc_feature (1)..(126): Homolog of NCBI NO: 23831251 NR Description: Thymidylate kinase (dTMP kinase)
  misc_feature (1)..(126): Homolog of NCBI NO: 16975360 NR Description: Chain A, Wild Type Human Thymidylate Kinase
MEEKLKTGTTLIVDRYSYSGVAFSSAKGLDIEWCKAPEIGLLAPDSVLYLDISPERAAERGGYGDERYERVEFQKKVADFYQTLGDSSWKIINASDAMEEVEKKIQQVVLDQVKECTEGKPLSLLWSS

SEQ ID NO: 77546 - DNA, 1025 bp, Arabidopsis thaliana
  misc_feature (1)..(1025): Ceres Seq. ID no. 12576778
  misc_feature: MA Experiment ID: 108434 Result: Down-regulated in Transcription
  misc_feature: MA Experiment 108434 PARAMETER Experiment Name: At_Root_Tips_cDNA_P Parameter: Tissue Value: Root Tips
  misc_feature: MA Experiment ID: 108435 Result: Down-regulated in Transcription
  misc_feature: MA Experiment 108435 PARAMETER Experiment Name: At_stm_Mutants_cDNA_P Parameter: Plant Line Value: wt Landsburg vs stm
  misc_feature: MA Experiment 108435 PARAMETER Experiment Name: At_stm_Mutants_cDNA_P Parameter: Tissue Value: Shoot Apical Meristem Region
  misc_feature: MA Experiment ID: 108461 Result: Up-regulated in Transcription
  misc_feature: MA Experiment 108461 PARAMETER Experiment Name: At_Germinating_Seeds_cDNA_P Parameter: Age (day) Value: 1 vs. 0
  misc_feature: MA Experiment 108461 PARAMETER Experiment Name: At_Germinating_Seeds_cDNA_P Parameter: Tissue Value: Germinating Seeds
  misc_feature: MA Experiment ID: 108462 Result: Up-regulated in Transcription
  misc_feature: MA Experiment 108462 PARAMETER Experiment Name: At_Germinating_Seeds_cDNA_P Parameter: Age (day) Value: 2 vs. 0
  misc_feature: MA Experiment 108462 PARAMETER Experiment Name: At_Germinating_Seeds_cDNA_P Parameter: Tissue Value: Germinating Seeds
  misc_feature: MA Experiment ID: 108464 Result: Up-regulated in Transcription
  misc_feature: MA Experiment 108464 PARAMETER Experiment Name: At_Germinating_Seeds_cDNA_P Parameter: Age (day) Value: 4 vs. 0
  misc_feature: MA Experiment 108464 PARAMETER Experiment Name: At_Germinating_Seeds_cDNA_P Parameter: Tissue Value: Germinating Seeds
  misc_feature: MA Experiment ID: 108488 Result: Up-regulated in Transcription
  misc_feature: MA Experiment ID: 108489 Result: Down-regulated in Transcription
  misc_feature: MA Experiment ID: 108594 Result: Down-regulated in Transcription
  misc_feature: MA Experiment 108594 PARAMETER Experiment Name: At_Ler-rhl_Root_cDNA_P Parameter: Plant Line Value: null
  misc_feature: MA Experiment ID: 20000180 Result: Up-regulated in Transcription
  misc_feature: MA Experiment 20000180 PARAMETER Experiment Name: At_Germinating_Seeds_P Parameter: Age (hr) Value: 24 vs. 0
  misc_feature: MA Experiment 20000180 PARAMETER Experiment Name: At_Germinating_Seeds_P Parameter: Tissue Value: Germinating Seeds
  misc_feature: MA Experiment ID: 20000185 Result: Down-regulated in Transcription
  misc_feature: MA Experiment 20000185 PARAMETER Experiment Name: At_Roots__P Parameter: Age (day) Value: 7 vs. 21
  misc_feature: MA Experiment 20000185 PARAMETER Experiment Name: At_Roots__P Parameter: Organism Value: A. thaliana
  misc_feature: MA Experiment 20000185 PARAMETER Experiment Name: At_Roots__P Parameter: Tissue Value: Roots vs. Whole Plant
  misc_feature: MA Experiment ID: 20000269 Result: Down-regulated in Transcription
  misc_feature: MA Experiment 20000269 PARAMETER Experiment Name: At_1mM_KNO3_L-vs-H_Roots_P Parameter: Age (day) Value: 7,10,12
  misc_feature: MA Experiment 20000269 PARAMETER Experiment Name: At_1mM_KNO3_L-vs-H_Roots_P Parameter: Organism Value: A. thaliana
  misc_feature: MA Experiment 20000269 PARAMETER Experiment Name: At_1mM_KNO3_L-vs-H_Roots_P Parameter: Plant Line Value: WS
  misc_feature: MA Experiment 20000269 PARAMETER Experiment Name: At_1mM_KNO3_L-vs-H_Roots_P Parameter: Timepoint (day) Value: 7,10,12
  misc_feature: MA Experiment 20000269 PARAMETER Experiment Name: At_1mM_KNO3_L-vs-H_Roots_P Parameter: Tissue Value: Roots
  misc_feature: MA Experiment 20000269 PARAMETER Experiment Name: At_1mM_KNO3_L-vs-H_Roots_P Parameter: Treatment Value: 1mM KNO3 vs. 50mM KNO3
  misc_feature: MA Experiment ID: 20000437 Result: Down-regulated in Transcription
  misc_feature: MA Experiment 20000437 PARAMETER Experiment Name: At_Drought_P Parameter: Age (day) Value: 8
  misc_feature: MA Experiment 20000437 PARAMETER Experiment Name: At_Drought_P Parameter: Organism Value: A. thaliana
  misc_feature: MA Experiment 20000437 PARAMETER Experiment Name: At_Drought_P Parameter: Plant Line Value: WS
  misc_feature: MA Experiment 20000437 PARAMETER Experiment Name: At_Drought_P Parameter: Timepoint (hr) Value: 24
  misc_feature: MA Experiment 20000437 PARAMETER Experiment Name: At_Drought_P Parameter: Tissue Value: Whole Plant
  misc_feature: MA Experiment 20000437 PARAMETER Experiment Name: At_Drought_P Parameter: Treatment Value: Drought vs. No Drought
  misc_feature: MA Experiment ID: 20000439 Result: Down-regulated in Transcription
  misc_feature: MA Experiment 20000439 PARAMETER Experiment Name: At_Roots__P Parameter: Age (day) Value: 14 vs. 21
  misc_feature: MA Experiment 20000439 PARAMETER Experiment Name: At_Roots__P Parameter: Organism Value: A. thaliana
  misc_feature: MA Experiment 20000439 PARAMETER Experiment Name: At_Roots__P Parameter: Tissue Value: Roots vs. Whole Plant
  misc_feature: MA Experiment ID: 20000794 Result: Down-regulated in Transcription
  misc_feature: MA Experiment 20000794 PARAMETER Experiment Name: At_Petals_P Parameter: Age (day) Value: 23-25 days
  misc_feature: MA Experiment 20000794 PARAMETER Experiment Name: At_Petals_P Parameter: Plant Line Value: WS
  misc_feature: MA Experiment 20000794 PARAMETER Experiment Name: At_Petals_P Parameter: Tissue Value: Petals vs. Whole plant
  misc_feature: MA Experiment ID: 20001557 Result: Down-regulated in Transcription
  misc_feature: MA Experiment 20001557 PARAMETER Experiment Name: At_Drought_Soil_Dry_P Parameter: Age (day) Value: 27
  misc_feature: MA Experiment 20001557 PARAMETER Experiment Name: At_Drought_Soil_Dry_P Parameter: Organism Value: A. thaliana
  misc_feature: MA Experiment 20001557 PARAMETER Experiment Name: At_Drought_Soil_Dry_P Parameter: Plant Line Value: WS
  misc_feature: MA Experiment 20001557 PARAMETER Experiment Name: At_Drought_Soil_Dry_P Parameter: Post Timepoint (hr) Value: 3
  misc_feature: MA Experiment 20001557 PARAMETER Experiment Name: At_Drought_Soil_Dry_P Parameter: Post-Treatment Value: Re-Water vs. No Drought
  misc_feature: MA Experiment 20001557 PARAMETER Experiment Name: At_Drought_Soil_Dry_P Parameter: Timepoint (day) Value: 13
  misc_feature: MA Experiment 20001557 PARAMETER Experiment Name: At_Drought_Soil_Dry_P Parameter: Treatment Value: Drought vs. No Drought
  misc_feature: MA Experiment ID: 20001757 Result: Up-regulated in Transcription
  misc_feature: MA Experiment 20001757 PARAMETER Experiment Name: At_50mM_NH4NO3_L-to-H_P Parameter: Timepoint (hr) Value: 6
  misc_feature: MA Experiment 20001757 PARAMETER Experiment Name: At_50mM_NH4NO3_L-to-H_P Parameter: Tissue Value: Leaf
  misc_feature: MA Experiment 20001757 PARAMETER Experiment Name: At_50mM_NH4NO3_L-to-H_P Parameter: Treatment Value: 50mM NH4NO3 vs 100mM Mannitol
  misc_feature: MA Experiment ID: 20001904 Result: Down-regulated in Transcription
  misc_feature: MA Experiment 20001904 PARAMETER Experiment Name: At_Drought_Reproduction_P Parameter: Age (day) Value: 37
  misc_feature: MA Experiment 20001904 PARAMETER Experiment Name: At_Drought_Reproduction_P Parameter: Organism Value: A. thaliana
  misc_feature: MA Experiment 20001904 PARAMETER Experiment Name: At_Drought_Reproduction_P Parameter: Plant Line Value: WS
  misc_feature: MA Experiment 20001904 PARAMETER Experiment Name: At_Drought_Reproduction_P Parameter: Timepoint (day) Value: 7
  misc_feature: MA Experiment 20001904 PARAMETER Experiment Name: At_Drought_Reproduction_P Parameter: Tissue Value: Rosettes
  misc_feature: MA Experiment 20001904 PARAMETER Experiment Name: At_Drought_Reproduction_P Parameter: Treatment Value: Drought vs. No Drought
  misc_feature: MA Experiment ID: 20001906 Result: Down-regulated in Transcription
  misc_feature: MA Experiment 20001906 PARAMETER Experiment Name: At_Drought_Reproduction_P Parameter: Age (day) Value: 35
  misc_feature: MA Experiment 20001906 PARAMETER Experiment Name: At_Drought_Reproduction_P Parameter: Organism Value: A. thaliana
  misc_feature: MA Experiment 20001906 PARAMETER Experiment Name: At_Drought_Reproduction_P Parameter: Plant Line Value: WS
  misc_feature: MA Experiment 20001906 PARAMETER Experiment Name: At_Drought_Reproduction_P Parameter: Timepoint (day) Value: 5
  misc_feature: MA Experiment 20001906 PARAMETER Experiment Name: At_Drought_Reproduction_P Parameter: Tissue Value: Siliques
  misc_feature: MA Experiment 20001906 PARAMETER Experiment Name: At_Drought_Reproduction_P Parameter: Treatment Value: Drought vs. No Drought
  misc_feature: MA Experiment ID: 20001908 Result: Down-regulated in Transcription
  misc_feature: MA Experiment 20001908 PARAMETER Experiment Name: At_Drought_Reproduction_P Parameter: Age (day) Value: 40
  misc_feature: MA Experiment 20001908 PARAMETER Experiment Name: At_Drought_Reproduction_P Parameter: Organism Value: A. thaliana
  misc_feature: MA Experiment 20001908 PARAMETER Experiment Name: At_Drought_Reproduction_P Parameter: Plant Line Value: WS
  misc_feature: MA Experiment 20001908 PARAMETER Experiment Name: At_Drought_Reproduction_P Parameter: Timepoint (day) Value: 10
  misc_feature: MA Experiment 20001908 PARAMETER Experiment Name: At_Drought_Reproduction_P Parameter: Tissue Value: Siliques
  misc_feature: MA Experiment 20001908 PARAMETER Experiment Name: At_Drought_Reproduction_P Parameter: Treatment Value: Drought vs. No Drought
agctcttcctagtgttaaaccagagtaaagcttgaaactttggactaaaagaatggcgtctttgggtgtgtcggaaatgcttggtactccccttaacttcagggcagtttcaagatcgtctgctccgttggcatcaagcccatccacgttcaagactgttgctctcttctctaagaaaaagccagctcctgctaagtccaaggctgtctctgagactagcgatgagctcgccaagtggtatggtcctgacaggagaattttcttgcctgatggtcttttggatagatcagagatcccagagtacttaaacggtgaagttgctggagattatggttatgacccatttggtcttggaaagaagcctgagaactttgctaaataccaagcttttgaattgatccatgcgagatgggctatgttaggagcagctggtttcatcattcctgaagctttaaacaaatatggcgctaactgtggccctgaagctgtctggtttaagactggtgctttgcttcttgatggaaacacattgaactactttggcaagaacatccctatcaaccttgttctcgccgtagttgctgaggttgttctcctcggtggagccgagtactacagaatcaccaacggattggatttcgaggacaagctacacccaggaggtccatttgatcctctaggccttgctaaggaccctgagcaaggagctcttctcaaagtcaaagagatcaagaacgggagattagccatgtttgcgatgctcggtttctttatccaagcgtatgttaccggagaaggtcctgttgagaaccttgcaaagcatctcagtgatccttttggaaacaacttgcttaccgtcatcgctggaactgccgagagagctcccactctctaagccatttctactttttttaagagcttccaaaatgtacactttgttcgattggaactccttttgacaatgttaaaaaaacttccatctgaatcttcttgatatatttcaaattttcaatggtgctttatca

SEQ ID NO: 77547 - protein, 280 aa, Arabidopsis thaliana; identical to SEQ ID NO: 25086
  peptide (1)..(280): Ceres Seq. ID no. 12576779
  misc_feature (80)..(244): Pfam Name: Chlorophyll A-B binding protein Pfam Description: Chlorophyll A-B binding protein
  misc_feature (1)..(280): Homolog of NCBI NO: 15235029 NR Description: light-harvesting chlorophyll a/b binding protein; id: At4g10340.1, supported by cDNA: 39765., supported by cDNA:
  misc_feature (1)..(280): Homolog of NCBI NO: 21593520 NR Description: chlorophyll a/b-binding protein-like [Arabidopsis
  misc_feature (3)..(280): Homolog of NCBI NO: 1644289 NR Description: chlorophyll a/b-binding protein CP26 in PS II
  misc_feature (3)..(280): Homolog of NCBI NO: 100200 NR Description: chlorophyll a/b-binding protein type I precursor
  misc_feature (3)..(280): Homolog of NCBI NO: 19184 NR Description: Type I (26 kD) CP29 polypeptide [Lycopersicon
  misc_feature (1)..(280): Homolog of NCBI NO: 7443227 NR Description: chlorophyll a/b-binding protein CP26 precursor -
  misc_feature (1)..(280): Homolog of NCBI NO: 100573 NR Description: chlorophyll a/b-binding protein CP29 precursor - >gi|18958|emb|CAA44777.1| Precursor of CP29, core chlorophyll a/b
  misc_feature (1)..(280): Homolog of NCBI NO: 7443226 NR Description: chlorophyll a/b-binding protein CP26 precursor -
  misc_feature (2)..(280): Homolog of NCBI NO: 322391 NR Description: chlorophyll a/b-binding protein Lhcb5 - Scotch >gi|22750|emb|CAA78900.1| Lhcb5 protein [Pinus sylvestris]
  misc_feature (110)..(280): Homolog of NCBI NO: 15487754 NR Description: ASCAB9 [Centromadia pungens]

SEQ ID NO: 77548 - protein, 272 aa, Arabidopsis thaliana; identical to SEQ ID NO: 25087
  peptide (1)..(272): Ceres Seq. ID no. 12576780
  misc_feature (72)..(236): Pfam Name: Chlorophyll A-B binding protein Pfam Description: Chlorophyll A-B binding protein
  misc_feature (1)..(272): Homolog of NCBI NO: 15235029 NR Description: light-harvesting chlorophyll a/b binding protein; id: At4g10340.1, supported by cDNA: 39765., supported by cDNA:
  misc_feature (1)..(272): Homolog of NCBI NO: 21593520 NR Description: chlorophyll a/b-binding protein-like [Arabidopsis
  misc_feature (1)..(272): Homolog of NCBI NO: 1644289 NR Description: chlorophyll a/b-binding protein CP26 in PS II
  misc_feature (1)..(272): Homolog of NCBI NO: 100200 NR Description: chlorophyll a/b-binding protein type I precursor
  misc_feature (1)..(272): Homolog of NCBI NO: 19184 NR Description: Type I (26 kD) CP29 polypeptide [Lycopersicon
  misc_feature (1)..(272): Homolog of NCBI NO: 7443227 NR Description: chlorophyll a/b-binding protein CP26 precursor -
  misc_feature (1)..(272): Homolog of NCBI NO: 100573 NR Description: chlorophyll a/b-binding protein CP29 precursor - >gi|18958|emb|CAA44777.1| Precursor of CP29, core chlorophyll a/b
  misc_feature (1)..(272): Homolog of NCBI NO: 7443226 NR Description: chlorophyll a/b-binding protein CP26 precursor -
  misc_feature (1)..(272): Homolog of NCBI NO: 322391 NR Description: chlorophyll a/b-binding protein Lhcb5 - Scotch >gi|22750|emb|CAA78900.1| Lhcb5 protein [Pinus sylvestris]
  misc_feature (102)..(272): Homolog of NCBI NO: 15487754 NR Description: ASCAB9 [Centromadia pungens]

SEQ ID NO: 77549 - protein, 159 aa, Arabidopsis thaliana; identical to SEQ ID NO: 25088
  peptide (1)..(159): Ceres Seq. ID no. 12576781
  misc_feature (1)..(123): Pfam Name: Chlorophyll A-B binding protein Pfam Description: Chlorophyll A-B binding protein
  misc_feature (1)..(159): Homolog of NCBI NO: 15235029 NR Description: light-harvesting chlorophyll a/b binding protein; id: At4g10340.1, supported by cDNA: 39765., supported by cDNA:
  misc_feature (1)..(159): Homolog of NCBI NO: 21593520 NR Description: chlorophyll a/b-binding protein-like [Arabidopsis
  misc_feature (1)..(159): Homolog of NCBI NO: 1644289 NR Description: chlorophyll a/b-binding protein CP26 in PS II
  misc_feature (1)..(159): Homolog of NCBI NO: 100200 NR Description: chlorophyll a/b-binding protein type I precursor
  misc_feature (1)..(159): Homolog of NCBI NO: 19184 NR Description: Type I (26 kD) CP29 polypeptide [Lycopersicon
  misc_feature (1)..(159): Homolog of NCBI NO: 7443227 NR Description: chlorophyll a/b-binding protein CP26 precursor -
  misc_feature (1)..(159): Homolog of NCBI NO: 100573 NR Description: chlorophyll a/b-binding protein CP29 precursor - >gi|18958|emb|CAA44777.1| Precursor of CP29, core chlorophyll a/b
  misc_feature (1)..(159): Homolog of NCBI NO: 7443226 NR Description: chlorophyll a/b-binding protein CP26 precursor -
  misc_feature (1)..(159): Homolog of NCBI NO: 322391 NR Description: chlorophyll a/b-binding protein Lhcb5 - Scotch >gi|22750|emb|CAA78900.1| Lhcb5 protein [Pinus sylvestris]
  misc_feature (1)..(159): Homolog of NCBI NO: 15487754 NR Description: ASCAB9 [Centromadia pungens]

SEQ ID NO: 77550 - DNA, 1026 bp, Arabidopsis thaliana
  misc_feature (1)..(1026): Ceres Seq. ID no. 12576782
  misc_feature: MA Experiment ID: 108462 Result: Up-regulated in Transcription
  misc_feature: MA Experiment 108462 PARAMETER Experiment Name: At_Germinating_Seeds_cDNA_P Parameter: Age (day) Value: 2 vs. 0
  misc_feature: MA Experiment 108462 PARAMETER Experiment Name: At_Germinating_Seeds_cDNA_P Parameter: Tissue Value: Germinating Seeds
  misc_feature: MA Experiment ID: 108463 Result: Up-regulated in Transcription
  misc_feature: MA Experiment 108463 PARAMETER Experiment Name: At_Germinating_Seeds_cDNA_P Parameter: Age (day) Value: 3 vs. 0
  misc_feature: MA Experiment 108463 PARAMETER Experiment Name: At_Germinating_Seeds_cDNA_P Parameter: Tissue Value: Germinating Seeds
  misc_feature: MA Experiment ID: 108488 Result: Down-regulated in Transcription
  misc_feature: MA Experiment ID: 108573 Result: Up-regulated in Transcription
  misc_feature: MA Experiment 108573 PARAMETER Experiment Name: At_Drought_cDNA_P Parameter: Timepoint (hr) Value: 6
  misc_feature: MA Experiment 108573 PARAMETER Experiment Name: At_Drought_cDNA_P Parameter: Tissue Value: Aerial
  misc_feature: MA Experiment 108573 PARAMETER Experiment Name: At_Drought_cDNA_P Parameter: Treatment Value: Drought vs. No Drought
  misc_feature: MA Experiment ID: 20000086 Result: Down-regulated in Transcription
  misc_feature: MA Experiment 20000086 PARAMETER Experiment Name: At_100uM_ABA_Mutants_cDNA_P Parameter: Plant Line Value: CS22
  misc_feature: MA Experiment 20000086 PARAMETER Experiment Name: At_100uM_ABA_Mutants_cDNA_P Parameter: Timepoint (hr) Value: 6
  misc_feature: MA Experiment 20000086 PARAMETER Experiment Name: At_100uM_ABA_Mutants_cDNA_P Parameter: Tissue Value: Aerial
  misc_feature: MA Experiment 20000086 PARAMETER Experiment Name: At_100uM_ABA_Mutants_cDNA_P Parameter: Treatment Value: 100uM ABA vs. No Treatment
  misc_feature: MA Experiment ID: 20000179 Result: Up-regulated in Transcription
  misc_feature: MA Experiment 20000179 PARAMETER Experiment Name: At_Germinating_Seeds_P Parameter: Age (hr) Value: 6 vs. 0
  misc_feature: MA Experiment 20000179 PARAMETER Experiment Name: At_Germinating_Seeds_P Parameter: Tissue Value: Germinating Seeds
  misc_feature: MA Experiment ID: 20000180 Result: Up-regulated in Transcription
  misc_feature: MA Experiment 20000180 PARAMETER Experiment Name: At_Germinating_Seeds_P Parameter: Age (hr) Value: 24 vs. 0
  misc_feature: MA Experiment 20000180 PARAMETER Experiment Name: At_Germinating_Seeds_P Parameter: Tissue Value: Germinating Seeds
  misc_feature: MA Experiment ID: 20001451 Result: Up-regulated in Transcription
  misc_feature: MA Experiment 20001451 PARAMETER Experiment Name: At_Far-red-induction_P Parameter: Age (day) Value: 7
  misc_feature: MA Experiment 20001451 PARAMETER Experiment Name: At_Far-red-induction_P Parameter: Light Value: Far-red vs. White
  misc_feature: MA Experiment 20001451 PARAMETER Experiment Name: At_Far-red-induction_P Parameter: Organism Value: A. thaliana
  misc_feature: MA Experiment 20001451 PARAMETER Experiment Name: At_Far-red-induction_P Parameter: Plant Line Value: Columbia
  misc_feature: MA Experiment 20001451 PARAMETER Experiment Name: At_Far-red-induction_P Parameter: Timepoint (hr) Value: 24
  misc_feature: MA Experiment 20001451 PARAMETER Experiment Name: At_Far-red-induction_P Parameter: Tissue Value: Whole Plant
  misc_feature: MA Experiment ID: 20001560 Result: Down-regulated in Transcription
  misc_feature: MA Experiment 20001560 PARAMETER Experiment Name: At_Drought_Soil_Dry_P Parameter: Age (day) Value: 28
  misc_feature: MA Experiment 20001560 PARAMETER Experiment Name: At_Drought_Soil_Dry_P Parameter: Organism Value: A. thaliana
  misc_feature: MA Experiment 20001560 PARAMETER Experiment Name: At_Drought_Soil_Dry_P Parameter: Plant Line Value: WS
  misc_feature: MA Experiment 20001560 PARAMETER Experiment Name: At_Drought_Soil_Dry_P Parameter: Post Timepoint (hr) Value: None
  misc_feature: MA Experiment 20001560 PARAMETER Experiment Name: At_Drought_Soil_Dry_P Parameter: Post-Treatment Value: None
  misc_feature: MA Experiment 20001560 PARAMETER Experiment Name: At_Drought_Soil_Dry_P Parameter: Timepoint (day) Value: 14
  misc_feature: MA Experiment 20001560 PARAMETER Experiment Name: At_Drought_Soil_Dry_P Parameter: Treatment Value: Drought vs. No Drought
  misc_feature: MA Experiment ID: 20001905 Result: Up-regulated in Transcription
  misc_feature: MA Experiment 20001905 PARAMETER Experiment Name: At_Drought_Reproduction_P Parameter: Age (day) Value: 40
  misc_feature: MA Experiment 20001905 PARAMETER Experiment Name: At_Drought_Reproduction_P Parameter: Organism Value: A. thaliana
  misc_feature: MA Experiment 20001905 PARAMETER Experiment Name: At_Drought_Reproduction_P Parameter: Plant Line Value: WS
  misc_feature: MA Experiment 20001905 PARAMETER Experiment Name: At_Drought_Reproduction_P Parameter: Timepoint (day) Value: 10
  misc_feature: MA Experiment 20001905 PARAMETER Experiment Name: At_Drought_Reproduction_P Parameter: Tissue Value: Rosettes
  misc_feature: MA Experiment 20001905 PARAMETER Experiment Name: At_Drought_Reproduction_P Parameter: Treatment Value: Drought vs. No Drought
gagactcttgctttttcacaaaaaaaaagaaaaagagagagagagcagcaaccccagcagcatcgaagatcgtcgatcgtcgatcggttgctctctttcattaatcagatctaattgatacccaagcttcttcatcggaggccgtatctcacgaggaaacatgggcggtagatttggagtcctcctagtcctcttcctcttgagctggtcttgtcatgctacaaacccgattcttctcgaaccattcgaatcagctcatgatgacaaccaagtctgtgaactatgtgacaagtatgtcacgctagtcattgattaccttcaagactacgacaaccagaatgaactcgttgaggcccttcatatcagctgctctcagattcctcctctcaaaaaacagtgtctttcaatggtagatcattacacccaacttttcttcacacaagtctctactatcaaatcagaccaaatctgcaaacggcttaacctctgtcaagctgtgacaccggcctttgcctctcaagtccatcaaggaaactgcgaggcttgccgcgagactgtctctgaggttgtcaccaaactcaaggatcctgagactaagctgaagataattcggttacttctcaaggaatgcaagtcgcttaacaattaccaggacaagtgcaagaagatggtattcgagtacgggcctctgatgcttacggatttgcagaagtttctggagaagaaagacgtgtgcactatcctccacgtctgtccaggtccagccacccaccgtgactacgttcctgcggtggagtcattggcagattcgtaaattcggccaccttggttttgtcgtcattcacactaataccatgccatgatcgtgatgctaatttaatttggtaacccggtggtcatgtaaatactgattgatatattaaaaacataactacacgattgatgattcttgtgtgatttgaaaagaacgctgtctaaaggcccattgtccatcgatgggcctttttgctaatttctacattgccc

SEQ ID NO: 77551 - protein, 217 aa, Arabidopsis thaliana
  peptide (1)..(217): Ceres Seq. ID no. 12576783
  misc_feature (36)..(74): Pfam Name: Saposin-like type B, region 1 Pfam Description: Saposin-like type B, region 1
  misc_feature (1)..(217): Homolog of NCBI NO: 15241065 NR Description: putative protein; protein id: At5g01800.1, by cDNA: gi_15912284, supported by cDNA: gi_19548000 [Arabidopsis
  misc_feature (1)..(199): Homolog of NCBI NO: 15231028 NR Description: putative protein; protein id: At3g51730.1, by cDNA: 93651. [Arabidopsis thaliana] >gi|11358088|pir||T46069
  misc_feature (41)..(201): Homolog of NCBI NO: 6942199 NR Description: putative protein [Vitis riparia]
  misc_feature (35)..(198): Homolog of NCBI NO: 34896130 NR Description: P0701D05.19 [Oryza sativa (japonica >gi|13486662|dbj|BAB39899.1| hypothetical protein~similar to
  misc_feature (64)..(160): Homolog of NCBI NO: 18399278 NR Description: cyclin, putative; protein id: At1g34460.1
  misc_feature (39)..(203): Homolog of NCBI NO: 26364659 NR Description: unnamed protein product [Mus musculus]
  misc_feature (39)..(203): Homolog of NCBI NO: 26324414 NR Description: unnamed protein product [Mus musculus]
MGGRFGVLLVLFLLSWSCHATNPILLEPFESAHDDNQVCELCDKYVTLVIDYLQDYDNQNELVEALHISCSQIPPLKKQCLSMVDHYTQLFFTQVSTIKSDQICKRLNLCQAVTPAFASQVHQGNCEACRETVSEVVTKLKDPETKLKIIRLLLKECKSLNNYQDKCKKMVFEYGPLMLTDLQKFLEKKDVCTILHVCPGPATHRDYVPAVESLADS

SEQ ID NO: 77552 - protein, 135 aa, Arabidopsis thaliana
  peptide (1)..(135): Ceres Seq. ID no. 12576784
  misc_feature (82)..(116): Pfam Name: Saposin-like type B, region 2 Pfam Description: Saposin-like type B, region 2
  misc_feature (1)..(135): Homolog of NCBI NO: 15241065 NR Description: putative protein; protein id: At5g01800.1, by cDNA: gi_15912284, supported by cDNA: gi_19548000 [Arabidopsis
  misc_feature (1)..(117): Homolog of NCBI NO: 15231028 NR Description: putative protein; protein id: At3g51730.1, by cDNA: 93651. [Arabidopsis thaliana] >gi|11358088|pir||T46069
  misc_feature (1)..(119): Homolog of NCBI NO: 6942199 NR Description: putative protein [Vitis riparia]
  misc_feature (1)..(116): Homolog of NCBI NO: 34896130 NR Description: P0701D05.19 [Oryza sativa (japonica >gi|13486662|dbj|BAB39899.1| hypothetical protein~similar to
  misc_feature (1)..(78): Homolog of NCBI NO: 18399278 NR Description: cyclin, putative; protein id: At1g34460.1
  misc_feature (1)..(121): Homolog of NCBI NO: 26364659 NR Description: unnamed protein product [Mus musculus]
  misc_feature (1)..(121): Homolog of NCBI NO: 26324414 NR Description: unnamed protein product [Mus musculus]
MVDHYTQLFFTQVSTIKSDQICKRLNLCQAVTPAFASQVHQGNCEACRETVSEVVTKLKDPETKLKIIRLLLKECKSLNNYQDKCKKMVFEYGPLMLTDLQKFLEKKDVCTILHVCPGPATHRDYVPAVESLADS

SEQ ID NO: 77553 - DNA, 2638 bp, Arabidopsis thaliana
  misc_feature (1)..(2638): Ceres Seq. ID no. 12576818
  misc_feature: MA Experiment ID: 20000179 Result: Down-regulated in Transcription
  misc_feature: MA Experiment 20000179 PARAMETER Experiment Name: At_Germinating_Seeds_P Parameter: Age (hr) Value: 6 vs. 0
  misc_feature: MA Experiment 20000179 PARAMETER Experiment Name: At_Germinating_Seeds_P Parameter: Tissue Value: Germinating Seeds
  misc_feature: MA Experiment ID: 20000180 Result: Down-regulated in Transcription
  misc_feature: MA Experiment 20000180 PARAMETER Experiment Name: At_Germinating_Seeds_P Parameter: Age (hr) Value: 24 vs. 0
  misc_feature: MA Experiment 20000180 PARAMETER Experiment Name: At_Germinating_Seeds_P Parameter: Tissue Value: Germinating Seeds
  misc_feature: MA Experiment ID: 20000235 Result: Down-regulated in Transcription
  misc_feature: MA Experiment 20000235 PARAMETER Experiment Name: At_Siliques_P Parameter: Age (day) Value: 21
  misc_feature: MA Experiment 20000235 PARAMETER Experiment Name: At_Siliques_P Parameter: Organism Value: A. thaliana
  misc_feature: MA Experiment 20000235 PARAMETER Experiment Name: At_Siliques_P Parameter: Plant Line Value: WS
  misc_feature: MA Experiment 20000235 PARAMETER Experiment Name: At_Siliques_P Parameter: Tissue Value: 5-10mm Siliques vs. Whole Plant
  misc_feature: MA Experiment ID: 20000265 Result: Down-regulated in Transcription
  misc_feature: MA Experiment 20000265 PARAMETER Experiment Name: At_Open_Flower_P Parameter: Age (day) Value: 21
  misc_feature: MA Experiment 20000265 PARAMETER Experiment Name: At_Open_Flower_P Parameter: Plant Line Value: WS
  misc_feature: MA Experiment 20000265 PARAMETER Experiment Name: At_Open_Flower_P Parameter: Tissue Value: Closed Flower vs. Whole Plant
  misc_feature: MA Experiment ID: 20000794 Result: Down-regulated in Transcription
  misc_feature: MA Experiment 20000794 PARAMETER Experiment Name: At_Petals_P Parameter: Age (day) Value: 23-25 days
  misc_feature: MA Experiment 20000794 PARAMETER Experiment Name: At_Petals_P Parameter: Plant Line Value: WS
  misc_feature: MA Experiment 20000794 PARAMETER Experiment Name: At_Petals_P Parameter: Tissue Value: Petals vs. Whole plant
acatcacgacaggggaacaaagcgaatcaaatctgttgtgcagctgtaattgatgacctgcagtggttctgtctgtttcacattatggatctgaaggagaactcttttgaacacatgggaatacacttgggagagattggtattgttctctttccttggtttctgtggttaagtttattcctaagttgtggctatgcagctataactatttcaagtcctttgacattgggacaaactctgagttcccctggtggattttatgagttaggattcttcagtcctaacaactctcagaatcagtatgtagggatctggttcaagaaaattacaccacgggtggttgtgtgggtggctaacagagaaaagccgatcacaacccctgtggcaaatcttactatcagcagaaatggtagtcttattttgctagacagtagtaaaaatgttgtttggtcaaccagaagaccttccatatctaataagtgtcatgcaaagctcttagatacaggaaatcttgtcatagtagatgatgtttcagaaaatcttttgtggcaaagttttgagaatcctggtgatactatgctgccttactcatcgctgatgtacaaccttgccactggggagaagcgagtattatcttcgtggaaaagccacactgatccatcccctggtgatttcgtagttcgactaacaccacaagtgccagcacagatcgttactatgagaggctcatcggtttataagagaagcggtccatgggctaagaccggtttcactggcgtaccactaatggatgaatcatacacaagtcctttcagcctttcccaagatgtaggaaatggaacagggctcttctcttatttacagagaagttctgaacttacacgagttatcataacatcagagggatatctaaagacttttcggtacaatgggacaggctgggttctggactttatcactccagcaaatttatgtgatttgtatggtgcatgtggaccttttgggctgtgtgtgacgtccaatcccacaaagtgtaaatgcatgaaagggtttgtaccaaaatacaaggaggagtggaagcgcgggaacatgacttctggatgtatgcgacgtacagaattatcttgtcaggcaaacttatctacaaagacacaaggaaaaggtgtagacgtcttctatcgtctggccaatgtaaagcctccggatctctacgaatatgcaagctttgtggatgcagatcaatgccaccagggttgtctcagcaattgctcttgctctgcttttgcgtatattactggaattggttgtttgctttggaatcatgagctaatagacacaattagatattccgttggaggagagtttctttccattcgtcttgcaagttcagaactggctggaagcaggaggaccaagattattgttggtagtatcagcctttccatttttgtgattttggcctttggctcatataagtactggagatacagagcaaaacaaaatgttgggccaacttgggcattcttcaacaattcacaagattcatggaaaaatggtttggaaccacaagaaatctcaggtttaacattctttgagatgaataccatacgagctgctaccaataacttcaatgtctcaaacaaactcggtcaaggtggatttggtccagtttataagggaacactgtcagacaagaaggatatagccgttaaacgcctttctagcagctctgggcagggtacagaagagttcatgaacgaaataaaactcatctcaaaattacaacacagaaacttggttcgacttttgggatgctgcattgatggagaagaaaaactactaatttatgagtttctagtgaacaaaagcctcgacacttttctctttgatttgacgctaaagcttcagattgattggcctaagaggttcaacatcattcaaggtgtttcacgtgggcttctctatctccatcgtgactcttgcatgagggtcatacatcgagatctgaaggtcagcaacattctcttggacgacaaaatgaacccaaaaatatcagatttcggattggctcggatgtttcaaggaacccaacatcaagacaacactcgtaaggttgttggaactctaggatacatgtctcctgagtatgcatggacaggaatgttctcagagaagtccgacatatatgcttttggagttctcctgttagaaatcataagtgggaagaagatttcaagcttttgctgtggagaggaaggcaaaacccttcttggacatgcatgggaatgttggctcgagaccggtggagtggatctattggatgaagatattagcagctcgtgttctccagttgaagttgaagtcgctcgatgtgttcagattggtctactctgcatccaacagcaagctgttgacagaccaaacatagcacaagtagtgaccatgatgacaagtgcaacagatcttccgagaccaaaacaaccactctttgcattgcagattcaagatcaagagagtgttgtgtcagtctcaaagtctgtgaatcatgttacacaaactgagatatatgggcgataaagtttgctttattatgtattaactgcagactgaaatgtaataccagcaatagagtgtaatc

SEQ ID NO: 77554 - protein, 858 aa, Arabidopsis thaliana
  peptide (1)..(858): Ceres Seq. ID no. 12576819
  misc_feature (111)..(221): Pfam Name: D-mannose binding lectin Pfam Description: D-mannose binding lectin
  misc_feature (46)..(858): Homolog of NCBI NO: 18407151 NR Description: expressed protein; protein id: At1g61380.1, by cDNA: 13461., supported by cDNA: gi_19699074 [Arabidopsis >gi|3056592|gb|AAC13903.1|AAC13903 T1F9.13 [Arabidopsis thaliana]
  misc_feature (46)..(858): Homolog of NCBI NO: 21537374 NR Description: receptor kinase, putative [Arabidopsis thaliana]
  misc_feature (41)..(858): Homolog of NCBI NO: 15219917 NR Description: receptor kinase, putative; protein id: At1g61390.1
  misc_feature (43)..(858): Homolog of NCBI NO: 15219933 NR Description: receptor protein kinase (IRK1), putative; protein
  misc_feature (43)..(858): Homolog of NCBI NO: 15219914 NR Description: receptor protein kinase (IRK1), putative; protein
  misc_feature (43)..(858): Homolog of NCBI NO: 15219935 NR Description: receptor kinase, putative; protein id: [Arabidopsis thaliana] >gi|3056580|gb|AAC13891.1|AAC13891 T1F9.1
  misc_feature (289)..(732): Homolog of NCBI NO: 30696575 NR Description: S-locus protein kinase, putative [Arabidopsis
  misc_feature (735)..(858): Homolog of NCBI NO: 30696575 NR Description: S-locus protein kinase, putative [Arabidopsis
  misc_feature (193)..(281): Homolog of NCBI NO: 30696575 NR Description: S-locus protein kinase, putative [Arabidopsis
  misc_feature (75)..(851): Homolog of NCBI NO: 25956275 NR Description: unnamed protein product [Lotus japonicus]
TSRQGNKANQICCAAVIDDLQWFCLFHIMDLKENSFEHMGIHLGEIGIVLFPWFLWLSLFLSCGYAAITISSPLTLGQTLSSPGGFYELGFFSPNNSQNQYVGIWFKKITPRVVVWVANREKPITTPVANLTISRNGSLILLDSSKNVVWSTRRPSISNKCHAKLLDTGNLVIVDDVSENLLWQSFENPGDTMLPYSSLMYNLATGEKRVLSSWKSHTDPSPGDFVVRLTPQVPAQIVTMRGSSVYKRSGPWAKTGFTGVPLMDESYTSPFSLSQDVGNGTGLFSYLQRSSELTRVIITSEGYLKTFRYNGTGWVLDFITPANLCDLYGACGPFGLCVTSNPTKCKCMKGFVPKYKEEWKRGNMTSGCMRRTELSCQANLSTKTQGKGVDVFYRLANVKPPDLYEYASFVDADQCHQGCLSNCSCSAFAYITGIGCLLWNHELIDTIRYSVGGEFLSIRLASSELAGSRRTKIIVGSISLSIFVILAFGSYKYWRYRAKQNVGPTWAFFNNSQDSWKNGLEPQEISGLTFFEMNTIRAATNNFNVSNKLGQGGFGPVYKGTLSDKKDIAVKRLSSSSGQGTEEFMNEIKLISKLQHRNLVRLLGCCIDGEEKLLIYEFLVNKSLDTFLFDLTLKLQIDWPKRFNIIQGVSRGLLYLHRDSCMRVIHRDLKVSNILLDDKMNPKISDFGLARMFQGTQHQDNTRKVVGTLGYMSPEYAWTGMFSEKSDIYAFGVLLLEIISGKKISSFCCGEEGKTLLGHAWECWLETGGVDLLDEDISSSCSPVEVEVARCVQIGLLCIQQQAVDRPNIAQVVTMMTSATDLPRPKQPLFALQIQDQESVVSVSKSVNHVTQTEIYGR

SEQ ID NO: 77555 - protein, 830 aa, Arabidopsis thaliana
  peptide (1)..(830): Ceres Seq. ID no. 12576820
  misc_feature (83)..(193): Pfam Name: D-mannose binding lectin Pfam Description: D-mannose binding lectin
  misc_feature (18)..(830): Homolog of NCBI NO: 18407151 NR Description: expressed protein; protein id: At1g61380.1, by cDNA: 13461., supported by cDNA: gi_19699074 [Arabidopsis >gi|3056592|gb|AAC13903.1|AAC13903 T1F9.13 [Arabidopsis thaliana]
  misc_feature (18)..(830): Homolog of NCBI NO: 21537374 NR Description: receptor kinase, putative [Arabidopsis thaliana]
  misc_feature (13)..(830): Homolog of NCBI NO: 15219917 NR Description: receptor kinase, putative; protein id: At1g61390.1
  misc_feature (15)..(830): Homolog of NCBI NO: 15219933 NR Description: receptor protein kinase (IRK1), putative; protein
  misc_feature (15)..(830): Homolog of NCBI NO: 15219914 NR Description: receptor protein kinase (IRK1), putative; protein
  misc_feature (15)..(830): Homolog of NCBI NO: 15219935 NR Description: receptor kinase, putative; protein id: [Arabidopsis thaliana] >gi|3056580|gb|AAC13891.1|AAC13891 T1F9.1
  misc_feature (261)..(704): Homolog of NCBI NO: 30696575 NR Description: S-locus protein kinase, putative [Arabidopsis
  misc_feature (707)..(830): Homolog of NCBI NO: 30696575 NR Description: S-locus protein kinase, putative [Arabidopsis
  misc_feature (165)..(253): Homolog of NCBI NO: 30696575 NR Description: S-locus protein kinase, putative [Arabidopsis
  misc_feature (47)..(823): Homolog of NCBI NO: 25956275 NR Description: unnamed protein product [Lotus japonicus]
MDLKENSFEHMGIHLGEIGIVLFPWFLWLSLFLSCGYAAITISSPLTLGQTLSSPGGFYELGFFSPNNSQNQYVGIWFKKITPRVVVWVANREKPITTPVANLTISRNGSLILLDSSKNVVWSTRRPSISNKCHAKLLDTGNLVIVDDVSENLLWQSFENPGDTMLPYSSLMYNLATGEKRVLSSWKSHTDPSPGDFVVRLTPQVPAQIVTMRGSSVYKRSGPWAKTGFTGVPLMDESYTSPFSLSQDVGNGTGLFSYLQRSSELTRVIITSEGYLKTFRYNGTGWVLDFITPANLCDLYGACGPFGLCVTSNPTKCKCMKGFVPKYKEEWKRGNMTSGCMRRTELSCQANLSTKTQGKGVDVFYRLANVKPPDLYEYASFVDADQCHQGCLSNCSCSAFAYITGIGCLLWNHELIDTIRYSVGGEFLSIRLASSELAGSRRTKIIVGSISLSIFVILAFGSYKYWRYRAKQNVGPTWAFFNNSQDSWKNGLEPQEISGLTFFEMNTIRAATNNFNVSNKLGQGGFGPVYKGTLSDKKDIAVKRLSSSSGQGTEEFMNEIKLISKLQHRNLVRLLGCCIDGEEKLLIYEFLVNKSLDTFLFDLTLKLQIDWPKRFNIIQGVSRGLLYLHRDSCMRVIHRDLKVSNILLDDKMNPKISDFGLARMFQGTQHQDNTRKVVGTLGYMSPEYAWTGMFSEKSDIYAFGVLLLEIISGKKISSFCCGEEGKTLLGHAWECWLETGGVDLLDEDISSSCSPVEVEVARCVQIGLLCIQQQAVDRPNIAQVVTMMTSATDLPRPKQPLFALQIQDQESVVSVSKSVNHVTQTEIYGR

SEQ ID NO: 77556 - protein, 820 aa, Arabidopsis thaliana
  peptide (1)..(820): Ceres Seq. ID no. 12576821
  misc_feature (73)..(183): Pfam Name: D-mannose binding lectin Pfam Description: D-mannose binding lectin
  misc_feature (8)..(820): Homolog of NCBI NO: 18407151 NR Description: expressed protein; protein id: At1g61380.1, by cDNA: 13461., supported by cDNA: gi_19699074 [Arabidopsis >gi|3056592|gb|AAC13903.1|AAC13903 T1F9.13 [Arabidopsis thaliana]
  misc_feature (8)..(820): Homolog of NCBI NO: 21537374 NR Description: receptor kinase, putative [Arabidopsis thaliana]
  misc_feature (3)..(820): Homolog of NCBI NO: 15219917 NR Description: receptor kinase, putative; protein id: At1g61390.1
  misc_feature (5)..(820): Homolog of NCBI NO: 15219933 NR Description: receptor protein kinase (IRK1), putative; protein
  misc_feature (5)..(820): Homolog of NCBI NO: 15219914 NR Description: receptor protein kinase (IRK1), putative; protein
  misc_feature (5)..(820): Homolog of NCBI NO: 15219935 NR Description: receptor kinase, putative; protein id: [Arabidopsis thaliana] >gi|3056580|gb|AAC13891.1|AAC13891 T1F9.1
  misc_feature (251)..(694): Homolog of NCBI NO: 30696575 NR Description: S-locus protein kinase, putative [Arabidopsis
  misc_feature (697)..(820): Homolog of NCBI NO: 30696575 NR Description: S-locus protein kinase, putative [Arabidopsis
  misc_feature (155)..(243): Homolog of NCBI NO: 30696575 NR Description: S-locus protein kinase, putative [Arabidopsis
  misc_feature (37)..(813): Homolog of NCBI NO: 25956275 NR Description: unnamed protein product [Lotus japonicus]
MGIHLGEIGIVLFPWFLWLSLFLSCGYAAITISSPLTLGQTLSSPGGFYELGFFSPNNSQNQYVGIWFKKITPRVVVWVANREKPITTPVANLTISRNGSLILLDSSKNVVWSTRRPSISNKCHAKLLDTGNLVIVDDVSENLLWQSFENPGDTMLPYSSLMYNLATGEKRVLSSWKSHTDPSPGDFVVRLTPQVPAQIVTMRGSSVYKRSGPWAKTGFTGVPLMDESYTSPFSLSQDVGNGTGLFSYLQRSSELTRVIITSEGYLKTFRYNGTGWVLDFITPANLCDLYGACGPFGLCVTSNPTKCKCMKGFVPKYKEEWKRGNMTSGCMRRTELSCQANLSTKTQGKGVDVFYRLANVKPPDLYEYASFVDADQCHQGCLSNCSCSAFAYITGIGCLLWNHELIDTIRYSVGGEFLSIRLASSELAGSRRTKIIVGSISLSIFVILAFGSYKYWRYRAKQNVGPTWAFFNNSQDSWKNGLEPQEISGLTFFEMNTIRAATNNFNVSNKLGQGGFGPVYKGTLSDKKDIAVKRLSSSSGQGTEEFMNEIKLISKLQHRNLVRLLGCCIDGEEKLLIYEFLVNKSLDTFLFDLTLKLQIDWPKRFNIIQGVSRGLLYLHRDSCMRVIHRDLKVSNILLDDKMNPKISDFGLARMFQGTQHQDNTRKVVGTLGYMSPEYAWTGMFSEKSDIYAFGVLLLEIISGKKISSFCCGEEGKTLLGHAWECWLETGGVDLLDEDISSSCSPVEVEVARCVQIGLLCIQQQAVDRPNIAQVVTMMTSATDLPRPKQPLFALQIQDQESVVSVSKSVNHVTQTEIYGR

SEQ ID NO: 77557 - DNA, 1106 bp, Arabidopsis thaliana
  misc_feature (1)..(1106): Ceres Seq. ID no. 12576828
  misc_feature: MA Experiment ID: 20000182 Result: Up-regulated in Transcription
  misc_feature: MA Experiment 20000182 PARAMETER Experiment Name: At_2mM_SA_P Parameter: Age (day) Value: 14
  misc_feature: MA Experiment 20000182 PARAMETER Experiment Name: At_2mM_SA_P Parameter: Organism Value: A. thaliana
  misc_feature: MA Experiment 20000182 PARAMETER Experiment Name: At_2mM_SA_P Parameter: Plant Line Value: WS
  misc_feature: MA Experiment 20000182 PARAMETER Experiment Name: At_2mM_SA_P Parameter: Timepoint (hr) Value: 6
  misc_feature: MA Experiment 20000182 PARAMETER Experiment Name: At_2mM_SA_P Parameter: Tissue Value: Aerial
  misc_feature: MA Experiment 20000182 PARAMETER Experiment Name: At_2mM_SA_P Parameter: Treatment Value: 2mM SA vs. No Treatment
  misc_feature: MA Experiment ID: 20000227 Result: Down-regulated in Transcription
  misc_feature: MA Experiment 20000227 PARAMETER Experiment Name: At_Root-Tips-vs-Tops_P Parameter: Tissue Value: Root Tips vs. Root Tops
  misc_feature: MA Experiment ID: 20000437 Result: Up-regulated in Transcription
  misc_feature: MA Experiment 20000437 PARAMETER Experiment Name: At_Drought_P Parameter: Age (day) Value: 8
  misc_feature: MA Experiment 20000437 PARAMETER Experiment Name: At_Drought_P Parameter: Organism Value: A. thaliana
  misc_feature: MA Experiment 20000437 PARAMETER Experiment Name: At_Drought_P Parameter: Plant Line Value: WS
  misc_feature: MA Experiment 20000437 PARAMETER Experiment Name: At_Drought_P Parameter: Timepoint (hr) Value: 24
  misc_feature: MA Experiment 20000437 PARAMETER Experiment Name: At_Drought_P Parameter: Tissue Value: Whole Plant
  misc_feature: MA Experiment 20000437 PARAMETER Experiment Name: At_Drought_P Parameter: Treatment Value: Drought vs. No Drought
ttttccgatataagcacgaaatcgctgtttctctcttcgacgaagctttgataatttgatctcaatcgatcgattctattgagaatttgtgtacctgttttcttataaggttaactaaggattgtggaatcagaagtgttgtgtttttgtgatcggagattatggattggggaaacgtaacggttgatgatctcttcgatgctctccgagaagttgactggtcgtctccgccgcgtcctccgtctgagttcttctcaaggttcaccgttcctaaatctgtccctaaatgggatagtcgcctcaagtgcaatctctactactaccgaacaaactatttcatcatgatcgtcgttatacttggattgggagtccttacaaggcctttagcgatcttcgctgcgcttttgacagcattaagtttggcatttctaaatgacagctttgcaggttcttttagtgagaaggcgacacgaaccgtcagaagattctctccacagttagctgctaaaatgagacctcctttgacacctgtcactcgtgggcgtccatcatcaaagagagcaatccatgtatgtggtcaaccccgttgggtttttgtcttgacatgctcacttgagttttgctctttggtatatttcctctggtttgctcagagtctcggttgcgctactcattgcacatcttgcaacaattcttcatgcaagcttgagaacaccgaacttgaaggcacgttttaacacatttagggaggaattccgagcagtatggcgtaactacagcgagatttagagtaatcttgtaccaccatgatcgtgttctgctgaggacataacgctgtaaagaccaaacttactgcctttctccaagataaacccggtttcgttaacactgtactatggatgttcaatctggatttgttgctcaatgactgggatcatctgttttttctttgatttgagatttgagctctgagctctttttgctagcaaaatcctctcttttttttgctaaagacttgtaaagctagctttgttgttcttcgttctaacacaaaaccctttgtgtaaagtcctagaatcgtttaatagcttgcatttttttctttc

SEQ ID NO: 77558 - protein, 191 aa, Arabidopsis thaliana
  peptide (1)..(191): Ceres Seq. ID no. 12576829
  misc_feature (1)..(165): Homolog of NCBI NO: 15241668 NR Description: putative protein; protein id: At5g02040.1, by cDNA: 18955., supported by cDNA: gi_15028344, supported by gi_15810042, supported by cDNA: gi_19310650 [Arabidopsis
  misc_feature (1)..(165): Homolog of NCBI NO: 21553976 NR Description: unknown [Arabidopsis thaliana]
  misc_feature (1)..(191): Homolog of NCBI NO: 15810043 NR Description: AT5g02040/T7H20_90 [Arabidopsis thaliana]
  misc_feature (1)..(163): Homolog of NCBI NO: 30681215 NR Description: prenylated rab acceptor (PRA1) family thaliana] >gi|26452890|dbj|BAC43523.1| unknown protein thaliana] >gi|28973353|gb|AAO64001.1| unknown protein
  misc_feature (1)..(161): Homolog of NCBI NO: 18087519 NR Description: At3g11395 [Arabidopsis thaliana]
  misc_feature (1)..(161): Homolog of NCBI NO: 22330987 NR Description: similar to CHP-rich zinc finger protein,
  misc_feature (1)..(161): Homolog of NCBI NO: 34908286 NR Description: P0005H10.15 [Oryza sativa (japonica
MDWGNVTVDDLFDALREVDWSSPPRPPSEFFSRFTVPKSVPKWDSRLKCNLYYYRTNYFIMIVVILGLGVLTRPLAIFAALLTALSLAFLNDSFAGSFSEKATRTVRRFSPQLAAKMRPPLTPVTRGRPSSKRAIHVCGQPRWVFVLTCSLEFCSLVYFLWFAQSLGCATHCTSCNNSSCKLENTELEGTF

SEQ ID NO: 77559 - protein, 131 aa, Arabidopsis thaliana
  peptide (1)..(131): Ceres Seq. ID no. 12576830
  misc_feature (1)..(105): Homolog of NCBI NO: 15241668 NR Description: putative protein; protein id: At5g02040.1, by cDNA: 18955., supported by cDNA: gi_15028344, supported by gi_15810042, supported by cDNA: gi_19310650 [Arabidopsis
  misc_feature (1)..(105): Homolog of NCBI NO: 21553976 NR Description: unknown [Arabidopsis thaliana]
  misc_feature (1)..(131): Homolog of NCBI NO: 15810043 NR Description: AT5g02040/T7H20_90 [Arabidopsis thaliana]
  misc_feature (1)..(103): Homolog of NCBI NO: 30681215 NR Description: prenylated rab acceptor (PRA1) family thaliana] >gi|26452890|dbj|BAC43523.1| unknown protein thaliana] >gi|28973353|gb|AAO64001.1| unknown protein
  misc_feature (1)..(101): Homolog of NCBI NO: 18087519 NR Description: At3g11395 [Arabidopsis thaliana]
  misc_feature (1)..(101): Homolog of NCBI NO: 22330987 NR Description: similar to CHP-rich zinc finger protein,
  misc_feature (1)..(101): Homolog of NCBI NO: 34908286 NR Description: P0005H10.15 [Oryza sativa (japonica
MIVVILGLGVLTRPLAIFAALLTALSLAFLNDSFAGSFSEKATRTVRRFSPQLAAKMRPPLTPVTRGRPSSKRAIHVCGQPRWVFVLTCSLEFCSLVYFLWFAQSLGCATHCTSCNNSSCKLENTELEGTF

SEQ ID NO: 77560 - DNA, 1782 bp, Arabidopsis thaliana
  misc_feature (1)..(1782): Ceres Seq. ID no. 12576843
  misc_feature: MA Experiment ID: 20000180 Result: Up-regulated in Transcription
  misc_feature: MA Experiment 20000180 PARAMETER Experiment Name: At_Germinating_Seeds_P Parameter: Age (hr) Value: 24 vs. 0
  misc_feature: MA Experiment 20000180 PARAMETER Experiment Name: At_Germinating_Seeds_P Parameter: Tissue Value: Germinating Seeds
  misc_feature: MA Experiment ID: 20000182 Result: Up-regulated in Transcription
  misc_feature: MA Experiment 20000182 PARAMETER Experiment Name: At_2mM_SA_P Parameter: Age (day) Value: 14
  misc_feature: MA Experiment 20000182 PARAMETER Experiment Name: At_2mM_SA_P Parameter: Organism Value: A. thaliana
  misc_feature: MA Experiment 20000182 PARAMETER Experiment Name: At_2mM_SA_P Parameter: Plant Line Value: WS
  misc_feature: MA Experiment 20000182 PARAMETER Experiment Name: At_2mM_SA_P Parameter: Timepoint (hr) Value: 6
  misc_feature: MA Experiment 20000182 PARAMETER Experiment Name: At_2mM_SA_P Parameter: Tissue Value: Aerial
  misc_feature: MA Experiment 20000182 PARAMETER Experiment Name: At_2mM_SA_P Parameter: Treatment Value: 2mM SA vs. No Treatment
  misc_feature: MA Experiment ID: 20000184 Result: Down-regulated in Transcription
  misc_feature: MA Experiment 20000184 PARAMETER Experiment Name: At_Shoots__P Parameter: Age (day) Value: 7
  misc_feature: MA Experiment 20000184 PARAMETER Experiment Name: At_Shoots__P Parameter: Tissue Value: Shoots vs. Whole Plant
  misc_feature: MA Experiment ID: 20000185 Result: Up-regulated in Transcription
  misc_feature: MA Experiment 20000185 PARAMETER Experiment Name: At_Roots__P Parameter: Age (day) Value: 7 vs. 21
  misc_feature: MA Experiment 20000185 PARAMETER Experiment Name: At_Roots__P Parameter: Organism Value: A. thaliana
  misc_feature: MA Experiment 20000185 PARAMETER Experiment Name: At_Roots__P Parameter: Tissue Value: Roots vs. Whole Plant
  misc_feature: MA Experiment ID: 20000234 Result: Down-regulated in Transcription
  misc_feature: MA Experiment 20000234 PARAMETER Experiment Name: At_Siliques_P Parameter: Age (day) Value: 21
  misc_feature: MA Experiment 20000234 PARAMETER Experiment Name: At_Siliques_P Parameter: Organism Value: A. thaliana
  misc_feature: MA Experiment 20000234 PARAMETER Experiment Name: At_Siliques_P Parameter: Plant Line Value: WS
  misc_feature: MA Experiment 20000234 PARAMETER Experiment Name: At_Siliques_P Parameter: Tissue Value: Less Than 5mm Siliques vs. Whole Plant
  misc_feature: MA Experiment ID: 20000235 Result: Down-regulated in Transcription
  misc_feature: MA Experiment 20000235 PARAMETER Experiment Name: At_Siliques_P Parameter: Age (day) Value: 21
  misc_feature: MA Experiment 20000235 PARAMETER Experiment Name: At_Siliques_P Parameter: Organism Value: A. thaliana
  misc_feature: MA Experiment 20000235 PARAMETER Experiment Name: At_Siliques_P Parameter: Plant Line Value: WS
  misc_feature: MA Experiment 20000235 PARAMETER Experiment Name: At_Siliques_P Parameter: Tissue Value: 5-10mm Siliques vs. Whole Plant
  misc_feature: MA Experiment ID: 20000264 Result: Down-regulated in Transcription
  misc_feature: MA Experiment 20000264 PARAMETER Experiment Name: At_Open_Flower_P Parameter: Age (day) Value: 21
  misc_feature: MA Experiment 20000264 PARAMETER Experiment Name: At_Open_Flower_P Parameter: Plant Line Value: WS
  misc_feature: MA Experiment 20000264 PARAMETER Experiment Name: At_Open_Flower_P Parameter: Tissue Value: Open Flower vs. Whole Plant
  misc_feature: MA Experiment ID: 20000265 Result: Down-regulated in Transcription
  misc_feature: MA Experiment 20000265 PARAMETER Experiment Name: At_Open_Flower_P Parameter: Age (day) Value: 21
  misc_feature: MA Experiment 20000265 PARAMETER Experiment Name: At_Open_Flower_P Parameter: Plant Line Value: WS
  misc_feature: MA Experiment 20000265 PARAMETER Experiment Name: At_Open_Flower_P Parameter: Tissue Value: Closed Flower vs. Whole Plant
  misc_feature: MA Experiment ID: 20000286 Result: Down-regulated in Transcription
  misc_feature: MA Experiment 20000286 PARAMETER Experiment Name: At_Open_Flower_P Parameter: Age (day) Value: 21
  misc_feature: MA Experiment 20000286 PARAMETER Experiment Name: At_Open_Flower_P Parameter: Plant Line Value: WS
  misc_feature: MA Experiment 20000286 PARAMETER Experiment Name: At_Open_Flower_P Parameter: Tissue Value: Half Open vs. Whole Plant
  misc_feature: MA Experiment ID: 20000439 Result: Up-regulated in Transcription
  misc_feature: MA Experiment 20000439 PARAMETER Experiment Name: At_Roots__P Parameter: Age (day) Value: 14 vs. 21
  misc_feature: MA Experiment 20000439 PARAMETER Experiment Name: At_Roots__P Parameter: Organism Value: A. thaliana
  misc_feature: MA Experiment 20000439 PARAMETER Experiment Name: At_Roots__P Parameter: Tissue Value: Roots vs. Whole Plant
  misc_feature: MA Experiment ID: 20000495 Result: Up-regulated in Transcription
  misc_feature: MA Experiment 20000495 PARAMETER Experiment Name: At_Guard_Cells_P Parameter: Harvest Date Value: 8/2/2002
  misc_feature: MA Experiment 20000495 PARAMETER Experiment Name: At_Guard_Cells_P Parameter: Organism Value: A. thaliana
  misc_feature: MA Experiment 20000495 PARAMETER Experiment Name: At_Guard_Cells_P Parameter: Tissue Value: Guard Cells vs. Leaves
  misc_feature: MA Experiment ID: 20000573 Result: Down-regulated in Transcription
  misc_feature: MA Experiment 20000573 PARAMETER Experiment Name: At_100uM_ABA_Mutants__P Parameter: Organism Value: A. thaliana
  misc_feature: MA Experiment 20000573 PARAMETER Experiment Name: At_100uM_ABA_Mutants__P Parameter: Plant Line Value: CS22 vs. Ler wt
  misc_feature: MA Experiment 20000573 PARAMETER Experiment Name: At_100uM_ABA_Mutants__P Parameter: Timepoint (hr) Value: N/A
  misc_feature: MA Experiment 20000573 PARAMETER Experiment Name: At_100uM_ABA_Mutants__P Parameter: Tissue Value: Whole Plant
  misc_feature: MA Experiment 20000573 PARAMETER Experiment Name: At_100uM_ABA_Mutants__P Parameter: Treatment Value: None
  misc_feature: MA Experiment ID: 20000574 Result: Down-regulated in Transcription
  misc_feature: MA Experiment 20000574 PARAMETER Experiment Name: At_100uM_ABA_Mutants__P Parameter: Organism Value: A. thaliana
  misc_feature: MA Experiment 20000574 PARAMETER Experiment Name: At_100uM_ABA_Mutants__P Parameter: Plant Line Value: CS23 vs. Ler wt
  misc_feature: MA Experiment 20000574 PARAMETER Experiment Name: At_100uM_ABA_Mutants__P Parameter: Timepoint (hr) Value: N/A
  misc_feature: MA Experiment 20000574 PARAMETER Experiment Name: At_100uM_ABA_Mutants__P Parameter: Tissue Value: Whole Plant
  misc_feature: MA Experiment 20000574 PARAMETER Experiment Name: At_100uM_ABA_Mutants__P Parameter: Treatment Value: None
  misc_feature: MA Experiment ID: 20001248 Result: Down-regulated in Transcription
  misc_feature: MA Experiment 20001248 PARAMETER Experiment Name: At_Far-red-induction_P Parameter: Age (day) Value: 7
  misc_feature: MA Experiment 20001248 PARAMETER Experiment Name: At_Far-red-induction_P Parameter: Light Value: Far-red vs. White
  misc_feature: MA Experiment 20001248 PARAMETER Experiment Name: At_Far-red-induction_P Parameter: Organism Value: A. thaliana
  misc_feature: MA Experiment 20001248 PARAMETER Experiment Name: At_Far-red-induction_P Parameter: Plant Line Value: Columbia
  misc_feature: MA Experiment 20001248 PARAMETER Experiment Name: At_Far-red-induction_P Parameter: Timepoint (hr) Value: 4
  misc_feature: MA Experiment 20001248 PARAMETER Experiment Name: At_Far-red-induction_P Parameter: Tissue Value: Whole Plant
aaagaagagagaactttagaggttagagagatgaagacgcaacatcaatggtgggaagttcttgatccattcttgacacaacacgaagctcttattgcattcttgacttttgcagcggttgtaattgtgatttacttgtaccgaccctcctggtccgtatgcaatgttcccggtccaaccgctatgcctctagttggtcacttgcccttgatggctaagtatggtcctgatgtcttctccgttcttgctaagcaatatggccctattttcagtttggtatatatggccatctcttatggttgttatgactgagtgatgaacacaacaagtgtctaaaaaacaaaatgaagacaagtgatcatgtccatttaaattaacaacaaacagatttcagatggggaggcaaccactgataataatagcagaagcagagctttgcagagaagttgggataaagaagttcaaagatcttccaaacagaagcattccttccccaatctcagcttctcctcttcacaagaaaggcctcttcttcaccagggacaagagatggtctaaaatgagaaacaccatcctatctctctatcagccttcacatttaacaagtcttatccctacaatgcatagtttcatcacttctgctactcataatcttgattctaaaccgcgagatatcgttttctccaacctcttcctcaaacttaccactgatatcatcggacaagcggcttttggagtcgacttcggtctttccgggaagaaaccaatcaaagatgtggaggtgactgatttcataaaccagcatgtctactctacaacacaactcaagatggatttatcaggatcactctctatcatcttaggcttactgattccgattcttcaagagccgtttaggcaggtgttgaagaggataccgggaacaatggactggagagtcgagaagactaatgcaagactgagtggacaacttaatgagattgtgtcaaagcgagccaaggaggctgagactgactcaaaagacttcttgtcattgattttgaaagctcgagagtccgatcctttcgccaaaaacatcttcacatcggattatattagtgctgtgacttatgagcatcttcttgctggctctgcaaccactgctttcacactatcctctgttctttacttagtctctggtcatcttgatgttgagaaacgtctgcttcaagaaattgacgggtttgggaaccgtgatctgatcccgactgctcatgacttacaacacaagtttccatacctcgatcaggtcattaaagaggctatgagattctacatggtttctcctttggttgcaagggaaactgctaaagaagtggagataggaggttatttactcccaaaggggacatgggtttggttagcactaggagttctagcaaaggaccctaaaaactttccagaaccggagaagttcaagccggaaagatttgatccgaacggagaagaggagaaacatagacatccatacgctttcatcccattcggtatcggtccacgagcctgtgttggacagagatttgccctgcaagagatcaaactcacattactgcatctctaccgtaattacattttcagacattccctagaaatggagataccactgcagcttgattatggtataattctcagcttcaagaacggggttaagctcagaaccatcaaaagattctgattcttgaaacaagtgaaataaaagcaagactgaaatttatatttaaattcaaaactccaatgtagttc

SEQ ID NO: 77561 - protein, 439 aa, Arabidopsis thaliana
  peptide (1)..(439): Ceres Seq. ID no. 12576844
  misc_feature (1)..(439): Homolog of NCBI NO: 30683024 NR Description: thromboxane-A synthase, putative / cytochrome family [Arabidopsis thaliana] >gi|7484899|pir||T02607 probable
  misc_feature (1)..(439): Homolog of NCBI NO: 30683028 NR Description: thromboxane-A synthase, putative / cytochrome
  misc_feature (56)..(439): Homolog of NCBI NO: 15810030 NR Description: At2g26170/T19L18.2 [Arabidopsis thaliana]
  misc_feature (131)..(438): Homolog of NCBI NO: 34911504 NR Description: cytochrome P450-like protein [Oryza sativa
  misc_feature (1)..(207): Homolog of NCBI NO: 34911498 NR Description: cytochrome P450-like protein [Oryza sativa
  misc_feature (298)..(438): Homolog of NCBI NO: 34911498 NR Description: cytochrome P450-like protein [Oryza sativa
  misc_feature (131)..(309): Homolog of NCBI NO: 34911498 NR Description: cytochrome P450-like protein [Oryza sativa
  misc_feature (131)..(418): Homolog of NCBI NO: 34911506 NR Description: cytochrome P450-like protein [Oryza sativa
  misc_feature (1)..(207): Homolog of NCBI NO: 34911506 NR Description: cytochrome P450-like protein [Oryza sativa
  misc_feature (1)..(207): Homolog of NCBI NO: 34911504 NR Description: cytochrome P450-like protein [Oryza sativa
MGRQPLIIIAEAELCREVGIKKFKDLPNRSIPSPISASPLHKKGLFFTRDKRWSKMRNTILSLYQPSHLTSLIPTMHSFITSATHNLDSKPRDIVFSNLFLKLTTDIIGQAAFGVDFGLSGKKPIKDVEVTDFINQHVYSTTQLKMDLSGSLSIILGLLIPILQEPFRQVLKRIPGTMDWRVEKTNARLSGQLNEIVSKRAKEAETDSKDFLSLILKARESDPFAKNIFTSDYISAVTYEHLLAGSATTAFTLSSVLYLVSGHLDVEKRLLQEIDGFGNRDLIPTAHDLQHKFPYLDQVIKEAMRFYMVSPLVARETAKEVEIGGYLLPKGTWVWLALGVLAKDPKNFPEPEKFKPERFDPNGEEEKHRHPYAFIPFGIGPRACVGQRFALQEIKLTLLHLYRNYIFRHSLEMEIPLQLDYGIILSFKNGVKLRTIKRF

SEQ ID NO: 77562 - protein, 384 aa, Arabidopsis thaliana
  peptide (1)..(384): Ceres Seq. ID no. 12576845
  misc_feature (1)..(384): Homolog of NCBI NO: 30683024 NR Description: thromboxane-A synthase, putative / cytochrome family [Arabidopsis thaliana] >gi|7484899|pir||T02607 probable
  misc_feature (1)..(384): Homolog of NCBI NO: 30683028 NR Description: thromboxane-A synthase, putative / cytochrome
  misc_feature (1)..(384): Homolog of NCBI NO: 15810030 NR Description: At2g26170/T19L18.2 [Arabidopsis thaliana]
  misc_feature (76)..(383): Homolog of NCBI NO: 34911504 NR Description: cytochrome P450-like protein [Oryza sativa
  misc_feature (1)..(152): Homolog of NCBI NO: 34911498 NR Description: cytochrome P450-like protein [Oryza sativa
  misc_feature (243)..(383): Homolog of NCBI NO: 34911498 NR Description: cytochrome P450-like protein [Oryza sativa
  misc_feature (76)..(254): Homolog of NCBI NO: 34911498 NR Description: cytochrome P450-like protein [Oryza sativa
  misc_feature (76)..(363): Homolog of NCBI NO: 34911506 NR Description: cytochrome P450-like protein [Oryza sativa
  misc_feature (1)..(152): Homolog of NCBI NO: 34911506 NR Description: cytochrome P450-like protein [Oryza sativa
  misc_feature (1)..(152): Homolog of NCBI NO: 34911504 NR Description: cytochrome P450-like protein [Oryza sativa
MRNTILSLYQPSHLTSLIPTMHSFITSATHNLDSKPRDIVFSNLFLKLTTDIIGQAAFGVDFGLSGKKPIKDVEVTDFINQHVYSTTQLKMDLSGSLSIILGLLIPILQEPFRQVLKRIPGTMDWRVEKTNARLSGQLNEIVSKRAKEAETDSKDFLSLILKARESDPFAKNIFTSDYISAVTYEHLLAGSATTAFTLSSVLYLVSGHLDVEKRLLQEIDGFGNRDLIPTAHDLQHKFPYLDQVIKEAMRFYMVSPLVARETAKEVEIGGYLLPKGTWVWLALGVLAKDPKNFPEPEKFKPERFDPNGEEEKHRHPYAFIPFGIGPRACVGQRFALQEIKLTLLHLYRNYIFRHSLEMEIPLQLDYGIILSFKNGVKLRTIKRF

SEQ ID NO: 77563 - protein, 364 aa, Arabidopsis thaliana
  peptide (1)..(364): Ceres Seq. ID no. 12576846
  misc_feature (1)..(364): Homolog of NCBI NO: 30683024 NR Description: thromboxane-A synthase, putative / cytochrome family [Arabidopsis thaliana] >gi|7484899|pir||T02607 probable
  misc_feature (1)..(364): Homolog of NCBI NO: 30683028 NR Description: thromboxane-A synthase, putative / cytochrome
  misc_feature (1)..(364): Homolog of NCBI NO: 15810030 NR Description: At2g26170/T19L18.2 [Arabidopsis thaliana]
  misc_feature (56)..(363): Homolog of NCBI NO: 34911504 NR Description: cytochrome P450-like protein [Oryza sativa
  misc_feature (1)..(132): Homolog of NCBI NO: 34911498 NR Description: cytochrome P450-like protein [Oryza sativa
  misc_feature (223)..(363): Homolog of NCBI NO: 34911498 NR Description: cytochrome P450-like protein [Oryza sativa
  misc_feature (56)..(234): Homolog of NCBI NO: 34911498 NR Description: cytochrome P450-like protein [Oryza sativa
  misc_feature (56)..(343): Homolog of NCBI NO: 34911506 NR Description: cytochrome P450-like protein [Oryza sativa
  misc_feature (1)..(132): Homolog of NCBI NO: 34911506 NR Description: cytochrome P450-like protein [Oryza sativa
  misc_feature (1)..(132): Homolog of NCBI NO: 34911504 NR Description: cytochrome P450-like protein [Oryza sativa
MHSFITSATHNLDSKPRDIVFSNLFLKLTTDIIGQAAFGVDFGLSGKKPIKDVEVTDFINQHVYSTTQLKMDLSGSLSIILGLLIPILQEPFRQVLKRIPGTMDWRVEKTNARLSGQLNEIVSKRAKEAETDSKDFLSLILKARESDPFAKNIFTSDYISAVTYEHLLAGSATTAFTLSSVLYLVSGHLDVEKRLLQEIDGFGNRDLIPTAHDLQHKFPYLDQVIKEAMRFYMVSPLVARETAKEVEIGGYLLPKGTWVWLALGVLAKDPKNFPEPEKFKPERFDPNGEEEKHRHPYAFIPFGIGPRACVGQRFALQEIKLTLLHLYRNYIFRHSLEMEIPLQLDYGIILSFKNGVKLRTIKRF

SEQ ID NO: 77564 - DNA, 1785 bp, Arabidopsis thaliana
  misc_feature (1)..(1785): Ceres Seq. ID no. 12576847
  misc_feature: MA Experiment ID: 108434 Result: Down-regulated in Transcription
  misc_feature: MA Experiment 108434 PARAMETER Experiment Name: At_Root_Tips_cDNA_P Parameter: Tissue Value: Root Tips
  misc_feature: MA Experiment ID: 108572 Result: Up-regulated in Transcription
  misc_feature: MA Experiment 108572 PARAMETER Experiment Name: At_Drought_cDNA_P Parameter: Timepoint (hr) Value: 1
  misc_feature: MA Experiment 108572 PARAMETER Experiment Name: At_Drought_cDNA_P Parameter: Tissue Value: Aerial
  misc_feature: MA Experiment 108572 PARAMETER Experiment Name: At_Drought_cDNA_P Parameter: Treatment Value: Drought vs. No Drought
  misc_feature: MA Experiment ID: 108574 Result: Up-regulated in Transcription
  misc_feature: MA Experiment 108574 PARAMETER Experiment Name: At_Wounding__cDNA_P Parameter: Timepoint (hr) Value: 1
  misc_feature: MA Experiment 108574 PARAMETER Experiment Name: At_Wounding__cDNA_P Parameter: Tissue Value: Aerial
  misc_feature: MA Experiment 108574 PARAMETER Experiment Name: At_Wounding__cDNA_P Parameter: Treatment Value: Wounding vs. No Wounding
  misc_feature: MA Experiment ID: 108577 Result: Down-regulated in Transcription
  misc_feature: MA Experiment 108577 PARAMETER Experiment Name: At_42deg_Heat_cDNA_P Parameter: Temperature (deg C) Value: 42 vs. 22
  misc_feature: MA Experiment 108577 PARAMETER Experiment Name: At_42deg_Heat_cDNA_P Parameter: Timepoint (hr) Value: 6
  misc_feature: MA Experiment 108577 PARAMETER Experiment Name: At_42deg_Heat_cDNA_P Parameter: Tissue Value: Aerial
  misc_feature: MA Experiment ID: 108595 Result: Up-regulated in Transcription
  misc_feature: MA Experiment 108595 PARAMETER Experiment Name: At_Ler-pi_Ovule_cDNA_P Parameter: Plant Line Value: null
  misc_feature: MA Experiment ID: 108607 Result: Up-regulated in Transcription
  misc_feature: MA Experiment 108607 PARAMETER Experiment Name: At_100uM_ABA_cDNA_P Parameter: Timepoint (hr) Value: 4
  misc_feature: MA Experiment 108607 PARAMETER Experiment Name: At_100uM_ABA_cDNA_P Parameter: Tissue Value: Aerial
  misc_feature: MA Experiment 108607 PARAMETER Experiment Name: At_100uM_ABA_cDNA_P Parameter: Treatment Value: 100uM ABA vs. No Treatment
  misc_feature: MA Experiment ID: 20000068 Result: Up-regulated in Transcription
  misc_feature: MA Experiment ID: 20000069 Result: Up-regulated in Transcription
  misc_feature: MA Experiment 20000069 PARAMETER Experiment Name: At_100uM_ABA_Mutants_cDNA_P Parameter: Plant Line Value: CS23
  misc_feature: MA Experiment 20000069 PARAMETER Experiment Name: At_100uM_ABA_Mutants_cDNA_P Parameter: Timepoint (hr) Value: 6
  misc_feature: MA Experiment 20000069 PARAMETER Experiment Name: At_100uM_ABA_Mutants_cDNA_P Parameter: Tissue Value: Aerial
  misc_feature: MA Experiment 20000069 PARAMETER Experiment Name: At_100uM_ABA_Mutants_cDNA_P Parameter: Treatment Value: 100uM ABA vs. No Treatment
  misc_feature: MA Experiment ID: 20000070 Result: Up-regulated in Transcription
  misc_feature: MA Experiment 20000070 PARAMETER Experiment Name: At_100uM_ABA_Mutants_cDNA_P Parameter: Plant Line Value: CS24
  misc_feature: MA Experiment 20000070 PARAMETER Experiment Name: At_100uM_ABA_Mutants_cDNA_P Parameter: Timepoint (hr) Value: 6
  misc_feature: MA Experiment 20000070 PARAMETER Experiment Name: At_100uM_ABA_Mutants_cDNA_P Parameter: Tissue Value: Aerial
  misc_feature: MA Experiment 20000070 PARAMETER Experiment Name: At_100uM_ABA_Mutants_cDNA_P Parameter: Treatment Value: 100uM ABA vs. No Treatment
  misc_feature: MA Experiment ID: 20000071 Result: Up-regulated in Transcription
  misc_feature: MA Experiment 20000071 PARAMETER Experiment Name: At_100uM_ABA_Mutants_cDNA_P Parameter: Plant Line Value: CS8104
  misc_feature: MA Experiment 20000071 PARAMETER Experiment Name: At_100uM_ABA_Mutants_cDNA_P Parameter: Timepoint (hr) Value: 6
  misc_feature: MA Experiment 20000071 PARAMETER Experiment Name: At_100uM_ABA_Mutants_cDNA_P Parameter: Tissue Value: Aerial
  misc_feature: MA Experiment 20000071 PARAMETER Experiment Name: At_100uM_ABA_Mutants_cDNA_P Parameter: Treatment Value: 100uM ABA vs. No Treatment
  misc_feature: MA Experiment ID: 20000072 Result: Up-regulated in Transcription
  misc_feature: MA Experiment 20000072 PARAMETER Experiment Name: At_100uM_ABA_Mutants_cDNA_P Parameter: Plant Line Value: CS8105
  misc_feature: MA Experiment 20000072 PARAMETER Experiment Name: At_100uM_ABA_Mutants_cDNA_P Parameter: Timepoint (hr) Value: 6
  misc_feature: MA Experiment 20000072 PARAMETER Experiment Name: At_100uM_ABA_Mutants_cDNA_P Parameter: Tissue Value: Aerial
  misc_feature: MA Experiment 20000072 PARAMETER Experiment Name: At_100uM_ABA_Mutants_cDNA_P Parameter: Treatment Value: 100uM ABA vs. No Treatment
  misc_feature: MA Experiment ID: 20000087 Result: Up-regulated in Transcription
  misc_feature: MA Experiment 20000087 PARAMETER Experiment Name: At_100uM_ABA_Mutants_cDNA_P Parameter: Plant Line Value: WS
  misc_feature: MA Experiment 20000087 PARAMETER Experiment Name: At_100uM_ABA_Mutants_cDNA_P Parameter: Timepoint (hr) Value: 6
  misc_feature: MA Experiment 20000087 PARAMETER Experiment Name: At_100uM_ABA_Mutants_cDNA_P Parameter: Tissue Value: Aerial
  misc_feature: MA Experiment 20000087 PARAMETER Experiment Name: At_100uM_ABA_Mutants_cDNA_P Parameter: Treatment Value: 100uM ABA vs. No Treatment
  misc_feature: MA Experiment ID: 20000088 Result: Up-regulated in Transcription
  misc_feature: MA Experiment 20000088 PARAMETER Experiment Name: At_100uM_ABA_Mutants_cDNA_P Parameter: Plant Line Value: Landsberg
  misc_feature: MA Experiment 20000088 PARAMETER Experiment Name: At_100uM_ABA_Mutants_cDNA_P Parameter: Timepoint (hr) Value: 6
  misc_feature: MA Experiment 20000088 PARAMETER Experiment Name: At_100uM_ABA_Mutants_cDNA_P Parameter: Tissue Value: Aerial
  misc_feature: MA Experiment 20000088 PARAMETER Experiment Name: At_100uM_ABA_Mutants_cDNA_P Parameter: Treatment Value: 100uM ABA vs. No Treatment
  misc_feature: MA Experiment ID: 20000111 Result: Down-regulated in Transcription
  misc_feature: MA Experiment 20000111 PARAMETER Experiment Name: At_42deg_Heat_cDNA_P Parameter: Temperature (deg C) Value: 42 vs. 22
  misc_feature: MA Experiment 20000111 PARAMETER Experiment Name: At_42deg_Heat_cDNA_P Parameter: Timepoint (hr) Value: 6
  misc_feature: MA Experiment 20000111 PARAMETER Experiment Name: At_42deg_Heat_cDNA_P Parameter: Tissue Value: Aerial
  misc_feature: MA Experiment ID: 20000112 Result: Down-regulated in Transcription
  misc_feature: MA Experiment 20000112 PARAMETER Experiment Name: At_42deg_Heat_cDNA_P Parameter: Temperature (deg C) Value: 42 vs. 22
  misc_feature: MA Experiment 20000112 PARAMETER Experiment Name: At_42deg_Heat_cDNA_P Parameter: Timepoint (hr) Value: 2
  misc_feature: MA Experiment 20000112 PARAMETER Experiment Name: At_42deg_Heat_cDNA_P Parameter: Tissue Value: Aerial
  misc_feature: MA Experiment ID: 20000113 Result: Down-regulated in Transcription
  misc_feature: MA Experiment 20000113 PARAMETER Experiment Name: At_42deg_Heat_cDNA_P Parameter: Temperature (deg C) Value: 42 vs. 22
  misc_feature: MA Experiment 20000113 PARAMETER Experiment Name: At_42deg_Heat_cDNA_P Parameter: Timepoint (hr) Value: 8
  misc_feature: MA Experiment 20000113 PARAMETER Experiment Name: At_42deg_Heat_cDNA_P Parameter: Tissue Value: Aerial
  misc_feature: MA Experiment ID: 20000117 Result: Up-regulated in Transcription
  misc_feature: MA Experiment 20000117 PARAMETER Experiment Name: At_100uM_ABA_Mutants_cDNA_P Parameter: Plant Line Value: Columbia
  misc_feature: MA Experiment 20000117 PARAMETER Experiment Name: At_100uM_ABA_Mutants_cDNA_P Parameter: Timepoint (hr) Value: 6
  misc_feature: MA Experiment 20000117 PARAMETER Experiment Name: At_100uM_ABA_Mutants_cDNA_P Parameter: Tissue Value: Aerial
  misc_feature: MA Experiment 20000117 PARAMETER Experiment Name: At_100uM_ABA_Mutants_cDNA_P Parameter: Treatment Value: 100uM ABA vs. No Treatment
  misc_feature: MA Experiment ID: 20000144 Result: Down-regulated in Transcription
  misc_feature: MA Experiment 20000144 PARAMETER Experiment Name: At_42deg_Heat_cDNA_P Parameter: Temperature (deg C) Value: 42 vs. 22
  misc_feature: MA Experiment 20000144 PARAMETER Experiment Name: At_42deg_Heat_cDNA_P Parameter: Timepoint (hr) Value: 1
  misc_feature: MA Experiment 20000144 PARAMETER Experiment Name: At_42deg_Heat_cDNA_P Parameter: Tissue Value: Aerial
  misc_feature: MA Experiment ID: 20000180 Result: Up-regulated in Transcription
  misc_feature: MA Experiment 20000180 PARAMETER Experiment Name: At_Germinating_Seeds_P Parameter: Age (hr) Value: 24 vs. 0
  misc_feature: MA Experiment 20000180 PARAMETER Experiment Name: At_Germinating_Seeds_P Parameter: Tissue Value: Germinating Seeds
  misc_feature: MA Experiment ID: 20000211 Result: Up-regulated in Transcription
  misc_feature: MA Experiment 20000211 PARAMETER Experiment Name: At_0.001percent_MeJA__P Parameter: Age (day) Value: 14
  misc_feature: MA Experiment 20000211 PARAMETER Experiment Name: At_0.001percent_MeJA__P Parameter: Organism Value: A. thaliana
  misc_feature: MA Experiment 20000211 PARAMETER Experiment Name: At_0.001percent_MeJA__P Parameter: Plant Line Value: WS
  misc_feature: MA Experiment 20000211 PARAMETER Experiment Name: At_0.001percent_MeJA__P Parameter: Timepoint (hr) Value: 1
  misc_feature: MA Experiment 20000211 PARAMETER Experiment Name: At_0.001percent_MeJA__P Parameter: Tissue Value: Aerial
  misc_feature: MA Experiment 20000211 PARAMETER Experiment Name: At_0.001percent_MeJA__P Parameter: Treatment Value: 0.001percent MeJA vs. No Treatment
  misc_feature: MA Experiment ID: 20000234 Result: Up-regulated in Transcription
  misc_feature: MA Experiment 20000234 PARAMETER Experiment Name: At_Siliques_P Parameter: Age (day) Value: 21
  misc_feature: MA Experiment 20000234 PARAMETER Experiment Name: At_Siliques_P Parameter: Organism Value: A. thaliana
  misc_feature: MA Experiment 20000234 PARAMETER Experiment Name: At_Siliques_P Parameter: Plant Line Value: WS
  misc_feature: MA Experiment 20000234 PARAMETER Experiment Name: At_Siliques_P Parameter: Tissue Value: Less Than 5mm Siliques vs. Whole Plant
  misc_feature: MA Experiment ID: 20000264 Result: Up-regulated in Transcription
  misc_feature: MA Experiment 20000264 PARAMETER Experiment Name: At_Open_Flower_P Parameter: Age (day) Value: 21
  misc_feature: MA Experiment 20000264 PARAMETER Experiment Name: At_Open_Flower_P Parameter: Plant Line Value: WS
  misc_feature: MA Experiment 20000264 PARAMETER Experiment Name: At_Open_Flower_P Parameter: Tissue Value: Open Flower vs. Whole Plant
  misc_feature: MA Experiment ID: 20000265 Result: Up-regulated in Transcription
  misc_feature: MA Experiment 20000265 PARAMETER Experiment Name: At_Open_Flower_P Parameter: Age (day) Value: 21
  misc_feature: MA Experiment 20000265 PARAMETER Experiment Name: At_Open_Flower_P Parameter: Plant Line Value: WS
  misc_feature: MA Experiment 20000265 PARAMETER Experiment Name: At_Open_Flower_P Parameter: Tissue Value: Closed Flower vs. Whole Plant
  misc_feature: MA Experiment ID: 20000286 Result: Up-regulated in Transcription
  misc_feature: MA Experiment 20000286 PARAMETER Experiment Name: At_Open_Flower_P Parameter: Age (day) Value: 21
  misc_feature: MA Experiment 20000286 PARAMETER Experiment Name: At_Open_Flower_P Parameter: Plant Line Value: WS
  misc_feature: MA Experiment 20000286 PARAMETER Experiment Name: At_Open_Flower_P Parameter: Tissue Value: Half Open vs. Whole Plant
  misc_feature: MA Experiment ID: 20000495 Result: Up-regulated in Transcription
  misc_feature: MA Experiment 20000495 PARAMETER Experiment Name: At_Guard_Cells_P Parameter: Harvest Date Value: 8/2/2002
  misc_feature: MA Experiment 20000495 PARAMETER Experiment Name: At_Guard_Cells_P Parameter: Organism Value: A. thaliana
  misc_feature: MA Experiment 20000495 PARAMETER Experiment Name: At_Guard_Cells_P Parameter: Tissue Value: Guard Cells vs. Leaves
  misc_feature: MA Experiment ID: 20000496 Result: Up-regulated in Transcription
  misc_feature: MA Experiment 20000496 PARAMETER Experiment Name: At_Guard_Cells_P Parameter: Harvest Date Value: 7/19/2002
  misc_feature: MA Experiment 20000496 PARAMETER Experiment Name: At_Guard_Cells_P Parameter: Organism Value: Canola
  misc_feature: MA Experiment 20000496 PARAMETER Experiment Name: At_Guard_Cells_P Parameter: Tissue Value: Guard Cells vs. Leaves
  misc_feature: MA Experiment ID: 20001248 Result: Down-regulated in Transcription
  misc_feature: MA Experiment 20001248 PARAMETER Experiment Name: At_Far-red-induction_P Parameter: Age (day) Value: 7
  misc_feature: MA Experiment 20001248 PARAMETER Experiment Name: At_Far-red-induction_P Parameter: Light Value: Far-red vs. White
  misc_feature: MA Experiment 20001248 PARAMETER Experiment Name: At_Far-red-induction_P Parameter: Organism Value: A. thaliana
  misc_feature: MA Experiment 20001248 PARAMETER Experiment Name: At_Far-red-induction_P Parameter: Plant Line Value: Columbia
  misc_feature: MA Experiment 20001248 PARAMETER Experiment Name: At_Far-red-induction_P Parameter: Timepoint (hr) Value: 4
  misc_feature: MA Experiment 20001248 PARAMETER Experiment Name: At_Far-red-induction_P Parameter: Tissue Value: Whole Plant
  misc_feature: MA Experiment ID: 20001450 Result: Down-regulated in Transcription
  misc_feature: MA Experiment 20001450 PARAMETER Experiment Name: At_Far-red-induction_P Parameter: Age (day) Value: 7
  misc_feature: MA Experiment 20001450 PARAMETER Experiment Name: At_Far-red-induction_P Parameter: Light Value: Far-red vs. White
  misc_feature: MA Experiment 20001450 PARAMETER Experiment Name: At_Far-red-induction_P Parameter: Organism Value: A. thaliana
  misc_feature: MA Experiment 20001450 PARAMETER Experiment Name: At_Far-red-induction_P Parameter: Plant Line Value: Columbia
  misc_feature: MA Experiment 20001450 PARAMETER Experiment Name: At_Far-red-induction_P Parameter: Timepoint (hr) Value: 8
  misc_feature: MA Experiment 20001450 PARAMETER Experiment Name: At_Far-red-induction_P Parameter: Tissue Value: Whole Plant
  misc_feature: MA Experiment ID: 20001555 Result: Up-regulated in Transcription
  misc_feature: MA Experiment 20001555 PARAMETER Experiment Name: At_Drought_Soil_Dry_P Parameter: Age (day) Value: 24
  misc_feature: MA Experiment 20001555 PARAMETER Experiment Name: At_Drought_Soil_Dry_P Parameter: Organism Value: A. thaliana
  misc_feature: MA Experiment 20001555 PARAMETER Experiment Name: At_Drought_Soil_Dry_P Parameter: Plant Line Value: WS
  misc_feature: MA Experiment 20001555 PARAMETER Experiment Name: At_Drought_Soil_Dry_P Parameter: Post Timepoint (hr) Value: None
  misc_feature: MA Experiment 20001555 PARAMETER Experiment Name: At_Drought_Soil_Dry_P Parameter: Post-Treatment Value: None
  misc_feature: MA Experiment 20001555 PARAMETER Experiment Name: At_Drought_Soil_Dry_P Parameter: Timepoint (day) Value: 10
  misc_feature: MA Experiment 20001555 PARAMETER Experiment Name: At_Drought_Soil_Dry_P Parameter: Treatment Value: Drought vs. No Drought
  misc_feature: MA Experiment ID: 20001556 Result: Up-regulated in Transcription
  misc_feature: MA Experiment 20001556 PARAMETER Experiment Name: At_Drought_Soil_Dry_P Parameter: Age (day) Value: 26
  misc_feature: MA Experiment 20001556 PARAMETER Experiment Name: At_Drought_Soil_Dry_P Parameter: Organism Value: A. thaliana
  misc_feature: MA Experiment 20001556 PARAMETER Experiment Name: At_Drought_Soil_Dry_P Parameter: Plant Line Value: WS
  misc_feature: MA Experiment 20001556 PARAMETER Experiment Name: At_Drought_Soil_Dry_P Parameter: Post Timepoint (hr) Value: None
  misc_feature: MA Experiment 20001556 PARAMETER Experiment Name: At_Drought_Soil_Dry_P Parameter: Post-Treatment Value: None
  misc_feature: MA Experiment 20001556 PARAMETER Experiment Name: At_Drought_Soil_Dry_P Parameter: Timepoint (day) Value: 12
  misc_feature: MA Experiment 20001556 PARAMETER Experiment Name: At_Drought_Soil_Dry_P Parameter: Treatment Value: Drought vs. No Drought
  misc_feature: MA Experiment ID: 20001559 Result: Up-regulated in Transcription
  misc_feature: MA Experiment 20001559 PARAMETER Experiment Name: At_Drought_Soil_Dry_P Parameter: Age (day) Value: 28
  misc_feature: MA Experiment 20001559 PARAMETER Experiment Name: At_Drought_Soil_Dry_P Parameter: Organism Value: A. thaliana
  misc_feature: MA Experiment 20001559 PARAMETER Experiment Name: At_Drought_Soil_Dry_P Parameter: Plant Line Value: WS
  misc_feature: MA Experiment 20001559 PARAMETER Experiment Name: At_Drought_Soil_Dry_P Parameter: Post Timepoint (hr) Value: 29
  misc_feature: MA Experiment 20001559 PARAMETER Experiment Name: At_Drought_Soil_Dry_P Parameter: Post-Treatment Value: Re-Water vs. No Drought
  misc_feature: MA Experiment 20001559 PARAMETER Experiment Name: At_Drought_Soil_Dry_P Parameter: Timepoint (day) Value: 14
  misc_feature: MA Experiment 20001559 PARAMETER Experiment Name: At_Drought_Soil_Dry_P Parameter: Treatment Value: Drought vs. No Drought
gcaaaactttaaccttaaaaaccaaaccaaaaaaaacaaactaaattaaacttatggatgtgtcaaatgagacagtggaaagaaccgatctccggacacctttagtagatccggcagacacggaggtgaaacctctaccagaggtcgggctcgagagcgtattaacggagagtagcttgtcataccggaggcgtgtgtacttaggagcctgtatagagttgaaagtacttttccggttggcactaccggcgatacttatctatttagtcaactccggaatgggtatatccgctcgtgtcttcgccggtcatgttggtagtcaagaacttgcggccgcgtccatcggaaatagctgcttcaatctcgtctatggacttatgttaggtatgggcagtgcagtcgaaacactatgtggacaagcctatggagcccatcgttacgagatgcttgggatctatctccaaagagcaacaatagtcctcgctctagttggcttgcccatgacattactatacaccttctcgtaccctattctaatcctactaggggaacccaaaacggtgtcgtacatgggatccaaatacatcgccgggctcatccctcaaatcttcgcttacgccgtcaacttcacggcccaaaagttcctccaggcccaaagcgtggttgccccgagcgccttcatctcagccgccgccctcatcctccagatattgttgacgtggatcaccgtttatgtaatggacatgggctttatgggcatagcttatgttcttacaatttcttggtgggtcattgttggatcccagtgtttttacattgcggttagtcccaagtttagacacacgtggactggtcttagctggagatcgctccaaggtctttggagcttctttaaactctctgctggctcagctgttatgatttgtctggaaatgtggtattcgcagattcttgttcttcttgctggtttgctcgaaaatcctgctcgctctctagattctctttccatctgtatgtcaatttcagcattatcattcatggtctctgtcggctttaatgctgctgtaagtgtacggacaagtaatgagcttggagcaggaaatccgaaatcagcatggttctctacatggacggcgacttttgtatccttcgtgatctccgtgacggaagccctcgccgtgatttggtttcgtgattacgttagctacattttcacggaggatgctgacgtggctaaagccgtctctgacctctgtccttttcttgccatcaccatcattctcaacggaattcaacctgtcttgtccggagtggcagtgggatgtggatggcaaacatacgtggcatatgtgaatgttggttgttactacgttgttggtattccggttgggtgtattctcggcttcactttcgattttcaagccaagggaatatggaccgggatgattggaggtaccctcatgcaaacactcattttactttacgtcacgtaccgaacagattgggataaagaggtggaaaaagcgaggaaacgtttggatctgtgggacgacaagaaggagcctctccaaaactagtaatggattttacagaataaaagtatatttttaaaaataattaacattaaactttacaatctgatatttaatattcaggttataacaagtttggtggagtgatagacaataaagaaaaggaaataagtgtcgtgtgtgcaggtgatttcaatgtacgtagcttttcatggttattatgcttgttctatggaaatagaacaattaaaat

SEQ ID NO: 77565 - protein, 507 aa, Arabidopsis thaliana
  peptide (1)..(507): Ceres Seq. ID no. 12576848
  misc_feature (285)..(448): Pfam Name: MatE Pfam Description: MatE
  misc_feature (1)..(507): Homolog of NCBI NO: 18415793 NR Description: putative protein; protein id: At4g21910.1 thaliana] >gi|15809935|gb|AAL06895.1| AT4g21910/T8O5_120 thaliana] >gi|22137012|gb|AAM91351.1| At4g21910/T8O5_120
  misc_feature (1)..(507): Homolog of NCBI NO: 21553843 NR Description: unknown [Arabidopsis thaliana]
  misc_feature (1)..(467): Homolog of NCBI NO: 7487826 NR Description: hypothetical protein T8O5.120 - Arabidopsis >gi|2894569|emb|CAA17158.1| putative protein [Arabidopsis >gi|7269036|emb|CAB79146.1| putative protein [Arabidopsis
  misc_feature (76)..(496): Homolog of NCBI NO: 15234633 NR Description: putative protein; protein id: At4g21900.1
  misc_feature (3)..(505): Homolog of NCBI NO: 18407368 NR Description: expressed protein; protein id: At1g61890.1, by cDNA: gi_13272458, supported by cDNA: gi_15028186, supported cDNA: gi_15081772, supported by cDNA: gi_16209723 [Arabidopsis
  misc_feature (3)..(505): Homolog of NCBI NO: 15081773 NR Description: At1g61890/F8K4_9 [Arabidopsis thaliana]
  misc_feature (4)..(505): Homolog of NCBI NO: 15221073 NR Description: unknown protein; protein id: At1g11670.1
  misc_feature (4)..(505): Homolog of NCBI NO: 22655139 NR Description: unknown protein [Arabidopsis thaliana]
  misc_feature (16)..(503): Homolog of NCBI NO: 15233127 NR Description: integral membrane protein, putative; protein id: supported by cDNA: gi_20466555 [Arabidopsis thaliana] gb|AAC28507.1~gene_id:MIL23.25~strong similarity to unknown
  misc_feature (16)..(503): Homolog of NCBI NO: 20466556 NR Description: integral membrane protein, putative [Arabidopsis
MDVSNETVERTDLRTPLVDPADTEVKPLPEVGLESVLTESSLSYRRRVYLGACIELKVLFRLALPAILIYLVNSGMGISARVFAGHVGSQELAAASIGNSCFNLVYGLMLGMGSAVETLCGQAYGAHRYEMLGIYLQRATIVLALVGLPMTLLYTFSYPILILLGEPKTVSYMGSKYIAGLIPQIFAYAVNFTAQKFLQAQSVVAPSAFISAAALILQILLTWITVYVMDMGFMGIAYVLTISWWVIVGSQCFYIAVSPKFRHTWTGLSWRSLQGLWSFFKLSAGSAVMICLEMWYSQILVLLAGLLENPARSLDSLSICMSISALSFMVSVGFNAAVSVRTSNELGAGNPKSAWFSTWTATFVSFVISVTEALAVIWFRDYVSYIFTEDADVAKAVSDLCPFLAITIILNGIQPVLSGVAVGCGWQTYVAYVNVGCYYVVGIPVGCILGFTFDFQAKGIWTGMIGGTLMQTLILLYVTYRTDWDKEVEKARKRLDLWDDKKEPLQN

SEQ ID NO: 77566 - protein, 432 aa, Arabidopsis thaliana; identical to SEQ ID NO: 30285
  peptide (1)..(432): Ceres Seq. ID no. 12576849
  misc_feature (210)..(373): Pfam Name: MatE Pfam Description: MatE
  misc_feature (1)..(432): Homolog of NCBI NO: 18415793 NR Description: putative protein; protein id: At4g21910.1 thaliana] >gi|15809935|gb|AAL06895.1| AT4g21910/T8O5_120 thaliana] >gi|22137012|gb|AAM91351.1| At4g21910/T8O5_120
  misc_feature (1)..(432): Homolog of NCBI NO: 21553843 NR Description: unknown [Arabidopsis thaliana]
  misc_feature (1)..(392): Homolog of NCBI NO: 7487826 NR Description: hypothetical protein T8O5.120 - Arabidopsis >gi|2894569|emb|CAA17158.1| putative protein [Arabidopsis >gi|7269036|emb|CAB79146.1| putative protein [Arabidopsis
  misc_feature (1)..(421): Homolog of NCBI NO: 15234633 NR Description: putative protein; protein id: At4g21900.1
  misc_feature (1)..(430): Homolog of NCBI NO: 18407368 NR Description: expressed protein; protein id: At1g61890.1, by cDNA: gi_13272458, supported by cDNA: gi_15028186, supported cDNA: gi_15081772, supported by cDNA: gi_16209723 [Arabidopsis
  misc_feature (1)..(430): Homolog of NCBI NO: 15081773 NR Description: At1g61890/F8K4_9 [Arabidopsis thaliana]
  misc_feature (1)..(430): Homolog of NCBI NO: 15221073 NR Description: unknown protein; protein id: At1g11670.1
  misc_feature (1)..(430): Homolog of NCBI NO: 22655139 NR Description: unknown protein [Arabidopsis thaliana]
  misc_feature (1)..(428): Homolog of NCBI NO: 15233127 NR Description: integral membrane protein, putative; protein id: supported by cDNA: gi_20466555 [Arabidopsis thaliana] gb|AAC28507.1~gene_id:MIL23.25~strong similarity to unknown
  misc_feature (1)..(428): Homolog of NCBI NO: 20466556 NR Description: integral membrane protein, putative [Arabidopsis

SEQ ID NO: 77567 - protein, 399 aa, Arabidopsis thaliana; identical to SEQ ID NO: 30286
  peptide (1)..(399): Ceres Seq. ID no. 12576850
  misc_feature (177)..(340): Pfam Name: MatE Pfam Description: MatE
  misc_feature (1)..(399): Homolog of NCBI NO: 18415793 NR Description: putative protein; protein id: At4g21910.1 thaliana] >gi|15809935|gb|AAL06895.1| AT4g21910/T8O5_120 thaliana] >gi|22137012|gb|AAM91351.1| At4g21910/T8O5_120
  misc_feature (1)..(399): Homolog of NCBI NO: 21553843 NR Description: unknown [Arabidopsis thaliana]
  misc_feature (1)..(359): Homolog of NCBI NO: 7487826 NR Description: hypothetical protein T8O5.120 - Arabidopsis >gi|2894569|emb|CAA17158.1| putative protein [Arabidopsis >gi|7269036|emb|CAB79146.1| putative protein [Arabidopsis
  misc_feature (1)..(388): Homolog of NCBI NO: 15234633 NR Description: putative protein; protein id: At4g21900.1
  misc_feature (1)..(397): Homolog of NCBI NO: 18407368 NR Description: expressed protein; protein id: At1g61890.1, by cDNA: gi_13272458, supported by cDNA: gi_15028186, supported cDNA: gi_15081772, supported by cDNA: gi_16209723 [Arabidopsis
  misc_feature (1)..(397): Homolog of NCBI NO: 15081773 NR Description: At1g61890/F8K4_9 [Arabidopsis thaliana]
  misc_feature (1)..(397): Homolog of NCBI NO: 15221073 NR Description: unknown protein; protein id: At1g11670.1
  misc_feature (1)..(397): Homolog of NCBI NO: 22655139 NR Description: unknown protein [Arabidopsis thaliana]
  misc_feature (1)..(395): Homolog of NCBI NO: 15233127 NR Description: integral membrane protein, putative; protein id: supported by cDNA: gi_20466555 [Arabidopsis thaliana] gb|AAC28507.1~gene_id:MIL23.25~strong similarity to unknown
  misc_feature (1)..(395): Homolog of NCBI NO: 20466556 NR Description: integral membrane protein, putative [Arabidopsis

SEQ ID NO: 77568 - DNA, 1701 bp, Arabidopsis thaliana
  misc_feature (1)..(1701): Ceres Seq. ID no. 12576851
  misc_feature: MA Experiment ID: 20000173 Result: Down-regulated in Transcription
  misc_feature: MA Experiment 20000173 PARAMETER Experiment Name: At_42deg_Heat_P Parameter: Age (day) Value: 14
  misc_feature: MA Experiment 20000173 PARAMETER Experiment Name: At_42deg_Heat_P Parameter: Organism Value: A. thaliana
  misc_feature: MA Experiment 20000173 PARAMETER Experiment Name: At_42deg_Heat_P Parameter: Plant Line Value: WS
  misc_feature: MA Experiment 20000173 PARAMETER Experiment Name: At_42deg_Heat_P Parameter: Temperature (deg C) Value: 42 vs. 22
  misc_feature: MA Experiment 20000173 PARAMETER Experiment Name: At_42deg_Heat_P Parameter: Timepoint (hr) Value: 6
  misc_feature: MA Experiment 20000173 PARAMETER Experiment Name: At_42deg_Heat_P Parameter: Tissue Value: Aerial
  misc_feature: MA Experiment ID: 20000180 Result: Up-regulated in Transcription
  misc_feature: MA Experiment 20000180 PARAMETER Experiment Name: At_Germinating_Seeds_P Parameter: Age (hr) Value: 24 vs. 0
  misc_feature: MA Experiment 20000180 PARAMETER Experiment Name: At_Germinating_Seeds_P Parameter: Tissue Value: Germinating Seeds
  misc_feature: MA Experiment ID: 20000234 Result: Down-regulated in Transcription
  misc_feature: MA Experiment 20000234 PARAMETER Experiment Name: At_Siliques_P Parameter: Age (day) Value: 21
  misc_feature: MA Experiment 20000234 PARAMETER Experiment Name: At_Siliques_P Parameter: Organism Value: A. thaliana
  misc_feature: MA Experiment 20000234 PARAMETER Experiment Name: At_Siliques_P Parameter: Plant Line Value: WS
  misc_feature: MA Experiment 20000234 PARAMETER Experiment Name: At_Siliques_P Parameter: Tissue Value: Less Than 5mm Siliques vs. Whole Plant
  misc_feature: MA Experiment ID: 20000264 Result: Down-regulated in Transcription
  misc_feature: MA Experiment 20000264 PARAMETER Experiment Name: At_Open_Flower_P Parameter: Age (day) Value: 21
  misc_feature: MA Experiment 20000264 PARAMETER Experiment Name: At_Open_Flower_P Parameter: Plant Line Value: WS
  misc_feature: MA Experiment 20000264 PARAMETER Experiment Name: At_Open_Flower_P Parameter: Tissue Value: Open Flower vs. Whole Plant
  misc_feature: MA Experiment ID: 20000265 Result: Down-regulated in Transcription
  misc_feature: MA Experiment 20000265 PARAMETER Experiment Name: At_Open_Flower_P Parameter: Age (day) Value: 21
  misc_feature: MA Experiment 20000265 PARAMETER Experiment Name: At_Open_Flower_P Parameter: Plant Line Value: WS
  misc_feature: MA Experiment 20000265 PARAMETER Experiment Name: At_Open_Flower_P Parameter: Tissue Value: Closed Flower vs. Whole Plant
  misc_feature: MA Experiment ID: 20000268 Result: Down-regulated in Transcription
  misc_feature: MA Experiment 20000268 PARAMETER Experiment Name: At_100mM_NaCl__P Parameter: Age (day) Value: 14
  misc_feature: MA Experiment 20000268 PARAMETER Experiment Name: At_100mM_NaCl__P Parameter: Organism Value: A. thaliana
  misc_feature: MA Experiment 20000268 PARAMETER Experiment Name: At_100mM_NaCl__P Parameter: Plant Line Value: WS
  misc_feature: MA Experiment 20000268 PARAMETER Experiment Name: At_100mM_NaCl__P Parameter: Timepoint (hr) Value: 6
  misc_feature: MA Experiment 20000268 PARAMETER Experiment Name: At_100mM_NaCl__P Parameter: Tissue Value: Whole Plant
  misc_feature: MA Experiment 20000268 PARAMETER Experiment Name: At_100mM_NaCl__P Parameter: Treatment Value: 100mM NaCl vs. No Treatment
  misc_feature: MA Experiment ID: 20000286 Result: Down-regulated in Transcription
  misc_feature: MA Experiment 20000286 PARAMETER Experiment Name: At_Open_Flower_P Parameter: Age (day) Value: 21
  misc_feature: MA Experiment 20000286 PARAMETER Experiment Name: At_Open_Flower_P Parameter: Plant Line Value: WS
  misc_feature: MA Experiment 20000286 PARAMETER Experiment Name: At_Open_Flower_P Parameter: Tissue Value: Half Open vs. Whole Plant
  misc_feature: MA Experiment ID: 20000437 Result: Down-regulated in Transcription
  misc_feature: MA Experiment 20000437 PARAMETER Experiment Name: At_Drought_P Parameter: Age (day) Value: 8
  misc_feature: MA Experiment 20000437 PARAMETER Experiment Name: At_Drought_P Parameter: Organism Value: A. thaliana
  misc_feature: MA Experiment 20000437 PARAMETER Experiment Name: At_Drought_P Parameter: Plant Line Value: WS
  misc_feature: MA Experiment 20000437 PARAMETER Experiment Name: At_Drought_P Parameter: Timepoint (hr) Value: 24
  misc_feature: MA Experiment 20000437 PARAMETER Experiment Name: At_Drought_P Parameter: Tissue Value: Whole Plant
  misc_feature: MA Experiment 20000437 PARAMETER Experiment Name: At_Drought_P Parameter: Treatment Value: Drought vs. No Drought
  misc_feature: MA Experiment ID: 20000438 Result: Down-regulated in Transcription
  misc_feature: MA Experiment 20000438 PARAMETER Experiment Name: At_Shoots__P Parameter: Age (day) Value: 14
  misc_feature: MA Experiment 20000438 PARAMETER Experiment Name: At_Shoots__P Parameter: Tissue Value: Shoots vs. Whole Plant
  misc_feature: MA Experiment ID: 20000460 Result: Up-regulated in Transcription
  misc_feature: MA Experiment 20000460 PARAMETER Experiment Name: At_10percent_PEG_P Parameter: Age (day) Value: 12
  misc_feature: MA Experiment 20000460 PARAMETER Experiment Name: At_10percent_PEG_P Parameter: Organism Value: A. thaliana
  misc_feature: MA Experiment 20000460 PARAMETER Experiment Name: At_10percent_PEG_P Parameter: Plant Line Value: WS
  misc_feature: MA Experiment 20000460 PARAMETER Experiment Name: At_10percent_PEG_P Parameter: Timepoint (day) Value: 12
  misc_feature: MA Experiment 20000460 PARAMETER Experiment Name: At_10percent_PEG_P Parameter: Tissue Value: Whole Plant
  misc_feature: MA Experiment 20000460 PARAMETER Experiment Name: At_10percent_PEG_P Parameter: Treatment Value: 10percent PEG vs. No Treatment
  misc_feature: MA Experiment ID: 20000527 Result: Up-regulated in Transcription
  misc_feature: MA Experiment 20000527 PARAMETER Experiment Name: At_10percent_PEG_P Parameter: Age (day) Value: 20
  misc_feature: MA Experiment 20000527 PARAMETER Experiment Name: At_10percent_PEG_P Parameter: Organism Value: A. thaliana
  misc_feature: MA Experiment 20000527 PARAMETER Experiment Name: At_10percent_PEG_P Parameter: Plant Line Value: WS
  misc_feature: MA Experiment 20000527 PARAMETER Experiment Name: At_10percent_PEG_P Parameter: Timepoint (day) Value: 20
  misc_feature: MA Experiment 20000527 PARAMETER Experiment Name: At_10percent_PEG_P Parameter: Tissue Value: Whole Plant
  misc_feature: MA Experiment 20000527 PARAMETER Experiment Name: At_10percent_PEG_P Parameter: Treatment Value: 10percent PEG vs. No Treatment
  misc_feature: MA Experiment ID: 20000573 Result: Down-regulated in Transcription
  misc_feature: MA Experiment 20000573 PARAMETER Experiment Name: At_100uM_ABA_Mutants__P Parameter: Organism Value: A. thaliana
  misc_feature: MA Experiment 20000573 PARAMETER Experiment Name: At_100uM_ABA_Mutants__P Parameter: Plant Line Value: CS22 vs. Ler wt
  misc_feature: MA Experiment 20000573 PARAMETER Experiment Name: At_100uM_ABA_Mutants__P Parameter: Timepoint (hr) Value: N/A
  misc_feature: MA Experiment 20000573 PARAMETER Experiment Name: At_100uM_ABA_Mutants__P Parameter: Tissue Value: Whole Plant
  misc_feature: MA Experiment 20000573 PARAMETER Experiment Name: At_100uM_ABA_Mutants__P Parameter: Treatment Value: None
  misc_feature: MA Experiment ID: 20000574 Result: Down-regulated in Transcription
  misc_feature: MA Experiment 20000574 PARAMETER Experiment Name: At_100uM_ABA_Mutants__P Parameter: Organism Value: A. thaliana
  misc_feature: MA Experiment 20000574 PARAMETER Experiment Name: At_100uM_ABA_Mutants__P Parameter: Plant Line Value: CS23 vs. Ler wt
  misc_feature: MA Experiment 20000574 PARAMETER Experiment Name: At_100uM_ABA_Mutants__P Parameter: Timepoint (hr) Value: N/A
  misc_feature: MA Experiment 20000574 PARAMETER Experiment Name: At_100uM_ABA_Mutants__P Parameter: Tissue Value: Whole Plant
  misc_feature: MA Experiment 20000574 PARAMETER Experiment Name: At_100uM_ABA_Mutants__P Parameter: Treatment Value: None
  misc_feature: MA Experiment ID: 20000794 Result: Down-regulated in Transcription
  misc_feature: MA Experiment 20000794 PARAMETER Experiment Name: At_Petals_P Parameter: Age (day) Value: 23-25 days
  misc_feature: MA Experiment 20000794 PARAMETER Experiment Name: At_Petals_P Parameter: Plant Line Value: WS
  misc_feature: MA Experiment 20000794 PARAMETER Experiment Name: At_Petals_P Parameter: Tissue Value: Petals vs. Whole plant
  misc_feature: MA Experiment ID: 20001247 Result: Up-regulated in Transcription
  misc_feature: MA Experiment 20001247 PARAMETER Experiment Name: At_Far-red-induction_P Parameter: Age (day) Value: 7
  misc_feature: MA Experiment 20001247 PARAMETER Experiment Name: At_Far-red-induction_P Parameter: Light Value: Far-red vs. White
  misc_feature: MA Experiment 20001247 PARAMETER Experiment Name: At_Far-red-induction_P Parameter: Organism Value: A. thaliana
  misc_feature: MA Experiment 20001247 PARAMETER Experiment Name: At_Far-red-induction_P Parameter: Plant Line Value: Columbia
  misc_feature: MA Experiment 20001247 PARAMETER Experiment Name: At_Far-red-induction_P Parameter: Timepoint (hr) Value: 1
  misc_feature: MA Experiment 20001247 PARAMETER Experiment Name: At_Far-red-induction_P Parameter: Tissue Value: Whole Plant
  misc_feature: MA Experiment ID: 20001557 Result: Up-regulated in Transcription
  misc_feature: MA Experiment 20001557 PARAMETER Experiment Name: At_Drought_Soil_Dry_P Parameter: Age (day) Value: 27
  misc_feature: MA Experiment 20001557 PARAMETER Experiment Name: At_Drought_Soil_Dry_P Parameter: Organism Value: A. thaliana
  misc_feature: MA Experiment 20001557 PARAMETER Experiment Name: At_Drought_Soil_Dry_P Parameter: Plant Line Value: WS
  misc_feature: MA Experiment 20001557 PARAMETER Experiment Name: At_Drought_Soil_Dry_P Parameter: Post Timepoint (hr) Value: 3
  misc_feature: MA Experiment 20001557 PARAMETER Experiment Name: At_Drought_Soil_Dry_P Parameter: Post-Treatment Value: Re-Water vs. No Drought
  misc_feature: MA Experiment 20001557 PARAMETER Experiment Name: At_Drought_Soil_Dry_P Parameter: Timepoint (day) Value: 13
  misc_feature: MA Experiment 20001557 PARAMETER Experiment Name: At_Drought_Soil_Dry_P Parameter: Treatment Value: Drought vs. No Drought
  misc_feature: MA Experiment ID: 20001558 Result: Up-regulated in Transcription
  misc_feature: MA Experiment 20001558 PARAMETER Experiment Name: At_Drought_Soil_Dry_P Parameter: Age (day) Value: 27
  misc_feature: MA Experiment 20001558 PARAMETER Experiment Name: At_Drought_Soil_Dry_P Parameter: Organism Value: A. thaliana
  misc_feature: MA Experiment 20001558 PARAMETER Experiment Name: At_Drought_Soil_Dry_P Parameter: Plant Line Value: WS
  misc_feature: MA Experiment 20001558 PARAMETER Experiment Name: At_Drought_Soil_Dry_P Parameter: Post Timepoint (hr) Value: 6
  misc_feature: MA Experiment 20001558 PARAMETER Experiment Name: At_Drought_Soil_Dry_P Parameter: Post-Treatment Value: Re-Water vs. No Drought
  misc_feature: MA Experiment 20001558 PARAMETER Experiment Name: At_Drought_Soil_Dry_P Parameter: Timepoint (day) Value: 13
  misc_feature: MA Experiment 20001558 PARAMETER Experiment Name: At_Drought_Soil_Dry_P Parameter: Treatment Value: Drought vs. No Drought
  misc_feature: MA Experiment ID: 20001560 Result: Up-regulated in Transcription
  misc_feature: MA Experiment 20001560 PARAMETER Experiment Name: At_Drought_Soil_Dry_P Parameter: Age (day) Value: 28
  misc_feature: MA Experiment 20001560 PARAMETER Experiment Name: At_Drought_Soil_Dry_P Parameter: Organism Value: A. thaliana
  misc_feature: MA Experiment 20001560 PARAMETER Experiment Name: At_Drought_Soil_Dry_P Parameter: Plant Line Value: WS
  misc_feature: MA Experiment 20001560 PARAMETER Experiment Name: At_Drought_Soil_Dry_P Parameter: Post Timepoint (hr) Value: None
  misc_feature: MA Experiment 20001560 PARAMETER Experiment Name: At_Drought_Soil_Dry_P Parameter: Post-Treatment Value: None
  misc_feature: MA Experiment 20001560 PARAMETER Experiment Name: At_Drought_Soil_Dry_P Parameter: Timepoint (day) Value: 14
  misc_feature: MA Experiment 20001560 PARAMETER Experiment Name: At_Drought_Soil_Dry_P Parameter: Treatment Value: Drought vs. No Drought
  misc_feature: MA Experiment ID: 20001757 Result: Down-regulated in Transcription
  misc_feature: MA Experiment 20001757 PARAMETER Experiment Name: At_50mM_NH4NO3_L-to-H_P Parameter: Timepoint (hr) Value: 6
  misc_feature: MA Experiment 20001757 PARAMETER Experiment Name: At_50mM_NH4NO3_L-to-H_P Parameter: Tissue Value: Leaf
  misc_feature: MA Experiment 20001757 PARAMETER Experiment Name: At_50mM_NH4NO3_L-to-H_P Parameter: Treatment Value: 50mM NH4NO3 vs 100mM Mannitol
  misc_feature: MA Experiment ID: 20001911 Result: Down-regulated in Transcription
  misc_feature: MA Experiment 20001911 PARAMETER Experiment Name: At_Drought_Reproduction_P Parameter: Age (day) Value: 40
  misc_feature: MA Experiment 20001911 PARAMETER Experiment Name: At_Drought_Reproduction_P Parameter: Organism Value: A. thaliana
  misc_feature: MA Experiment 20001911 PARAMETER Experiment Name: At_Drought_Reproduction_P Parameter: Plant Line Value: WS
  misc_feature: MA Experiment 20001911 PARAMETER Experiment Name: At_Drought_Reproduction_P Parameter: Timepoint (day) Value: 10
  misc_feature: MA Experiment 20001911 PARAMETER Experiment Name: At_Drought_Reproduction_P Parameter: Tissue Value: Flowers
  misc_feature: MA Experiment 20001911 PARAMETER Experiment Name: At_Drought_Reproduction_P Parameter: Treatment Value: Drought vs. No Drought
ctccttcttcatttttggttttctttggaaattcttgaaattgtaatgtttttttttggaatcttgatgagtttttgcataaatcaagaagtgtcggtggaggcatttatttcacaccaattgttctgaattcagttttgttttaacactctttttttttttgtaactgaaaaatttgtgttttcttcttggttttcacacaagaattctagaagattgatagataaaatcaagaatgcttaattaacgctagagagacttgcaataattgtaaaacatgattggaacaagcttccccgaggatcttgattgtggcaacttctttgacaacatggatgatctcatggactttcccggtggagatatcgatgtcggtttcggcataggtgactccgactctttccctaccatctggaccactcatcacgacacgtggcctgccgcttctgatcctctcttctcttccaacaccaactctgattcatcacctgagctctatgttccgtttgaggacattgttaaggtggaaagacctccaagctttgtagaggaaacattggttgagaagaaggaagattcgttttcgacaaacactgattcatcatcttctcatagccaattcaggagctcaagtccagtgtcggttctcgagagcagctcctcctcgtctcaaaccaccaacacaacctcccttgttctccctggaaagcacggtcgtccacgcacaaaacgccctcgtccacctgtccaggataaagatagagtcaaagacaatgtgtgcggtggtgactcgcgcctcatcattagaataccgaaacagtttctctctgatcacaacaagatgatcaacaagaagaagaagaagaaggccaagattacttcttcctcttcttcgtccgggattgatcttgaagtcaatggaaacaacgtcgattcgtattcttcagagcaatatccgcttaggaaatgtatgcactgtgaggtcaccaagactccacagtggaggcttggtccaatgggtccaaagacactttgcaatgcgtgcggtgtacgttacaaatcagggaggcttttcccggagtaccgtccagctgctagtccaacatttactccagctcttcactcaaactcacacaagaaagtggctgaaatgagaaacaagagatgcagtgatggtagctacataaccgaagagaatgatctgcaagggctgattccgaacaatgcctacattggcgtagactaaaacatagagaagatgattcgatttccatgcgttgaagtgattagatatgccaggagtaggaaagagtcagtgagaagaaaagtttttagctttagaagagatgaaggaagagagcaatcaattggagggattaaaagttagatgagaattgattgtgtttgtattattttgtatttgtagtgtgaatgggcaaaaaactcttgaaacagaggaaaagtaagttgaggaagagcagaagattttgaagacattagagaatcattaggtgttgagtattacattaaatcttcctcttcttcttttgttctttcaattctttgtatttttattgtgaggattctctttttttttctttttttttttgtagttgatttgtttagctaaaggattctttttttttgtttttgttaaaatccaatgttataaattgttaattattaaatggttttcttacc

SEQ ID NO: 77569 - protein, 322 aa, Arabidopsis thaliana
  peptide (1)..(322): Ceres Seq. ID no. 12576852
  misc_feature (1)..(322): Homolog of NCBI NO: 15233101 NR Description: GATA zinc finger protein; protein id: supported by cDNA: gi_15724333, supported by cDNA: gi_18700239
  misc_feature (2)..(301): Homolog of NCBI NO: 37572443 NR Description: AG-motif binding protein-1 [Nicotiana tabacum]
  misc_feature (2)..(301): Homolog of NCBI NO: 37572451 NR Description: AG-motif binding protein-5 [Nicotiana tabacum]
  misc_feature (115)..(295): Homolog of NCBI NO: 12711287 NR Description: GATA-1 zinc finger protein [Nicotiana tabacum]
  misc_feature (93)..(301): Homolog of NCBI NO: 15451574 NR Description: Putative GATA-1 zinc finger protein [Oryza sativa]
  misc_feature (19)..(296): Homolog of NCBI NO: 15239503 NR Description: GATA zinc finger protein; protein id: At5g25830.1
  misc_feature (115)..(295): Homolog of NCBI NO: 15223085 NR Description: GATA zinc finger protein; protein id: supported by cDNA: gi_17380993, supported by cDNA: gi_20466044
  misc_feature (193)..(295): Homolog of NCBI NO: 15223086 NR Description: GATA zinc finger protein; protein id: At1g08010.1
  misc_feature (229)..(296): Homolog of NCBI NO: 37572449 NR Description: AG-motif binding protein-4 [Nicotiana tabacum]
  misc_feature (79)..(296): Homolog of NCBI NO: 37572447 NR Description: AG-motif binding protein-3 [Nicotiana tabacum]
MIGTSFPEDLDCGNFFDNMDDLMDFPGGDIDVGFGIGDSDSFPTIWTTHHDTWPAASDPLFSSNTNSDSSPELYVPFEDIVKVERPPSFVEETLVEKKEDSFSTNTDSSSSHSQFRSSSPVSVLESSSSSSQTTNTTSLVLPGKHGRPRTKRPRPPVQDKDRVKDNVCGGDSRLIIRIPKQFLSDHNKMINKKKKKKAKITSSSSSSGIDLEVNGNNVDSYSSEQYPLRKCMHCEVTKTPQWRLGPMGPKTLCNACGVRYKSGRLFPEYRPAASPTFTPALHSNSHKKVAEMRNKRCSDGSYITEENDLQGLIPNNAYIGVD

SEQ ID NO: 77570 - protein, 304 aa, Arabidopsis thaliana
  peptide (1)..(304): Ceres Seq. ID no. 12576853
  misc_feature (1)..(304): Homolog of NCBI NO: 15233101 NR Description: GATA zinc finger protein; protein id: supported by cDNA: gi_15724333, supported by cDNA: gi_18700239
  misc_feature (1)..(283): Homolog of NCBI NO: 37572443 NR Description: AG-motif binding protein-1 [Nicotiana tabacum]
  misc_feature (1)..(283): Homolog of NCBI NO: 37572451 NR Description: AG-motif binding protein-5 [Nicotiana tabacum]
  misc_feature (97)..(277): Homolog of NCBI NO: 12711287 NR Description: GATA-1 zinc finger protein [Nicotiana tabacum]
  misc_feature (75)..(283): Homolog of NCBI NO: 15451574 NR Description: Putative GATA-1 zinc finger protein [Oryza sativa]
  misc_feature (1)..(278): Homolog of NCBI NO: 15239503 NR Description: GATA zinc finger protein; protein id: At5g25830.1
  misc_feature (97)..(277): Homolog of NCBI NO: 15223085 NR Description: GATA zinc finger protein; protein id: supported by cDNA: gi_17380993, supported by cDNA: gi_20466044
  misc_feature (175)..(277): Homolog of NCBI NO: 15223086 NR Description: GATA zinc finger protein; protein id: At1g08010.1
  misc_feature (211)..(278): Homolog of NCBI NO: 37572449 NR Description: AG-motif binding protein-4 [Nicotiana tabacum]
  misc_feature (61)..(278): Homolog of NCBI NO: 37572447 NR Description: AG-motif binding protein-3 [Nicotiana tabacum]
MDDLMDFPGGDIDVGFGIGDSDSFPTIWTTHHDTWPAASDPLFSSNTNSDSSPELYVPFEDIVKVERPPSFVEETLVEKKEDSFSTNTDSSSSHSQFRSSSPVSVLESSSSSSQTTNTTSLVLPGKHGRPRTKRPRPPVQDKDRVKDNVCGGDSRLIIRIPKQFLSDHNKMINKKKKKKAKITSSSSSSGIDLEVNGNNVDSYSSEQYPLRKCMHCEVTKTPQWRLGPMGPKTLCNACGVRYKSGRLFPEYRPAASPTFTPALHSNSHKKVAEMRNKRCSDGSYITEENDLQGLIPNNAYIGVD

SEQ ID NO: 77571 - protein, 300 aa, Arabidopsis thaliana
  peptide (1)..(300): Ceres Seq. ID no. 12576854
  misc_feature (1)..(300): Homolog of NCBI NO: 15233101 NR Description: GATA zinc finger protein; protein id: supported by cDNA: gi_15724333, supported by cDNA: gi_18700239
  misc_feature (1)..(279): Homolog of NCBI NO: 37572443 NR Description: AG-motif binding protein-1 [Nicotiana tabacum]
  misc_feature (1)..(279): Homolog of NCBI NO: 37572451 NR Description: AG-motif binding protein-5 [Nicotiana tabacum]
  misc_feature (93)..(273): Homolog of NCBI NO: 12711287 NR Description: GATA-1 zinc finger protein [Nicotiana tabacum]
  misc_feature (71)..(279): Homolog of NCBI NO: 15451574 NR Description: Putative GATA-1 zinc finger protein [Oryza sativa]
  misc_feature (1)..(274): Homolog of NCBI NO: 15239503 NR Description: GATA zinc finger protein; protein id: At5g25830.1
  misc_feature (93)..(273): Homolog of NCBI NO: 15223085 NR Description: GATA zinc finger protein; protein id: supported by cDNA: gi_17380993, supported by cDNA: gi_20466044
  misc_feature (171)..(273): Homolog of NCBI NO: 15223086 NR Description: GATA zinc finger protein; protein id: At1g08010.1
  misc_feature (207)..(274): Homolog of NCBI NO: 37572449 NR Description: AG-motif binding protein-4 [Nicotiana tabacum]
  misc_feature (57)..(274): Homolog of NCBI NO: 37572447 NR Description: AG-motif binding protein-3 [Nicotiana tabacum]
MDFPGGDIDVGFGIGDSDSFPTIWTTHHDTWPAASDPLFSSNTNSDSSPELYVPFEDIVKVERPPSFVEETLVEKKEDSFSTNTDSSSSHSQFRSSSPVSVLESSSSSSQTTNTTSLVLPGKHGRPRTKRPRPPVQDKDRVKDNVCGGDSRLIIRIPKQFLSDHNKMINKKKKKKAKITSSSSSSGIDLEVNGNNVDSYSSEQYPLRKCMHCEVTKTPQWRLGPMGPKTLCNACGVRYKSGRLFPEYRPAASPTFTPALHSNSHKKVAEMRNKRCSDGSYITEENDLQGLIPNNAYIGVD

SEQ ID NO: 77572 - DNA, 2133 bp, Arabidopsis thaliana
  misc_feature (1)..(2133): Ceres Seq. ID no. 12576859
  misc_feature: MA Experiment ID: 108462 Result: Down-regulated in Transcription
  misc_feature: MA Experiment 108462 PARAMETER Experiment Name: At_Germinating_Seeds_cDNA_P Parameter: Age (day) Value: 2 vs. 0
  misc_feature: MA Experiment 108462 PARAMETER Experiment Name: At_Germinating_Seeds_cDNA_P Parameter: Tissue Value: Germinating Seeds
  misc_feature: MA Experiment ID: 108463 Result: Down-regulated in Transcription
  misc_feature: MA Experiment 108463 PARAMETER Experiment Name: At_Germinating_Seeds_cDNA_P Parameter: Age (day) Value: 3 vs. 0
  misc_feature: MA Experiment 108463 PARAMETER Experiment Name: At_Germinating_Seeds_cDNA_P Parameter: Tissue Value: Germinating Seeds
  misc_feature: MA Experiment ID: 108464 Result: Down-regulated in Transcription
  misc_feature: MA Experiment 108464 PARAMETER Experiment Name: At_Germinating_Seeds_cDNA_P Parameter: Age (day) Value: 4 vs. 0
  misc_feature: MA Experiment 108464 PARAMETER Experiment Name: At_Germinating_Seeds_cDNA_P Parameter: Tissue Value: Germinating Seeds
  misc_feature: MA Experiment ID: 20001557 Result: Up-regulated in Transcription
  misc_feature: MA Experiment 20001557 PARAMETER Experiment Name: At_Drought_Soil_Dry_P Parameter: Age (day) Value: 27
  misc_feature: MA Experiment 20001557 PARAMETER Experiment Name: At_Drought_Soil_Dry_P Parameter: Organism Value: A. thaliana
  misc_feature: MA Experiment 20001557 PARAMETER Experiment Name: At_Drought_Soil_Dry_P Parameter: Plant Line Value: WS
  misc_feature: MA Experiment 20001557 PARAMETER Experiment Name: At_Drought_Soil_Dry_P Parameter: Post Timepoint (hr) Value: 3
  misc_feature: MA Experiment 20001557 PARAMETER Experiment Name: At_Drought_Soil_Dry_P Parameter: Post-Treatment Value: Re-Water vs. No Drought
  misc_feature: MA Experiment 20001557 PARAMETER Experiment Name: At_Drought_Soil_Dry_P Parameter: Timepoint (day) Value: 13
  misc_feature: MA Experiment 20001557 PARAMETER Experiment Name: At_Drought_Soil_Dry_P Parameter: Treatment Value: Drought vs. No Drought
ctttatcacttttccactcccaaatcaatttttaggttttttttataattataatttatttgctctcggcaggatctatataatacacagaccagtctttgcgtgtgcttgtgtgcattcattgatcgggtttatatcttttcatcggattttctttgtcgagcaagagccatgtcactgagacccaacgctaagacggaggttcgccggaaccgatacaaagttgcagtggatgcggaggaaggacgacggaggagagaagacaacatggttgagatccgtaaaagcaagcgtgaggagagtttgatgaagaagagacgtgaaggtatgcaagctcttcagggtttcccttcagcttccgccgcctccgtcgataagaagttggatagtctgaaggatatggtcgctggggtttggtccgatgaccctgccttgcagcttgagtccactactcagttcaggaagcttctctctattgagagaagtcctccaatcgaggaagtgataagtgctggtgttgttcctaggtttgttgagtttcttaagaaagaagattaccccgccattcagtttgaggcagcttgggctctaacaaacattgcatctggaacatcggatcacactaaggttgtaatcgatcacaatgctgttccaatctttgttcagcttcttgcttcccctagcgatgatgttcgtgaacaggctgtatgggctttgggtaacgttgctggtgattcaccacggtgccgtgatcttgttcttggatgtggggcactgcttccgctgctcaatcagcttaatgagcatgctaaattgtccatgcttcgaaatgccacttggaccttgtcaaacttctgtcgtggcaagcctcagcctcactttgaccaggtcaaacctgctcttcccgcccttgaacgactaattcattcagatgatgaagaagtcttgacagatgcctgttgggctctttcttacctctctgatgggaccaatgacaaaatccagactgtcatccaggccggtgttgtcccaaaacttgttgaacttctcctccatcattctccatctgtgctaattcctgctcttcgcactgttggaaatatagttactggagatgatatacaaacacagtgcgtgatcaatagtggtgctctaccttgtcttgccaacctgctcactcaaaaccataagaaaagcataaagaaggaagcttgctggacgatttcaaacatcacagcaggcaacaaagatcagatccagacggtagttgaggctaatttgatttccccgttggtgagtctgcttcaaaatgctgaatttgacattaagaaggaagctgcatgggcaatttcaaatgcaacttcaggtggttctcatgatcaaataaaatacctggtggagcaagggtgcataaaaccattatgcgatctcctggtttgcccagatccaagaatcataactgtctgccttgaaggattggaaaacattttgaaggtgggagaggcagagaagaacttgggtcacacaggagacatgaactattacgctcagctgattgatgatgcagaagggctagaaaagatcgagaaccttcagagccatgacaacaatgagatctatgagaaggctgttaaaattctggagacatactggcttgaagaggaagatgatgagacacagcaacctccaggtgttgatggttctcaggctgggttccagtttggagggaatcaagctccagtaccatccggaggattcaacttcagctgaaggaatggaattggaagcttgcaacttgagaatggtgaaaggtcagagtcagtcagagtctagtttcactgccatggttatactccaggtctggtctggtctggtctcagaggtttgtaccgggtggtcggtttaaaagtacagcgtctgagaaagtgtttggttcattgtccagggctatttttttgaaatgactggtacaccggtcgtgagtcgacctttgtgttgtttttaaattttggagggttataaaaacttacagtggagtcttttgtttttgtgttgacaacagtttgtatgtcggttaaaaaattgaaaccataaaccctttattggtcttaatatgtttggtgtctgatttcc

SEQ ID NO: 77573 - protein, 532 aa, Arabidopsis thaliana; identical to SEQ ID NO: 28267
  peptide (1)..(532): Ceres Seq. ID no. 12576860
  misc_feature (1)..(532): Homolog of NCBI NO: 15230778 NR Description: importin alpha; protein id: At3g06720.2, by cDNA: 9351., supported by cDNA: gi_13699776, supported by gi_15809793, supported by cDNA: gi_20453047, supported by cDNA:
  misc_feature (1)..(532): Homolog of NCBI NO: 15809794 NR Description: AT3g06720/F3E22_14 [Arabidopsis thaliana]
  misc_feature (1)..(532): Homolog of NCBI NO: 25314876 NR Description: probable nuclear transport factor importin
  misc_feature (1)..(532): Homolog of NCBI NO: 13699777 NR Description: AtKAP alpha [Arabidopsis thaliana]
  misc_feature (1)..(531): Homolog of NCBI NO: 13605661 NR Description: AT3g06720/F3E22_14 [Arabidopsis thaliana]
  misc_feature (1)..(531): Homolog of NCBI NO: 25314870 NR Description: probable nuclear transport factor importin alpha
  misc_feature (1)..(531): Homolog of NCBI NO: 13752562 NR Description: importin alpha 2 [Capsicum annuum]
  misc_feature (1)..(532): Homolog of NCBI NO: 3915737 NR Description: Importin alpha subunit (Karyopherin alpha
  misc_feature (1)..(531): Homolog of NCBI NO: 6682927 NR Description: importin alpha 1b [Oryza sativa (japonica
  misc_feature (1)..(531): Homolog of NCBI NO: 30421147 NR Description: importin alpha [Toxoplasma gondii]

SEQ ID NO: 77574 - protein, 500 aa, Arabidopsis thaliana; identical to SEQ ID NO: 28268
  peptide (1)..(500): Ceres Seq. ID no. 12576861
  misc_feature (1)..(500): Homolog of NCBI NO: 15230778 NR Description: importin alpha; protein id: At3g06720.2, by cDNA: 9351., supported by cDNA: gi_13699776, supported by gi_15809793, supported by cDNA: gi_20453047, supported by cDNA:
  misc_feature (1)..(500): Homolog of NCBI NO: 15809794 NR Description: AT3g06720/F3E22_14 [Arabidopsis thaliana]
  misc_feature (1)..(500): Homolog of NCBI NO: 25314876 NR Description: probable nuclear transport factor importin
  misc_feature (1)..(500): Homolog of NCBI NO: 13699777 NR Description: AtKAP alpha [Arabidopsis thaliana]
  misc_feature (1)..(499): Homolog of NCBI NO: 13605661 NR Description: AT3g06720/F3E22_14 [Arabidopsis thaliana]
  misc_feature (1)..(499): Homolog of NCBI NO: 25314870 NR Description: probable nuclear transport factor importin alpha
  misc_feature (1)..(499): Homolog of NCBI NO: 13752562 NR Description: importin alpha 2 [Capsicum annuum]
  misc_feature (1)..(500): Homolog of NCBI NO: 3915737 NR Description: Importin alpha subunit (Karyopherin alpha
  misc_feature (1)..(499): Homolog of NCBI NO: 6682927 NR Description: importin alpha 1b [Oryza sativa (japonica
  misc_feature (1)..(499): Homolog of NCBI NO: 30421147 NR Description: importin alpha [Toxoplasma gondii]

SEQ ID NO: 77575 - protein, 487 aa, Arabidopsis thaliana; identical to SEQ ID NO: 28269
  peptide (1)..(487): Ceres Seq. ID no. 12576862
  misc_feature (1)..(487): Homolog of NCBI NO: 15230778 NR Description: importin alpha; protein id: At3g06720.2, by cDNA: 9351., supported by cDNA: gi_13699776, supported by gi_15809793, supported by cDNA: gi_20453047, supported by cDNA:
  misc_feature (1)..(487): Homolog of NCBI NO: 15809794 NR Description: AT3g06720/F3E22_14 [Arabidopsis thaliana]
  misc_feature (1)..(487): Homolog of NCBI NO: 25314876 NR Description: probable nuclear transport factor importin
  misc_feature (1)..(487): Homolog of NCBI NO: 13699777 NR Description: AtKAP alpha [Arabidopsis thaliana]
  misc_feature (1)..(486): Homolog of NCBI NO: 13605661 NR Description: AT3g06720/F3E22_14 [Arabidopsis thaliana]
  misc_feature (1)..(486): Homolog of NCBI NO: 25314870 NR Description: probable nuclear transport factor importin alpha
  misc_feature (1)..(486): Homolog of NCBI NO: 13752562 NR Description: importin alpha 2 [Capsicum annuum]
  misc_feature (1)..(487): Homolog of NCBI NO: 3915737 NR Description: Importin alpha subunit (Karyopherin alpha
  misc_feature (1)..(486): Homolog of NCBI NO: 6682927 NR Description: importin alpha 1b [Oryza sativa (japonica
  misc_feature (1)..(486): Homolog of NCBI NO: 30421147 NR Description: importin alpha [Toxoplasma gondii]

SEQ ID NO: 77576 - DNA, 1492 bp, Arabidopsis thaliana
  misc_feature (1)..(1492): Ceres Seq. ID no. 12576875
  misc_feature: MA Experiment ID: 108434 Result: Down-regulated in Transcription
  misc_feature: MA Experiment 108434 PARAMETER Experiment Name: At_Root_Tips_cDNA_P Parameter: Tissue Value: Root Tips
  misc_feature: MA Experiment ID: 108595 Result: Up-regulated in Transcription
  misc_feature: MA Experiment 108595 PARAMETER Experiment Name: At_Ler-pi_Ovule_cDNA_P Parameter: Plant Line Value: null
  misc_feature: MA Experiment ID: 20000171 Result: Up-regulated in Transcription
  misc_feature: MA Experiment 20000171 PARAMETER Experiment Name: At_42deg_Heat_P Parameter: Age (day) Value: 14
  misc_feature: MA Experiment 20000171 PARAMETER Experiment Name: At_42deg_Heat_P Parameter: Organism Value: A. thaliana
  misc_feature: MA Experiment 20000171 PARAMETER Experiment Name: At_42deg_Heat_P Parameter: Plant Line Value: WS
  misc_feature: MA Experiment 20000171 PARAMETER Experiment Name: At_42deg_Heat_P Parameter: Temperature (deg C) Value: 42 vs. 22
  misc_feature: MA Experiment 20000171 PARAMETER Experiment Name: At_42deg_Heat_P Parameter: Timepoint (hr) Value: 1
  misc_feature: MA Experiment 20000171 PARAMETER Experiment Name: At_42deg_Heat_P Parameter: Tissue Value: Aerial
  misc_feature: MA Experiment ID: 20000179 Result: Up-regulated in Transcription
  misc_feature: MA Experiment 20000179 PARAMETER Experiment Name: At_Germinating_Seeds_P Parameter: Age (hr) Value: 6 vs. 0
  misc_feature: MA Experiment 20000179 PARAMETER Experiment Name: At_Germinating_Seeds_P Parameter: Tissue Value: Germinating Seeds
  misc_feature: MA Experiment ID: 20000495 Result: Up-regulated in Transcription
  misc_feature: MA Experiment 20000495 PARAMETER Experiment Name: At_Guard_Cells_P Parameter: Harvest Date Value: 8/2/2002
  misc_feature: MA Experiment 20000495 PARAMETER Experiment Name: At_Guard_Cells_P Parameter: Organism Value: A. thaliana
  misc_feature: MA Experiment 20000495 PARAMETER Experiment Name: At_Guard_Cells_P Parameter: Tissue Value: Guard Cells vs. Leaves
  misc_feature: MA Experiment ID: 20001450 Result: Up-regulated in Transcription
  misc_feature: MA Experiment 20001450 PARAMETER Experiment Name: At_Far-red-induction_P Parameter: Age (day) Value: 7
  misc_feature: MA Experiment 20001450 PARAMETER Experiment Name: At_Far-red-induction_P Parameter: Light Value: Far-red vs. White
  misc_feature: MA Experiment 20001450 PARAMETER Experiment Name: At_Far-red-induction_P Parameter: Organism Value: A. thaliana
  misc_feature: MA Experiment 20001450 PARAMETER Experiment Name: At_Far-red-induction_P Parameter: Plant Line Value: Columbia
  misc_feature: MA Experiment 20001450 PARAMETER Experiment Name: At_Far-red-induction_P Parameter: Timepoint (hr) Value: 8
  misc_feature: MA Experiment 20001450 PARAMETER Experiment Name: At_Far-red-induction_P Parameter: Tissue Value: Whole Plant
  misc_feature: MA Experiment ID: 20001451 Result: Up-regulated in Transcription
  misc_feature: MA Experiment 20001451 PARAMETER Experiment Name: At_Far-red-induction_P Parameter: Age (day) Value: 7
  misc_feature: MA Experiment 20001451 PARAMETER Experiment Name: At_Far-red-induction_P Parameter: Light Value: Far-red vs. White
  misc_feature: MA Experiment 20001451 PARAMETER Experiment Name: At_Far-red-induction_P Parameter: Organism Value: A. thaliana
  misc_feature: MA Experiment 20001451 PARAMETER Experiment Name: At_Far-red-induction_P Parameter: Plant Line Value: Columbia
  misc_feature: MA Experiment 20001451 PARAMETER Experiment Name: At_Far-red-induction_P Parameter: Timepoint (hr) Value: 24
  misc_feature: MA Experiment 20001451 PARAMETER Experiment Name: At_Far-red-induction_P Parameter: Tissue Value: Whole Plant
aaaccaaaggtgatgcgttttcttagccaagaactcaaacttgtgatatttcttttgattctcatcatctctgcattttctgaattggctcagacataatttcttcggtgacttccatggctccgcctgtctctgatgattccctacagcctcgagatgtttgtgttgtgggagtggcgcgaacgcctataggggacttccttggctccctctcgtctttgactgctacaagacttgggtccatagccatccaagccgcacttaagagagcacatgttgatccggcccttgtggaagaggtcttctttggcaatgtcttaactgccaatcttgggcaagcaccagcaagacaggctgcacttggtgctgggattccctattctgtgatctgcaccactatcaacaaagtttgtgctgcaggaatgaaatctgtaatgctagcgtctcaaagtatccagctcggcttgaatgatattgttgttgctggtgggatggagagcatgtcaaacgtacctaagtacctcccggacgcaagaaggggttctcgattaggtcatgatactgttgttgatggtatgatgaaagatggactttgggatgtctataatgactttggaatgggagtttgtggagaaatatgcgctgaccagtaccgtattacaagagaagaacaggatgcttatgctatccagagctttgagcgtggtattgctgcgcaaaacactcagttgttcgcttgggaaattgttccggtcgaagtttccactggaagagggaggccttcagttgttattgacaaggatgaaggattggggaagtttgatgcagccaagttaaaaaagcttagaccaagtttcaaggaggatgggggatcagtcactgctggaaatgcatcaagcataagtgatggtgcggcagcgttagtgctagtgagtggagagaaggctcttgagcttggactgcatgttatcgctaagattagaggatacgctgatgctgctcaggcaccagagttattcacaaccacgccagctcttgctattcctaaagctataaagcgggctggtttggatgcatctcaagtggattattatgaaataaacgaagcattttctgtggtagctctagccaatcagaaactactgggattagatcctgaacggctcaatgcgcatggaggggctgtttcactgggacatccattgggctgtagcggtgctcgtatcttggtcacattattgggggtgttgagagcaaagaagggaaagtatggagtggcatcaatatgcaacggaggaggaggagcatcagcacttgtccttgagttcatgtaagccccctctttaactctggtcggagaagacaatcggatattcggcactctgaagctaagagctgttgttttataacgcaaagcttatgtatatggttcatgtgtgtgtcacaagactgtaactttgtacttgagagagatgcaataaaagtgtgttag

SEQ ID NO: 77577 - protein, 405 aa, Arabidopsis thaliana; identical to SEQ ID NO: 75896
  peptide (1)..(405): Ceres Seq. ID no. 12576876
  misc_feature (12)..(275): Pfam Name: Thiolase, N-terminal domain Pfam Description: Thiolase, N-terminal domain
  misc_feature (1)..(405): Homolog of NCBI NO: 15238793 NR Description: acetoacyl-CoA-thiolase; protein id: At5g47720.1,
  misc_feature (1)..(405): Homolog of NCBI NO: 30695277 NR Description: acetyl-CoA C-acetyltransferase
  misc_feature (1)..(405): Homolog of NCBI NO: 16417944 NR Description: acetyl Co-A acetyltransferase [Hevea brasiliensis]
  misc_feature (6)..(405): Homolog of NCBI NO: 8777413 NR Description: acetyl-CoA C-acetyltransferase [Arabidopsis
  misc_feature (6)..(405): Homolog of NCBI NO: 30695411 NR Description: acetyl-CoA C-acetyltransferase A thiolase), putative [Arabidopsis thaliana]
  misc_feature (14)..(405): Homolog of NCBI NO: 30695409 NR Description: acetyl-CoA C-acetyltransferase A thiolase), putative [Arabidopsis thaliana]
  misc_feature (1)..(405): Homolog of NCBI NO: 34894172 NR Description: putative acetoacyl-CoA-thiolase [Oryza sativa
  misc_feature (6)..(403): Homolog of NCBI NO: 7433657 NR Description: acetyl-CoA C-acetyltransferase (EC 2.3.1.9),
  misc_feature (14)..(403): Homolog of NCBI NO: 19113478 NR Description: acetyl-coa acetyltransferase (EC 2.3.1.9)
  misc_feature (14)..(403): Homolog of NCBI NO: 11257345 NR Description: probable acetyl-CoA C-acetyltransferase (EC - fission yeast (Schizosaccharomyces pombe)

SEQ ID NO: 77578 - protein, 303 aa, Arabidopsis thaliana; identical to SEQ ID NO: 75897
  peptide (1)..(303): Ceres Seq. ID no. 12576877
  misc_feature (1)..(173): Pfam Name: Thiolase, N-terminal domain Pfam Description: Thiolase, N-terminal domain
  misc_feature (1)..(303): Homolog of NCBI NO: 15238793 NR Description: acetoacyl-CoA-thiolase; protein id: At5g47720.1,
  misc_feature (1)..(303): Homolog of NCBI NO: 30695277 NR Description: acetyl-CoA C-acetyltransferase
  misc_feature (1)..(303): Homolog of NCBI NO: 16417944 NR Description: acetyl Co-A acetyltransferase [Hevea brasiliensis]
  misc_feature (1)..(303): Homolog of NCBI NO: 8777413 NR Description: acetyl-CoA C-acetyltransferase [Arabidopsis
  misc_feature (1)..(303): Homolog of NCBI NO: 30695411 NR Description: acetyl-CoA C-acetyltransferase A thiolase), putative [Arabidopsis thaliana]
  misc_feature (1)..(303): Homolog of NCBI NO: 30695409 NR Description: acetyl-CoA C-acetyltransferase A thiolase), putative [Arabidopsis thaliana]
  misc_feature (1)..(303): Homolog of NCBI NO: 34894172 NR Description: putative acetoacyl-CoA-thiolase [Oryza sativa
  misc_feature (1)..(301): Homolog of NCBI NO: 7433657 NR Description: acetyl-CoA C-acetyltransferase (EC 2.3.1.9),
  misc_feature (1)..(301): Homolog of NCBI NO: 19113478 NR Description: acetyl-coa acetyltransferase (EC 2.3.1.9)
  misc_feature (1)..(301): Homolog of NCBI NO: 11257345 NR Description: probable acetyl-CoA C-acetyltransferase (EC - fission yeast (Schizosaccharomyces pombe)

SEQ ID NO: 77579 - protein, 299 aa, Arabidopsis thaliana; identical to SEQ ID NO: 75898
  peptide (1)..(299): Ceres Seq. ID no. 12576878
  misc_feature (1)..(169): Pfam Name: Thiolase, N-terminal domain Pfam Description: Thiolase, N-terminal domain
  misc_feature (1)..(299): Homolog of NCBI NO: 15238793 NR Description: acetoacyl-CoA-thiolase; protein id: At5g47720.1,
  misc_feature (1)..(299): Homolog of NCBI NO: 30695277 NR Description: acetyl-CoA C-acetyltransferase
  misc_feature (1)..(299): Homolog of NCBI NO: 16417944 NR Description: acetyl Co-A acetyltransferase [Hevea brasiliensis]
  misc_feature (1)..(299): Homolog of NCBI NO: 8777413 NR Description: acetyl-CoA C-acetyltransferase [Arabidopsis
  misc_feature (1)..(299): Homolog of NCBI NO: 30695411 NR Description: acetyl-CoA C-acetyltransferase A thiolase), putative [Arabidopsis thaliana]
  misc_feature (1)..(299): Homolog of NCBI NO: 30695409 NR Description: acetyl-CoA C-acetyltransferase A thiolase), putative [Arabidopsis thaliana]
  misc_feature (1)..(299): Homolog of NCBI NO: 34894172 NR Description: putative acetoacyl-CoA-thiolase [Oryza sativa
  misc_feature (1)..(297): Homolog of NCBI NO: 7433657 NR Description: acetyl-CoA C-acetyltransferase (EC 2.3.1.9),
  misc_feature (1)..(297): Homolog of NCBI NO: 19113478 NR Description: acetyl-coa acetyltransferase (EC 2.3.1.9)
  misc_feature (1)..(297): Homolog of NCBI NO: 11257345 NR Description: probable acetyl-CoA C-acetyltransferase (EC - fission yeast (Schizosaccharomyces pombe)

SEQ ID NO: 77580 - DNA, 1066 bp, Arabidopsis thaliana
  misc_feature (1)..(1066): Ceres Seq. ID no. 12576886
  misc_feature: MA Experiment ID: 20000071 Result: Up-regulated in Transcription
  misc_feature: MA Experiment 20000071 PARAMETER Experiment Name: At_100uM_ABA_Mutants_cDNA_P Parameter: Plant Line Value: CS8104
  misc_feature: MA Experiment 20000071 PARAMETER Experiment Name: At_100uM_ABA_Mutants_cDNA_P Parameter: Timepoint (hr) Value: 6
  misc_feature: MA Experiment 20000071 PARAMETER Experiment Name: At_100uM_ABA_Mutants_cDNA_P Parameter: Tissue Value: Aerial
  misc_feature: MA Experiment 20000071 PARAMETER Experiment Name: At_100uM_ABA_Mutants_cDNA_P Parameter: Treatment Value: 100uM ABA vs. No Treatment
  misc_feature: MA Experiment ID: 20000089 Result: Up-regulated in Transcription
  misc_feature: MA Experiment ID: 20000090 Result: Up-regulated in Transcription
  misc_feature: MA Experiment ID: 20000111 Result: Down-regulated in Transcription
  misc_feature: MA Experiment 20000111 PARAMETER Experiment Name: At_42deg_Heat_cDNA_P Parameter: Temperature (deg C) Value: 42 vs. 22
  misc_feature: MA Experiment 20000111 PARAMETER Experiment Name: At_42deg_Heat_cDNA_P Parameter: Timepoint (hr) Value: 6
  misc_feature: MA Experiment 20000111 PARAMETER Experiment Name: At_42deg_Heat_cDNA_P Parameter: Tissue Value: Aerial
  misc_feature: MA Experiment ID: 20000112 Result: Down-regulated in Transcription
  misc_feature: MA Experiment 20000112 PARAMETER Experiment Name: At_42deg_Heat_cDNA_P Parameter: Temperature (deg C) Value: 42 vs. 22
  misc_feature: MA Experiment 20000112 PARAMETER Experiment Name: At_42deg_Heat_cDNA_P Parameter: Timepoint (hr) Value: 2
  misc_feature: MA Experiment 20000112 PARAMETER Experiment Name: At_42deg_Heat_cDNA_P Parameter: Tissue Value: Aerial
  misc_feature: MA Experiment ID: 20000113 Result: Down-regulated in Transcription
  misc_feature: MA Experiment 20000113 PARAMETER Experiment Name: At_42deg_Heat_cDNA_P Parameter: Temperature (deg C) Value: 42 vs. 22
  misc_feature: MA Experiment 20000113 PARAMETER Experiment Name: At_42deg_Heat_cDNA_P Parameter: Timepoint (hr) Value: 8
  misc_feature: MA Experiment 20000113 PARAMETER Experiment Name: At_42deg_Heat_cDNA_P Parameter: Tissue Value: Aerial
  misc_feature: MA Experiment ID: 20000144 Result: Down-regulated in Transcription
  misc_feature: MA Experiment 20000144 PARAMETER Experiment Name: At_42deg_Heat_cDNA_P Parameter: Temperature (deg C) Value: 42 vs. 22
  misc_feature: MA Experiment 20000144 PARAMETER Experiment Name: At_42deg_Heat_cDNA_P Parameter: Timepoint (hr) Value: 1
  misc_feature: MA Experiment 20000144 PARAMETER Experiment Name: At_42deg_Heat_cDNA_P Parameter: Tissue Value: Aerial
  misc_feature: MA Experiment ID: 20001905 Result: Down-regulated in Transcription
  misc_feature: MA Experiment 20001905 PARAMETER Experiment Name: At_Drought_Reproduction_P Parameter: Age (day) Value: 40
  misc_feature: MA Experiment 20001905 PARAMETER Experiment Name: At_Drought_Reproduction_P Parameter: Organism Value: A. thaliana
  misc_feature: MA Experiment 20001905 PARAMETER Experiment Name: At_Drought_Reproduction_P Parameter: Plant Line Value: WS
  misc_feature: MA Experiment 20001905 PARAMETER Experiment Name: At_Drought_Reproduction_P Parameter: Timepoint (day) Value: 10
  misc_feature: MA Experiment 20001905 PARAMETER Experiment Name: At_Drought_Reproduction_P Parameter: Tissue Value: Rosettes
  misc_feature: MA Experiment 20001905 PARAMETER Experiment Name: At_Drought_Reproduction_P Parameter: Treatment Value: Drought vs. No Drought
gcaacttgtgttacagatactctcgcaaagtctcatcctttctcagcaaaaaacactaggaaatggttgaaaggcatggagagttttgatttgctgcttaagatatatcatgtcgcagtgcgttgacggtatcaagcatttatgcacctctgttttagggtgttttgatcttgatttgtataaacaatctggtggccttggagatcctgaattgcttgcaagagacactgtttttagtgtgagtgaaatagaagctctttatgagctttttaagaaaatcagcagtgccgtgattgatgatgggctaataaacaaggaagagtttcagttggctttgtttaagacaaataaaaaagagagtttgtttgcagatcgggttttcgatttgtttgatacaaagcacaatggaatactggggtttgaggaatttgctcgtgctctctccgtctttcacccaaatgcgcctatagatgacaaaattcacttttcatttcagctatatgatcttaaacagcaagggtttatcgaacggcaagaggtgaaacaaatggttgtcgctacgcttgctgaatctggaatgaatttgaaggatactgtcattgaggatataatcgacaagacgtttgaggaagcagacacaaaacacgatggaaagatcgataaggaagagtggagaagccttgttcttagacatcccagccttctgaagaacatgactcttcaatatctcaaggatatcacgactacgtttccaagctttgtgttccattctcaggttgaagatacctgaaaaagcaaaagcaaaagcaagcagcggcaagacatcattgtattgttgaaggttgttctttcgttatggttctttatttgttacatttctaaatctctgaactcattttattttttattgagctttttttgtgaagcaaaattcttctttttagtttggtttttgtcctttttgatttcgctcggtctatctgtagatacaacttttgcatcttgatgttatggtaatgtaaagtttttcagtttatttattaatccaattaaaaagatttgcttc

SEQ ID NO: 77581 - protein, 226 aa, Arabidopsis thaliana; identical to SEQ ID NO: 23899
  peptide (1)..(226): Ceres Seq. ID no. 12576887
  misc_feature (167)..(195): Pfam Name: EF hand Pfam Description: EF hand
  misc_feature (1)..(226): Homolog of NCBI NO: 15241101 NR Description: calcineurin B-like protein 2 (gb|AAC26009.1); id: At5g55990.2, supported by cDNA: 37280., supported by cDNA: supported by cDNA: gi_3309083 [Arabidopsis thaliana] protein 2
  misc_feature (1)..(226): Homolog of NCBI NO: 21593228 NR Description: calcineurin B-like protein 2 [Arabidopsis
  misc_feature (1)..(226): Homolog of NCBI NO: 15236778 NR Description: calcineurin B-like protein 3; protein id: supported by cDNA: gi_18253012, supported by cDNA: gi_3309085
  misc_feature (1)..(226): Homolog of NCBI NO: 30687272 NR Description: calcineurin B-like protein 3 (CBL3) [Arabidopsis
  misc_feature (1)..(226): Homolog of NCBI NO: 16924116 NR Description: putative calcineurin B-like protein [Oryza sativa]
  misc_feature (1)..(226): Homolog of NCBI NO: 22137326 NR Description: calcineurin B [Pisum sativum]
  misc_feature (32)..(220): Homolog of NCBI NO: 38493047 NR Description: Chain A, The Crystal Structure Of The Calcium
  misc_feature (1)..(226): Homolog of NCBI NO: 18414640 NR Description: expressed protein; protein id: At4g16350.1, by cDNA: gi_11065942, supported by cDNA: gi_13448026 [Arabidopsis
  misc_feature (1)..(226): Homolog of NCBI NO: 13448027 NR Description: SOS3-like calcium binding protein [Arabidopsis
  misc_feature (16)..(225): Homolog of NCBI NO: 18414931 NR Description: calcineurin B-like protein 1; protein id: supported by cDNA: gi_3309081 [Arabidopsis thaliana]

SEQ ID NO: 77582 - DNA, 1446 bp, Arabidopsis thaliana
  misc_feature (1)..(1446): Ceres Seq. ID no. 12576888
  misc_feature: MA Experiment ID: 108577 Result: Down-regulated in Transcription
  misc_feature: MA Experiment 108577 PARAMETER Experiment Name: At_42deg_Heat_cDNA_P Parameter: Temperature (deg C) Value: 42 vs. 22
  misc_feature: MA Experiment 108577 PARAMETER Experiment Name: At_42deg_Heat_cDNA_P Parameter: Timepoint (hr) Value: 6
  misc_feature: MA Experiment 108577 PARAMETER Experiment Name: At_42deg_Heat_cDNA_P Parameter: Tissue Value: Aerial
  misc_feature: MA Experiment ID: 20001807 Result: Up-regulated in Transcription
  misc_feature: MA Experiment 20001807 PARAMETER Experiment Name: At_50mM_NH4NO3_L-to-H_Sub_P Parameter: Timepoint (hr) Value: 6
  misc_feature: MA Experiment 20001807 PARAMETER Experiment Name: At_50mM_NH4NO3_L-to-H_Sub_P Parameter: Tissue Value: Leaf
  misc_feature: MA Experiment 20001807 PARAMETER Experiment Name: At_50mM_NH4NO3_L-to-H_Sub_P Parameter: Treatment Value: 50mM NH4NO3 vs 100mM Mannitol
agagaaagtgtgaaaccaacttgttcatattgaaaagaaccattgctctctagattaaaagcttctctctctctctctctctctctctctctctctctctctctctctctcttttggactttctcaatccatatccctctctctgttttttctaatttgagcctctaaagtctcctcgttttgttcatgttgttgttcaagtgaagaagctcaattatgtttacaacattgttgtaatttcaaaacttcataagaatttctctgataataaagaaaaagctggagtagaactattttaaagtgtcatcatgaagagactaagcagctcagattcaatgtgtggtctaatctccacttctacagatgaacagagtccaagagggtacggaagtaattaccaatctatgcttgaaggttacgatgaagatgctacactaatcgaggaatattccggcaaccaccaccacatgggtctatcggagaagaagagaagattaaaagttgaccaagtcaaagctcttgagaagaatttcgaacttgagaataaactcgaacctgagaggaaaactaaattagcacaagagcttggacttcaacctcgtcaagtagctgtttggtttcagaaccgtcgtgcacggtggaaaacaaaacagcttgaaaaagattacggtgttcttaagggtcaatacgattctctccgccacaatttcgattctctccgccgtgacaatgattcccttctccaagagattagtaaaatcaaagctaaggtaaacggtgaagaagataacaacaacaacaaagctattacggagggtgttaaggaagaggaagttcacaagacggattcgattccttcgtctcctctgcagtttctagaacattcctctggttttaactaccggcgaagcttcactgacctccgtgaccttctaccgaattccaccgttgtcgaggctggatcttccgatagttgcgattcaagcgccgttcttaacgacgaaacaagttctgataacggaagattgacgccgcctgtgacggttactggcgggagtttcttacagtttgtgaaaacagagcaaacagaggatcacgaggattttctaagcggtgaagaagcttgtggtttcttctccgatgaacagccgccgtcacttcattggtactctgcttcagatcattggacttgagaattgtttatcaaattggtgctctgtttagtctcaatgggaaaacagagaagagggcaaaggtggaataattgataaataaggattaaggatgaaggggattattaaattaaatccgcgggagaagttaattttgggtttaagattgtaatggctcttcatgtaattaacgatgtcgagaggggctttcacagaaataggaatcaatggggacactctgatatgaaagcaataaaactacgtttgacccctt

SEQ ID NO: 77583 - protein, 294 aa, Arabidopsis thaliana; identical to SEQ ID NO: 38954
  peptide (1)..(294): Ceres Seq. ID no. 12576889
  misc_feature (59)..(113): Pfam Name: Homeobox domain Pfam Description: Homeobox domain
  misc_feature (1)..(294): Homolog of NCBI NO: 15236109 NR Description: homeodomain - like protein; protein id: supported by cDNA: gi_13877722, supported by cDNA: gi_15450981
  misc_feature (1)..(294): Homolog of NCBI NO: 15450982 NR Description: homeodomain-like protein [Arabidopsis thaliana]
  misc_feature (1)..(294): Homolog of NCBI NO: 7446295 NR Description: homeotic protein T5J17.230 - Arabidopsis thaliana
  misc_feature (1)..(293): Homolog of NCBI NO: 18399966 NR Description: homeodomain transcription factor (ATHB-6); id: At2g22430.1, supported by cDNA: gi_16974586, supported by
  misc_feature (1)..(293): Homolog of NCBI NO: 25386231 NR Description: homeodomain transcription factor (ATHB-6)
  misc_feature (1)..(293): Homolog of NCBI NO: 8133126 NR Description: hb-6-like protein [Brassica rapa subsp.
  misc_feature (1)..(273): Homolog of NCBI NO: 5305602 NR Description: homeobox protein ATHB6 [Arabidopsis thaliana]
  misc_feature (1)..(293): Homolog of NCBI NO: 15238405 NR Description: homeobox-leucine zipper protein ATHB-5 (HD-zip ATHB- 5) (sp|P46667); protein id: At5g65310.1, supported by cDNA:
  misc_feature (52)..(294): Homolog of NCBI NO: 15148916 NR Description: homeodomain leucine zipper protein HDZ1
  misc_feature (1)..(191): Homolog of NCBI NO: 11231065 NR Description: homeobox-leucine zipper protein [Zinnia elegans]

SEQ ID NO: 77584 - protein, 285 aa, Arabidopsis thaliana; identical to SEQ ID NO: 38955
  peptide (1)..(285): Ceres Seq. ID no. 12576890
  misc_feature (50)..(104): Pfam Name: Homeobox domain Pfam Description: Homeobox domain
  misc_feature (1)..(285): Homolog of NCBI NO: 15236109 NR Description: homeodomain - like protein; protein id: supported by cDNA: gi_13877722, supported by cDNA: gi_15450981
  misc_feature (1)..(285): Homolog of NCBI NO: 15450982 NR Description: homeodomain-like protein [Arabidopsis thaliana]
  misc_feature (1)..(285): Homolog of NCBI NO: 7446295 NR Description: homeotic protein T5J17.230 - Arabidopsis thaliana
  misc_feature (1)..(284): Homolog of NCBI NO: 18399966 NR Description: homeodomain transcription factor (ATHB-6); id: At2g22430.1, supported by cDNA: gi_16974586, supported by
  misc_feature (1)..(284): Homolog of NCBI NO: 25386231 NR Description: homeodomain transcription factor (ATHB-6)
  misc_feature (1)..(284): Homolog of NCBI NO: 8133126 NR Description: hb-6-like protein [Brassica rapa subsp.
  misc_feature (1)..(264): Homolog of NCBI NO: 5305602 NR Description: homeobox protein ATHB6 [Arabidopsis thaliana]
  misc_feature (1)..(284): Homolog of NCBI NO: 15238405 NR Description: homeobox-leucine zipper protein ATHB-5 (HD-zip ATHB- 5) (sp|P46667); protein id: At5g65310.1, supported by cDNA:
  misc_feature (43)..(285): Homolog of NCBI NO: 15148916 NR Description: homeodomain leucine zipper protein HDZ1
  misc_feature (1)..(182): Homolog of NCBI NO: 11231065 NR Description: homeobox-leucine zipper protein [Zinnia elegans]

SEQ ID NO: 77585 - protein, 262 aa, Arabidopsis thaliana; identical to SEQ ID NO: 38956
  peptide (1)..(262): Ceres Seq. ID no. 12576891
  misc_feature (27)..(81): Pfam Name: Homeobox domain Pfam Description: Homeobox domain
  misc_feature (1)..(262): Homolog of NCBI NO: 15236109 NR Description: homeodomain - like protein; protein id: supported by cDNA: gi_13877722, supported by cDNA: gi_15450981
  misc_feature (1)..(262): Homolog of NCBI NO: 15450982 NR Description: homeodomain-like protein [Arabidopsis thaliana]
  misc_feature (1)..(262): Homolog of NCBI NO: 7446295 NR Description: homeotic protein T5J17.230 - Arabidopsis thaliana
  misc_feature (1)..(261): Homolog of NCBI NO: 18399966 NR Description: homeodomain transcription factor (ATHB-6); id: At2g22430.1, supported by cDNA: gi_16974586, supported by
  misc_feature (1)..(261): Homolog of NCBI NO: 25386231 NR Description: homeodomain transcription factor (ATHB-6)
  misc_feature (1)..(261): Homolog of NCBI NO: 8133126 NR Description: hb-6-like protein [Brassica rapa subsp.
  misc_feature (1)..(241): Homolog of NCBI NO: 5305602 NR Description: homeobox protein ATHB6 [Arabidopsis thaliana]
  misc_feature (1)..(261): Homolog of NCBI NO: 15238405 NR Description: homeobox-leucine zipper protein ATHB-5 (HD-zip ATHB- 5) (sp|P46667); protein id: At5g65310.1, supported by cDNA:
  misc_feature (20)..(262): Homolog of NCBI NO: 15148916 NR Description: homeodomain leucine zipper protein HDZ1
  misc_feature (1)..(159): Homolog of NCBI NO: 11231065 NR Description: homeobox-leucine zipper protein [Zinnia elegans]

SEQ ID NO: 77586 - DNA, 1515 bp, Arabidopsis thaliana
  misc_feature (1)..(1515): Ceres Seq. ID no. 12576892
  misc_feature: MA Experiment ID: 108434 Result: Down-regulated in Transcription
  misc_feature: MA Experiment 108434 PARAMETER Experiment Name: At_Root_Tips_cDNA_P Parameter: Tissue Value: Root Tips
  misc_feature: MA Experiment ID: 108435 Result: Down-regulated in Transcription
  misc_feature: MA Experiment 108435 PARAMETER Experiment Name: At_stm_Mutants_cDNA_P Parameter: Plant Line Value: wt Landsburg vs stm
  misc_feature: MA Experiment 108435 PARAMETER Experiment Name: At_stm_Mutants_cDNA_P Parameter: Tissue Value: Shoot Apical Meristem Region
  misc_feature: MA Experiment ID: 108488 Result: Down-regulated in Transcription
  misc_feature: MA Experiment ID: 108573 Result: Up-regulated in Transcription
  misc_feature: MA Experiment 108573 PARAMETER Experiment Name: At_Drought_cDNA_P Parameter: Timepoint (hr) Value: 6
  misc_feature: MA Experiment 108573 PARAMETER Experiment Name: At_Drought_cDNA_P Parameter: Tissue Value: Aerial
  misc_feature: MA Experiment 108573 PARAMETER Experiment Name: At_Drought_cDNA_P Parameter: Treatment Value: Drought vs. No Drought
  misc_feature: MA Experiment ID: 108574 Result: Up-regulated in Transcription
  misc_feature: MA Experiment 108574 PARAMETER Experiment Name: At_Wounding__cDNA_P Parameter: Timepoint (hr) Value: 1
  misc_feature: MA Experiment 108574 PARAMETER Experiment Name: At_Wounding__cDNA_P Parameter: Tissue Value: Aerial
  misc_feature: MA Experiment 108574 PARAMETER Experiment Name: At_Wounding__cDNA_P Parameter: Treatment Value: Wounding vs. No Wounding
  misc_feature: MA Experiment ID: 108577 Result: Down-regulated in Transcription
  misc_feature: MA Experiment 108577 PARAMETER Experiment Name: At_42deg_Heat_cDNA_P Parameter: Temperature (deg C) Value: 42 vs. 22
  misc_feature: MA Experiment 108577 PARAMETER Experiment Name: At_42deg_Heat_cDNA_P Parameter: Timepoint (hr) Value: 6
  misc_feature: MA Experiment 108577 PARAMETER Experiment Name: At_42deg_Heat_cDNA_P Parameter: Tissue Value: Aerial
  misc_feature: MA Experiment ID: 108579 Result: Up-regulated in Transcription
  misc_feature: MA Experiment 108579 PARAMETER Experiment Name: At_4deg_Cold_cDNA_P Parameter: Temperature (deg C) Value: 4 vs. 22
  misc_feature: MA Experiment 108579 PARAMETER Experiment Name: At_4deg_Cold_cDNA_P Parameter: Timepoint (hr) Value: 6
  misc_feature: MA Experiment 108579 PARAMETER Experiment Name: At_4deg_Cold_cDNA_P Parameter: Tissue Value: Aerial
  misc_feature: MA Experiment ID: 108594 Result: Up-regulated in Transcription
  misc_feature: MA Experiment 108594 PARAMETER Experiment Name: At_Ler-rhl_Root_cDNA_P Parameter: Plant Line Value: null
  misc_feature: MA Experiment ID: 108595 Result: Down-regulated in Transcription
  misc_feature: MA Experiment 108595 PARAMETER Experiment Name: At_Ler-pi_Ovule_cDNA_P Parameter: Plant Line Value: null
  misc_feature: MA Experiment ID: 20000069 Result: Up-regulated in Transcription
  misc_feature: MA Experiment 20000069 PARAMETER Experiment Name: At_100uM_ABA_Mutants_cDNA_P Parameter: Plant Line Value: CS23
  misc_feature: MA Experiment 20000069 PARAMETER Experiment Name: At_100uM_ABA_Mutants_cDNA_P Parameter: Timepoint (hr) Value: 6
  misc_feature: MA Experiment 20000069 PARAMETER Experiment Name: At_100uM_ABA_Mutants_cDNA_P Parameter: Tissue Value: Aerial
  misc_feature: MA Experiment 20000069 PARAMETER Experiment Name: At_100uM_ABA_Mutants_cDNA_P Parameter: Treatment Value: 100uM ABA vs. No Treatment
  misc_feature: MA Experiment ID: 20000070 Result: Up-regulated in Transcription
  misc_feature: MA Experiment 20000070 PARAMETER Experiment Name: At_100uM_ABA_Mutants_cDNA_P Parameter: Plant Line Value: CS24
  misc_feature: MA Experiment 20000070 PARAMETER Experiment Name: At_100uM_ABA_Mutants_cDNA_P Parameter: Timepoint (hr) Value: 6
  misc_feature: MA Experiment 20000070 PARAMETER Experiment Name: At_100uM_ABA_Mutants_cDNA_P Parameter: Tissue Value: Aerial
  misc_feature: MA Experiment 20000070 PARAMETER Experiment Name: At_100uM_ABA_Mutants_cDNA_P Parameter: Treatment Value: 100uM ABA vs. No Treatment
  misc_feature: MA Experiment ID: 20000071 Result: Up-regulated in Transcription
  misc_feature: MA Experiment 20000071 PARAMETER Experiment Name: At_100uM_ABA_Mutants_cDNA_P Parameter: Plant Line Value: CS8104
  misc_feature: MA Experiment 20000071 PARAMETER Experiment Name: At_100uM_ABA_Mutants_cDNA_P Parameter: Timepoint (hr) Value: 6
  misc_feature: MA Experiment 20000071 PARAMETER Experiment Name: At_100uM_ABA_Mutants_cDNA_P Parameter: Tissue Value: Aerial
  misc_feature: MA Experiment 20000071 PARAMETER Experiment Name: At_100uM_ABA_Mutants_cDNA_P Parameter: Treatment Value: 100uM ABA vs. No Treatment
  misc_feature: MA Experiment ID: 20000072 Result: Up-regulated in Transcription
  misc_feature: MA Experiment 20000072 PARAMETER Experiment Name: At_100uM_ABA_Mutants_cDNA_P Parameter: Plant Line Value: CS8105
  misc_feature: MA Experiment 20000072 PARAMETER Experiment Name: At_100uM_ABA_Mutants_cDNA_P Parameter: Timepoint (hr) Value: 6
  misc_feature: MA Experiment 20000072 PARAMETER Experiment Name: At_100uM_ABA_Mutants_cDNA_P Parameter: Tissue Value: Aerial
  misc_feature: MA Experiment 20000072 PARAMETER Experiment Name: At_100uM_ABA_Mutants_cDNA_P Parameter: Treatment Value: 100uM ABA vs. No Treatment
  misc_feature: MA Experiment ID: 20000086 Result: Up-regulated in Transcription
  misc_feature: MA Experiment 20000086 PARAMETER Experiment Name: At_100uM_ABA_Mutants_cDNA_P Parameter: Plant Line Value: CS22
  misc_feature: MA Experiment 20000086 PARAMETER Experiment Name: At_100uM_ABA_Mutants_cDNA_P Parameter: Timepoint (hr) Value: 6
  misc_feature: MA Experiment 20000086 PARAMETER Experiment Name: At_100uM_ABA_Mutants_cDNA_P Parameter: Tissue Value: Aerial
  misc_feature: MA Experiment 20000086 PARAMETER Experiment Name: At_100uM_ABA_Mutants_cDNA_P Parameter: Treatment Value: 100uM ABA vs. No Treatment
  misc_feature: MA Experiment ID: 20000087 Result: Up-regulated in Transcription
  misc_feature: MA Experiment 20000087 PARAMETER Experiment Name: At_100uM_ABA_Mutants_cDNA_P Parameter: Plant Line Value: WS
  misc_feature: MA Experiment 20000087 PARAMETER Experiment Name: At_100uM_ABA_Mutants_cDNA_P Parameter: Timepoint (hr) Value: 6
  misc_feature: MA Experiment 20000087 PARAMETER Experiment Name: At_100uM_ABA_Mutants_cDNA_P Parameter: Tissue Value: Aerial
  misc_feature: MA Experiment 20000087 PARAMETER Experiment Name: At_100uM_ABA_Mutants_cDNA_P Parameter: Treatment Value: 100uM ABA vs. No Treatment
  misc_feature: MA Experiment ID: 20000088 Result: Up-regulated in Transcription
  misc_feature: MA Experiment 20000088 PARAMETER Experiment Name: At_100uM_ABA_Mutants_cDNA_P Parameter: Plant Line Value: Landsberg
  misc_feature: MA Experiment 20000088 PARAMETER Experiment Name: At_100uM_ABA_Mutants_cDNA_P Parameter: Timepoint (hr) Value: 6
  misc_feature: MA Experiment 20000088 PARAMETER Experiment Name: At_100uM_ABA_Mutants_cDNA_P Parameter: Tissue Value: Aerial
  misc_feature: MA Experiment 20000088 PARAMETER Experiment Name: At_100uM_ABA_Mutants_cDNA_P Parameter: Treatment Value: 100uM ABA vs. No Treatment
  misc_feature: MA Experiment ID: 20000090 Result: Up-regulated in Transcription
  misc_feature: MA Experiment ID: 20000112 Result: Up-regulated in Transcription
  misc_feature: MA Experiment 20000112 PARAMETER Experiment Name: At_42deg_Heat_cDNA_P Parameter: Temperature (deg C) Value: 42 vs. 22
  misc_feature: MA Experiment 20000112 PARAMETER Experiment Name: At_42deg_Heat_cDNA_P Parameter: Timepoint (hr) Value: 2
  misc_feature: MA Experiment 20000112 PARAMETER Experiment Name: At_42deg_Heat_cDNA_P Parameter: Tissue Value: Aerial
  misc_feature: MA Experiment ID: 20000117 Result: Up-regulated in Transcription
  misc_feature: MA Experiment 20000117 PARAMETER Experiment Name: At_100uM_ABA_Mutants_cDNA_P Parameter: Plant Line Value: Columbia
  misc_feature: MA Experiment 20000117 PARAMETER Experiment Name: At_100uM_ABA_Mutants_cDNA_P Parameter: Timepoint (hr) Value: 6
  misc_feature: MA Experiment 20000117 PARAMETER Experiment Name: At_100uM_ABA_Mutants_cDNA_P Parameter: Tissue Value: Aerial
  misc_feature: MA Experiment 20000117 PARAMETER Experiment Name: At_100uM_ABA_Mutants_cDNA_P Parameter: Treatment Value: 100uM ABA vs. No Treatment
  misc_feature: MA Experiment ID: 20000144 Result: Up-regulated in Transcription
  misc_feature: MA Experiment 20000144 PARAMETER Experiment Name: At_42deg_Heat_cDNA_P Parameter: Temperature (deg C) Value: 42 vs. 22
  misc_feature: MA Experiment 20000144 PARAMETER Experiment Name: At_42deg_Heat_cDNA_P Parameter: Timepoint (hr) Value: 1
  misc_feature: MA Experiment 20000144 PARAMETER Experiment Name: At_42deg_Heat_cDNA_P Parameter: Tissue Value: Aerial
  misc_feature: MA Experiment ID: 20000185 Result: Down-regulated in Transcription
  misc_feature: MA Experiment 20000185 PARAMETER Experiment Name: At_Roots__P Parameter: Age (day) Value: 7 vs. 21
  misc_feature: MA Experiment 20000185 PARAMETER Experiment Name: At_Roots__P Parameter: Organism Value: A. thaliana
  misc_feature: MA Experiment 20000185 PARAMETER Experiment Name: At_Roots__P Parameter: Tissue Value: Roots vs. Whole Plant
  misc_feature: MA Experiment ID: 20000234 Result: Down-regulated in Transcription
  misc_feature: MA Experiment 20000234 PARAMETER Experiment Name: At_Siliques_P Parameter: Age (day) Value: 21
  misc_feature: MA Experiment 20000234 PARAMETER Experiment Name: At_Siliques_P Parameter: Organism Value: A. thaliana
  misc_feature: MA Experiment 20000234 PARAMETER Experiment Name: At_Siliques_P Parameter: Plant Line Value: WS
  misc_feature: MA Experiment 20000234 PARAMETER Experiment Name: At_Siliques_P Parameter: Tissue Value: Less Than 5mm Siliques vs. Whole Plant
  misc_feature: MA Experiment ID: 20000235 Result: Down-regulated in Transcription
  misc_feature: MA Experiment 20000235 PARAMETER Experiment Name: At_Siliques_P Parameter: Age (day) Value: 21
  misc_feature: MA Experiment 20000235 PARAMETER Experiment Name: At_Siliques_P Parameter: Organism Value: A. thaliana
  misc_feature: MA Experiment 20000235 PARAMETER Experiment Name: At_Siliques_P Parameter: Plant Line Value: WS
  misc_feature: MA Experiment 20000235 PARAMETER Experiment Name: At_Siliques_P Parameter: Tissue Value: 5-10mm Siliques vs. Whole Plant
  misc_feature: MA Experiment ID: 20000264 Result: Down-regulated in Transcription
  misc_feature: MA Experiment 20000264 PARAMETER Experiment Name: At_Open_Flower_P Parameter: Age (day) Value: 21
  misc_feature: MA Experiment 20000264 PARAMETER Experiment Name: At_Open_Flower_P Parameter: Plant Line Value: WS
  misc_feature: MA Experiment 20000264 PARAMETER Experiment Name: At_Open_Flower_P Parameter: Tissue Value: Open Flower vs. Whole Plant
  misc_feature: MA Experiment ID: 20000265 Result: Down-regulated in Transcription
  misc_feature: MA Experiment 20000265 PARAMETER Experiment Name: At_Open_Flower_P Parameter: Age (day) Value: 21
  misc_feature: MA Experiment 20000265 PARAMETER Experiment Name: At_Open_Flower_P Parameter: Plant Line Value: WS
  misc_feature: MA Experiment 20000265 PARAMETER Experiment Name: At_Open_Flower_P Parameter: Tissue Value: Closed Flower vs. Whole Plant
  misc_feature: MA Experiment ID: 20000286 Result: Down-regulated in Transcription
  misc_feature: MA Experiment 20000286 PARAMETER Experiment Name: At_Open_Flower_P Parameter: Age (day) Value: 21
  misc_feature: MA Experiment 20000286 PARAMETER Experiment Name: At_Open_Flower_P Parameter: Plant Line Value: WS
  misc_feature: MA Experiment 20000286 PARAMETER Experiment Name: At_Open_Flower_P Parameter: Tissue Value: Half Open vs. Whole Plant
  misc_feature: MA Experiment ID: 20000437 Result: Up-regulated in Transcription
  misc_feature: MA Experiment 20000437 PARAMETER Experiment Name: At_Drought_P Parameter: Age (day) Value: 8
  misc_feature: MA Experiment 20000437 PARAMETER Experiment Name: At_Drought_P Parameter: Organism Value: A. thaliana
  misc_feature: MA Experiment 20000437 PARAMETER Experiment Name: At_Drought_P Parameter: Plant Line Value: WS
  misc_feature: MA Experiment 20000437 PARAMETER Experiment Name: At_Drought_P Parameter: Timepoint (hr) Value: 24
  misc_feature: MA Experiment 20000437 PARAMETER Experiment Name: At_Drought_P Parameter: Tissue Value: Whole Plant
  misc_feature: MA Experiment 20000437 PARAMETER Experiment Name: At_Drought_P Parameter: Treatment Value: Drought vs. No Drought
  misc_feature: MA Experiment ID: 20000438 Result: Down-regulated in Transcription
  misc_feature: MA Experiment 20000438 PARAMETER Experiment Name: At_Shoots__P Parameter: Age (day) Value: 14
  misc_feature: MA Experiment 20000438 PARAMETER Experiment Name: At_Shoots__P Parameter: Tissue Value: Shoots vs. Whole Plant
  misc_feature: MA Experiment ID: 20000439 Result: Down-regulated in Transcription
  misc_feature: MA Experiment 20000439 PARAMETER Experiment Name: At_Roots__P Parameter: Age (day) Value: 14 vs. 21
  misc_feature: MA Experiment 20000439 PARAMETER Experiment Name: At_Roots__P Parameter: Organism Value: A. thaliana
  misc_feature: MA Experiment 20000439 PARAMETER Experiment Name: At_Roots__P Parameter: Tissue Value: Roots vs. Whole Plant
  misc_feature: MA Experiment ID: 20000495 Result: Down-regulated in Transcription
  misc_feature: MA Experiment 20000495 PARAMETER Experiment Name: At_Guard_Cells_P Parameter: Harvest Date Value: 8/2/2002
  misc_feature: MA Experiment 20000495 PARAMETER Experiment Name: At_Guard_Cells_P Parameter: Organism Value: A. thaliana
  misc_feature: MA Experiment 20000495 PARAMETER Experiment Name: At_Guard_Cells_P Parameter: Tissue Value: Guard Cells vs. Leaves
  misc_feature: MA Experiment ID: 20000527 Result: Up-regulated in Transcription
  misc_feature: MA Experiment 20000527 PARAMETER Experiment Name: At_10percent_PEG_P Parameter: Age (day) Value: 20
  misc_feature: MA Experiment 20000527 PARAMETER Experiment Name: At_10percent_PEG_P Parameter: Organism Value: A. thaliana
  misc_feature: MA Experiment 20000527 PARAMETER Experiment Name: At_10percent_PEG_P Parameter: Plant Line Value: WS
  misc_feature: MA Experiment 20000527 PARAMETER Experiment Name: At_10percent_PEG_P Parameter: Timepoint (day) Value: 20
  misc_feature: MA Experiment 20000527 PARAMETER Experiment Name: At_10percent_PEG_P Parameter: Tissue Value: Whole Plant
  misc_feature: MA Experiment 20000527 PARAMETER Experiment Name: At_10percent_PEG_P Parameter: Treatment Value: 10percent PEG vs. No Treatment
  misc_feature: MA Experiment ID: 20000794 Result: Down-regulated in Transcription
  misc_feature: MA Experiment 20000794 PARAMETER Experiment Name: At_Petals_P Parameter: Age (day) Value: 23-25 days
  misc_feature: MA Experiment 20000794 PARAMETER Experiment Name: At_Petals_P Parameter: Plant Line Value: WS
  misc_feature: MA Experiment 20000794 PARAMETER Experiment Name: At_Petals_P Parameter: Tissue Value: Petals vs. Whole plant
  misc_feature: MA Experiment ID: 20001247 Result: Up-regulated in Transcription
  misc_feature: MA Experiment 20001247 PARAMETER Experiment Name: At_Far-red-induction_P Parameter: Age (day) Value: 7
  misc_feature: MA Experiment 20001247 PARAMETER Experiment Name: At_Far-red-induction_P Parameter: Light Value: Far-red vs. White
  misc_feature: MA Experiment 20001247 PARAMETER Experiment Name: At_Far-red-induction_P Parameter: Organism Value: A. thaliana
  misc_feature: MA Experiment 20001247 PARAMETER Experiment Name: At_Far-red-induction_P Parameter: Plant Line Value: Columbia
  misc_feature: MA Experiment 20001247 PARAMETER Experiment Name: At_Far-red-induction_P Parameter: Timepoint (hr) Value: 1
  misc_feature: MA Experiment 20001247 PARAMETER Experiment Name: At_Far-red-induction_P Parameter: Tissue Value: Whole Plant
  misc_feature: MA Experiment ID: 20001248 Result: Up-regulated in Transcription
  misc_feature: MA Experiment 20001248 PARAMETER Experiment Name: At_Far-red-induction_P Parameter: Age (day) Value: 7
  misc_feature: MA Experiment 20001248 PARAMETER Experiment Name: At_Far-red-induction_P Parameter: Light Value: Far-red vs. White
  misc_feature: MA Experiment 20001248 PARAMETER Experiment Name: At_Far-red-induction_P Parameter: Organism Value: A. thaliana
  misc_feature: MA Experiment 20001248 PARAMETER Experiment Name: At_Far-red-induction_P Parameter: Plant Line Value: Columbia
  misc_feature: MA Experiment 20001248 PARAMETER Experiment Name: At_Far-red-induction_P Parameter: Timepoint (hr) Value: 4
  misc_feature: MA Experiment 20001248 PARAMETER Experiment Name: At_Far-red-induction_P Parameter: Tissue Value: Whole Plant
  misc_feature: MA Experiment ID: 20001450 Result: Up-regulated in Transcription
  misc_feature: MA Experiment 20001450 PARAMETER Experiment Name: At_Far-red-induction_P Parameter: Age (day) Value: 7
  misc_feature: MA Experiment 20001450 PARAMETER Experiment Name: At_Far-red-induction_P Parameter: Light Value: Far-red vs. White
  misc_feature: MA Experiment 20001450 PARAMETER Experiment Name: At_Far-red-induction_P Parameter: Organism Value: A. thaliana
  misc_feature: MA Experiment 20001450 PARAMETER Experiment Name: At_Far-red-induction_P Parameter: Plant Line Value: Columbia
  misc_feature: MA Experiment 20001450 PARAMETER Experiment Name: At_Far-red-induction_P Parameter: Timepoint (hr) Value: 8
  misc_feature: MA Experiment 20001450 PARAMETER Experiment Name: At_Far-red-induction_P Parameter: Tissue Value: Whole Plant
  misc_feature: MA Experiment ID: 20001557 Result: Up-regulated in Transcription
  misc_feature: MA Experiment 20001557 PARAMETER Experiment Name: At_Drought_Soil_Dry_P Parameter: Age (day) Value: 27
  misc_feature: MA Experiment 20001557 PARAMETER Experiment Name: At_Drought_Soil_Dry_P Parameter: Organism Value: A. thaliana
  misc_feature: MA Experiment 20001557 PARAMETER Experiment Name: At_Drought_Soil_Dry_P Parameter: Plant Line Value: WS
  misc_feature: MA Experiment 20001557 PARAMETER Experiment Name: At_Drought_Soil_Dry_P Parameter: Post Timepoint (hr) Value: 3
  misc_feature: MA Experiment 20001557 PARAMETER Experiment Name: At_Drought_Soil_Dry_P Parameter: Post-Treatment Value: Re-Water vs. No Drought
  misc_feature: MA Experiment 20001557 PARAMETER Experiment Name: At_Drought_Soil_Dry_P Parameter: Timepoint (day) Value: 13
  misc_feature: MA Experiment 20001557 PARAMETER Experiment Name: At_Drought_Soil_Dry_P Parameter: Treatment Value: Drought vs. No Drought
  misc_feature: MA Experiment ID: 20001559 Result: Up-regulated in Transcription
  misc_feature: MA Experiment 20001559 PARAMETER Experiment Name: At_Drought_Soil_Dry_P Parameter: Age (day) Value: 28
  misc_feature: MA Experiment 20001559 PARAMETER Experiment Name: At_Drought_Soil_Dry_P Parameter: Organism Value: A. thaliana
  misc_feature: MA Experiment 20001559 PARAMETER Experiment Name: At_Drought_Soil_Dry_P Parameter: Plant Line Value: WS
  misc_feature: MA Experiment 20001559 PARAMETER Experiment Name: At_Drought_Soil_Dry_P Parameter: Post Timepoint (hr) Value: 29
  misc_feature: MA Experiment 20001559 PARAMETER Experiment Name: At_Drought_Soil_Dry_P Parameter: Post-Treatment Value: Re-Water vs. No Drought
  misc_feature: MA Experiment 20001559 PARAMETER Experiment Name: At_Drought_Soil_Dry_P Parameter: Timepoint (day) Value: 14
  misc_feature: MA Experiment 20001559 PARAMETER Experiment Name: At_Drought_Soil_Dry_P Parameter: Treatment Value: Drought vs. No Drought
aaaaattcaattccccacgtctgtcttatccacaataaaaccgaccttagcttagcttagactcattactcatttcacaaaaacagagagagaaatagagagacatactttacaggcaaacgatcgttcaccagctcagtttgttaggctggataaaccgagagccgtagacgatctctatataggcaagagagaaaagatgcgtaggtggttgtgctgtgcttgccacgttgaagaaccttaccattcttctgaaaatgaacacctcagaagccctaagcaccacaatgattttgggcatcacactagaaaaccacaggcggctgtgaagcctgatgctttgaaggagcctccatctattgatgtgcctgcattgtcattggatgagttgaaagaaaagaccgataactttggatcaaagtcattgattggtgaaggatcttacggcagagcctattatgcaaccttgaaagatggaaaggctgtcgcggtgaagaagcttgacaatgcagcggaacctgaatcaaatgttgagttcttgactcaggtctctagggtttccaagctgaagcacgataattttgttgagctcttcggttattgtgttgaagggaatttccgcattcttgcgtatgagtttgctactatgggatctttacatgacatcttacacgggaggaaaggagtccaaggagcacaaccaggtcctacgcttgactggatccaacgggtcagaatagcagttgatgcagctagaggacttgagtatttgcatgagaaagttcaacctgcagtaatacacagagatattcgatctagcaatgtgcttctctttgaagattttaaagccaagatcgctgattttaatctatcgaaccaatctcctgatatggctgctcgtcttcattctaccagagttttgggaaccttcggttaccacgcaccagagtatgcgatgactggtcaactgacacagaagagtgatgtttatagttttggtgtggtgcttttggagctcttgactggtaggaaacccgtcgatcatacgatgcctcgtggtcaacaaagtcttgttacttgggctactccaaggctaagtgaagacaaagtgaagcaatgtgttgatccaaaactaaagggagaatatcctcctaaagctgttgcaaagctcgctgcagtagcagcattgtgtgtgcaatatgaatcagagtttaggccaaacatgagcattgtggtaaaagctcttcaaccattgttgaggtcatcaacagcagcagctgtaccagtccaggaagcctgattcttctgtgcaatagcaacaatggaagattgggttcggtttcagttgttgccataccgtataaatgtgttcttaaagagagtctttttgtcgaggcttttcttcagttgggatgtatatgttttattaaggtgatgagtagtgatttggtgtgtcttttcaaatgctttgtggagtctgtttttccttataaaaatttattctaaatctggttt

SEQ ID NO: 77587 - protein, 366 aa, Arabidopsis thaliana
  peptide (1)..(366): Ceres Seq. ID no. 12576893
  misc_feature (1)..(366): Homolog of NCBI NO: 11259776 NR Description: protein kinase-like protein - Arabidopsis thaliana
  misc_feature (1)..(366): Homolog of NCBI NO: 30694970 NR Description: serine/threonine protein kinase, putative
  misc_feature (1)..(366): Homolog of NCBI NO: 30694972 NR Description: serine/threonine protein kinase, putative
  misc_feature (1)..(365): Homolog of NCBI NO: 18406188 NR Description: putative protein kinase; protein id: At2g43230.1, by cDNA: gi_15450905 [Arabidopsis thaliana] putative protein kinase [Arabidopsis thaliana]
  misc_feature (1)..(365): Homolog of NCBI NO: 25287594 NR Description: probable protein kinase [imported] - Arabidopsis
MRRWLCCACHVEEPYHSSENEHLRSPKHHNDFGHHTRKPQAAVKPDALKEPPSIDVPALSLDELKEKTDNFGSKSLIGEGSYGRAYYATLKDGKAVAVKKLDNAAEPESNVEFLTQVSRVSKLKHDNFVELFGYCVEGNFRILAYEFATMGSLHDILHGRKGVQGAQPGPTLDWIQRVRIAVDAARGLEYLHEKVQPAVIHRDIRSSNVLLFEDFKAKIADFNLSNQSPDMAARLHSTRVLGTFGYHAPEYAMTGQLTQKSDVYSFGVVLLELLTGRKPVDHTMPRGQQSLVTWATPRLSEDKVKQCVDPKLKGEYPPKAVAKLAAVAALCVQYESEFRPNMSIVVKALQPLLRSSTAAAVPVQEA

SEQ ID NO: 77588 - protein, 217 aa, Arabidopsis thaliana; identical to SEQ ID NO: 22807
  peptide (1)..(217): Ceres Seq. ID no. 12576894
  misc_feature (1)..(217): Homolog of NCBI NO: 11259776 NR Description: protein kinase-like protein - Arabidopsis thaliana
  misc_feature (1)..(217): Homolog of NCBI NO: 30694970 NR Description: serine/threonine protein kinase, putative
  misc_feature (1)..(217): Homolog of NCBI NO: 30694972 NR Description: serine/threonine protein kinase, putative
  misc_feature (1)..(216): Homolog of NCBI NO: 18406188 NR Description: putative protein kinase; protein id: At2g43230.1, by cDNA: gi_15450905 [Arabidopsis thaliana] putative protein kinase [Arabidopsis thaliana]
  misc_feature (1)..(216): Homolog of NCBI NO: 25287594 NR Description: probable protein kinase [imported] - Arabidopsis

SEQ ID NO: 77589 - DNA, 1721 bp, Arabidopsis thaliana
  misc_feature (1)..(1721): Ceres Seq. ID no. 12576899
  misc_feature: MA Experiment ID: 20000171 Result: Down-regulated in Transcription
  misc_feature: MA Experiment 20000171 PARAMETER Experiment Name: At_42deg_Heat_P Parameter: Age (day) Value: 14
  misc_feature: MA Experiment 20000171 PARAMETER Experiment Name: At_42deg_Heat_P Parameter: Organism Value: A. thaliana
  misc_feature: MA Experiment 20000171 PARAMETER Experiment Name: At_42deg_Heat_P Parameter: Plant Line Value: WS
  misc_feature: MA Experiment 20000171 PARAMETER Experiment Name: At_42deg_Heat_P Parameter: Temperature (deg C) Value: 42 vs. 22
  misc_feature: MA Experiment 20000171 PARAMETER Experiment Name: At_42deg_Heat_P Parameter: Timepoint (hr) Value: 1
  misc_feature: MA Experiment 20000171 PARAMETER Experiment Name: At_42deg_Heat_P Parameter: Tissue Value: Aerial
  misc_feature: MA Experiment ID: 20000173 Result: Down-regulated in Transcription
  misc_feature: MA Experiment 20000173 PARAMETER Experiment Name: At_42deg_Heat_P Parameter: Age (day) Value: 14
  misc_feature: MA Experiment 20000173 PARAMETER Experiment Name: At_42deg_Heat_P Parameter: Organism Value: A. thaliana
  misc_feature: MA Experiment 20000173 PARAMETER Experiment Name: At_42deg_Heat_P Parameter: Plant Line Value: WS
  misc_feature: MA Experiment 20000173 PARAMETER Experiment Name: At_42deg_Heat_P Parameter: Temperature (deg C) Value: 42 vs. 22
  misc_feature: MA Experiment 20000173 PARAMETER Experiment Name: At_42deg_Heat_P Parameter: Timepoint (hr) Value: 6
  misc_feature: MA Experiment 20000173 PARAMETER Experiment Name: At_42deg_Heat_P Parameter: Tissue Value: Aerial
  misc_feature: MA Experiment ID: 20000213 Result: Down-regulated in Transcription
  misc_feature: MA Experiment 20000213 PARAMETER Experiment Name: At_4deg_Cold_P Parameter: Timepoint (hr) Value: 2
  misc_feature: MA Experiment ID: 20000214 Result: Down-regulated in Transcription
  misc_feature: MA Experiment 20000214 PARAMETER Experiment Name: At_4deg_Cold_P Parameter: Timepoint (hr) Value: 6
  misc_feature: MA Experiment ID: 20000227 Result: Up-regulated in Transcription
  misc_feature: MA Experiment 20000227 PARAMETER Experiment Name: At_Root-Tips-vs-Tops_P Parameter: Tissue Value: Root Tips vs. Root Tops
  misc_feature: MA Experiment ID: 20000264 Result: Up-regulated in Transcription
  misc_feature: MA Experiment 20000264 PARAMETER Experiment Name: At_Open_Flower_P Parameter: Age (day) Value: 21
  misc_feature: MA Experiment 20000264 PARAMETER Experiment Name: At_Open_Flower_P Parameter: Plant Line Value: WS
  misc_feature: MA Experiment 20000264 PARAMETER Experiment Name: At_Open_Flower_P Parameter: Tissue Value: Open Flower vs. Whole Plant
  misc_feature: MA Experiment ID: 20000286 Result: Up-regulated in Transcription
  misc_feature: MA Experiment 20000286 PARAMETER Experiment Name: At_Open_Flower_P Parameter: Age (day) Value: 21
  misc_feature: MA Experiment 20000286 PARAMETER Experiment Name: At_Open_Flower_P Parameter: Plant Line Value: WS
  misc_feature: MA Experiment 20000286 PARAMETER Experiment Name: At_Open_Flower_P Parameter: Tissue Value: Half Open vs. Whole Plant
  misc_feature: MA Experiment ID: 20000496 Result: Up-regulated in Transcription
  misc_feature: MA Experiment 20000496 PARAMETER Experiment Name: At_Guard_Cells_P Parameter: Harvest Date Value: 7/19/2002
  misc_feature: MA Experiment 20000496 PARAMETER Experiment Name: At_Guard_Cells_P Parameter: Organism Value: Canola
  misc_feature: MA Experiment 20000496 PARAMETER Experiment Name: At_Guard_Cells_P Parameter: Tissue Value: Guard Cells vs. Leaves
  misc_feature: MA Experiment ID: 20000794 Result: Up-regulated in Transcription
  misc_feature: MA Experiment 20000794 PARAMETER Experiment Name: At_Petals_P Parameter: Age (day) Value: 23-25 days
  misc_feature: MA Experiment 20000794 PARAMETER Experiment Name: At_Petals_P Parameter: Plant Line Value: WS
  misc_feature: MA Experiment 20000794 PARAMETER Experiment Name: At_Petals_P Parameter: Tissue Value: Petals vs. Whole plant
  misc_feature: MA Experiment ID: 20001554 Result: Down-regulated in Transcription
  misc_feature: MA Experiment 20001554 PARAMETER Experiment Name: At_Drought_Soil_Dry_P Parameter: Age (day) Value: 21
  misc_feature: MA Experiment 20001554 PARAMETER Experiment Name: At_Drought_Soil_Dry_P Parameter: Organism Value: A. thaliana
  misc_feature: MA Experiment 20001554 PARAMETER Experiment Name: At_Drought_Soil_Dry_P Parameter: Plant Line Value: WS
  misc_feature: MA Experiment 20001554 PARAMETER Experiment Name: At_Drought_Soil_Dry_P Parameter: Post Timepoint (hr) Value: None
  misc_feature: MA Experiment 20001554 PARAMETER Experiment Name: At_Drought_Soil_Dry_P Parameter: Post-Treatment Value: None
  misc_feature: MA Experiment 20001554 PARAMETER Experiment Name: At_Drought_Soil_Dry_P Parameter: Timepoint (day) Value: 7
  misc_feature: MA Experiment 20001554 PARAMETER Experiment Name: At_Drought_Soil_Dry_P Parameter: Treatment Value: Drought vs. No Drought
  misc_feature: MA Experiment ID: 20001555 Result: Down-regulated in Transcription
  misc_feature: MA Experiment 20001555 PARAMETER Experiment Name: At_Drought_Soil_Dry_P Parameter: Age (day) Value: 24
  misc_feature: MA Experiment 20001555 PARAMETER Experiment Name: At_Drought_Soil_Dry_P Parameter: Organism Value: A. thaliana
  misc_feature: MA Experiment 20001555 PARAMETER Experiment Name: At_Drought_Soil_Dry_P Parameter: Plant Line Value: WS
  misc_feature: MA Experiment 20001555 PARAMETER Experiment Name: At_Drought_Soil_Dry_P Parameter: Post Timepoint (hr) Value: None
  misc_feature: MA Experiment 20001555 PARAMETER Experiment Name: At_Drought_Soil_Dry_P Parameter: Post-Treatment Value: None
  misc_feature: MA Experiment 20001555 PARAMETER Experiment Name: At_Drought_Soil_Dry_P Parameter: Timepoint (day) Value: 10
  misc_feature: MA Experiment 20001555 PARAMETER Experiment Name: At_Drought_Soil_Dry_P Parameter: Treatment Value: Drought vs. No Drought
  misc_feature: MA Experiment ID: 20001556 Result: Down-regulated in Transcription
  misc_feature: MA Experiment 20001556 PARAMETER Experiment Name: At_Drought_Soil_Dry_P Parameter: Age (day) Value: 26
  misc_feature: MA Experiment 20001556 PARAMETER Experiment Name: At_Drought_Soil_Dry_P Parameter: Organism Value: A. thaliana
  misc_feature: MA Experiment 20001556 PARAMETER Experiment Name: At_Drought_Soil_Dry_P Parameter: Plant Line Value: WS
  misc_feature: MA Experiment 20001556 PARAMETER Experiment Name: At_Drought_Soil_Dry_P Parameter: Post Timepoint (hr) Value: None
  misc_feature: MA Experiment 20001556 PARAMETER Experiment Name: At_Drought_Soil_Dry_P Parameter: Post-Treatment Value: None
  misc_feature: MA Experiment 20001556 PARAMETER Experiment Name: At_Drought_Soil_Dry_P Parameter: Timepoint (day) Value: 12
  misc_feature: MA Experiment 20001556 PARAMETER Experiment Name: At_Drought_Soil_Dry_P Parameter: Treatment Value: Drought vs. No Drought
  misc_feature: MA Experiment ID: 20001557 Result: Down-regulated in Transcription
  misc_feature: MA Experiment 20001557 PARAMETER Experiment Name: At_Drought_Soil_Dry_P Parameter: Age (day) Value: 27
  misc_feature: MA Experiment 20001557 PARAMETER Experiment Name: At_Drought_Soil_Dry_P Parameter: Organism Value: A. thaliana
  misc_feature: MA Experiment 20001557 PARAMETER Experiment Name: At_Drought_Soil_Dry_P Parameter: Plant Line Value: WS
  misc_feature: MA Experiment 20001557 PARAMETER Experiment Name: At_Drought_Soil_Dry_P Parameter: Post Timepoint (hr) Value: 3
  misc_feature: MA Experiment 20001557 PARAMETER Experiment Name: At_Drought_Soil_Dry_P Parameter: Post-Treatment Value: Re-Water vs. No Drought
  misc_feature: MA Experiment 20001557 PARAMETER Experiment Name: At_Drought_Soil_Dry_P Parameter: Timepoint (day) Value: 13
  misc_feature: MA Experiment 20001557 PARAMETER Experiment Name: At_Drought_Soil_Dry_P Parameter: Treatment Value: Drought vs. No Drought
  misc_feature: MA Experiment ID: 20001911 Result: Down-regulated in Transcription
  misc_feature: MA Experiment 20001911 PARAMETER Experiment Name: At_Drought_Reproduction_P Parameter: Age (day) Value: 40
  misc_feature: MA Experiment 20001911 PARAMETER Experiment Name: At_Drought_Reproduction_P Parameter: Organism Value: A. thaliana
  misc_feature: MA Experiment 20001911 PARAMETER Experiment Name: At_Drought_Reproduction_P Parameter: Plant Line Value: WS
  misc_feature: MA Experiment 20001911 PARAMETER Experiment Name: At_Drought_Reproduction_P Parameter: Timepoint (day) Value: 10
  misc_feature: MA Experiment 20001911 PARAMETER Experiment Name: At_Drought_Reproduction_P Parameter: Tissue Value: Flowers
  misc_feature: MA Experiment 20001911 PARAMETER Experiment Name: At_Drought_Reproduction_P Parameter: Treatment Value: Drought vs. No Drought
aaccaaagactctttaccatctctttctctctctgtttgaagacatagcacaaaaaaaaaaaaaaagacagagcaaaaaaacacacaaagatgggcataatgatgatgattttgggtcttcttgtgatcattgtttgtttatgtactgctcttctccgatggaaccagatgcgatattctaagaaaggtcttcctcctggaaccatgggctggccaatatttggtgaaacgactgagtttcttaaacaaggaccagatttcatgaaaaaccaaagactaagatatgggagtttcttcaagtctcacattcttggttgcccaacaatagtctcaatggacgcagagttaaacagatacattctaatgaatgaatcgaaaggacttgttgccggttacccgcaatctatgcttgatattctagggacatgcaacatagctgcggttcatggcccgagccaccggctaatgagaggctcgttgctttctttaataagcccaaccatgatgaaagaccatctcttgcctaagattgatgatttcatgagaaactatctttgtggttgggatgatcttgagacagttgatatccaagaaaagaccaaacatatggcatttttatcatcgttgttacaaatagctgagactttgaaaaaaccagaggttgaagaatatagaacagagtttttcaagcttgttgtgggaactctatcggtcccgatcgatatcccgggaacgaattaccgcagtggagtccaagcaagaaacaacatcgataggttattgacagaactgatgcaagaaagaaaagagtctggagaaactttcacagacatgttgggttacttgatgaagaaggaagataaccgatacttgttaaccgataaagagataagagatcaagtggtaacgatcttgtattccggttatgagactgtctctacaacctccatgatggctcttaagtatctccatgatcatccaaaagctcttgaagaactcagaagagaacatttggctataagggagagaaaacgacctgacgaaccgctcactctcgacgatattaaatcgatgaaattcactcgagctgtgatctttgagacatcaagattggcaacgattgttaatggtgtccttaggaaaactactcacgacttagaactcaacggttatttaatcccaaaaggttggagaatttacgtatacacaagagagattaactatgatacatctctttatgaagatccaatgatctttaacccatggagatggatggaaaagagcttagaatcaaagagctatttcttactctttggaggtggagttaggctttgccctggaaaggaactaggaatctcggaagtctcaagcttccttcactactttgttacaaaatatagatgggaagagaatggagaagacaaattaatggtctttccaagagtttctgcaccaaaaggataccatcttaagtgttcaccttactgactagttttgtcctaatattgaaaaatgtgtaaataaatctattaagggtcattttgtagggctaattaacctattttatctattaaatctctcaagatcatagaggagatggataatgtacagagagaaagagagaagaagaaaatggaatatagaaaaaaataaaatatttgaaatgttgagcttagtctcttatcttgtaaatttgtaacccataaatttttacatttcat

SEQ ID NO: 77590 - protein, 465 aa, Arabidopsis thaliana; identical to SEQ ID NO: 28631
  peptide (1)..(465): Ceres Seq. ID no. 12576900
  misc_feature (212)..(462): Pfam Name: Cytochrome P450 Pfam Description: Cytochrome P450
  misc_feature (1)..(465): Homolog of NCBI NO: 18406372 NR Description: cytochrome p450, putative; protein id: supported by cDNA: 11278., supported by cDNA: gi_15450574, by cDNA: gi_17380629 [Arabidopsis thaliana]
  misc_feature (1)..(465): Homolog of NCBI NO: 9294419 NR Description: cytochrome P450 [Arabidopsis thaliana]
  misc_feature (4)..(465): Homolog of NCBI NO: 21536828 NR Description: cytochrome P450 homolog, putative [Arabidopsis
  misc_feature (1)..(465): Homolog of NCBI NO: 30693327 NR Description: cytochrome p450, putative [Arabidopsis thaliana]
  misc_feature (1)..(406): Homolog of NCBI NO: 30693331 NR Description: cytochrome p450, putative [Arabidopsis thaliana]
  misc_feature (1)..(465): Homolog of NCBI NO: 5921933 NR Description: Cytochrome P450 85 (Dwarf protein)
  misc_feature (3)..(465): Homolog of NCBI NO: 27127269 NR Description: cytochrome P450 [Oryza sativa (japonica
  misc_feature (4)..(458): Homolog of NCBI NO: 9587211 NR Description: cytochrome P450 [Vigna radiata]
  misc_feature (5)..(458): Homolog of NCBI NO: 15239203 NR Description: cytochrome p450, putative; protein id: supported by cDNA: 36334., supported by cDNA: gi_14596098, by cDNA: gi_15450716, supported by cDNA: gi_17380617, supported
  misc_feature (1)..(464): Homolog of NCBI NO: 20520627 NR Description: putative cytochrome P450 [Oryza sativa (japonica

SEQ ID NO: 77591 - protein, 462 aa, Arabidopsis thaliana; identical to SEQ ID NO: 28632
  peptide (1)..(462): Ceres Seq. ID no. 12576901
  misc_feature (209)..(459): Pfam Name: Cytochrome P450 Pfam Description: Cytochrome P450
  misc_feature (1)..(462): Homolog of NCBI NO: 18406372 NR Description: cytochrome p450, putative; protein id: supported by cDNA: 11278., supported by cDNA: gi_15450574, by cDNA: gi_17380629 [Arabidopsis thaliana]
  misc_feature (1)..(462): Homolog of NCBI NO: 9294419 NR Description: cytochrome P450 [Arabidopsis thaliana]
  misc_feature (1)..(462): Homolog of NCBI NO: 21536828 NR Description: cytochrome P450 homolog, putative [Arabidopsis
  misc_feature (1)..(462): Homolog of NCBI NO: 30693327 NR Description: cytochrome p450, putative [Arabidopsis thaliana]
  misc_feature (1)..(403): Homolog of NCBI NO: 30693331 NR Description: cytochrome p450, putative [Arabidopsis thaliana]
  misc_feature (1)..(462): Homolog of NCBI NO: 5921933 NR Description: Cytochrome P450 85 (Dwarf protein)
  misc_feature (1)..(462): Homolog of NCBI NO: 27127269 NR Description: cytochrome P450 [Oryza sativa (japonica
  misc_feature (1)..(455): Homolog of NCBI NO: 9587211 NR Description: cytochrome P450 [Vigna radiata]
  misc_feature (2)..(455): Homolog of NCBI NO: 15239203 NR Description: cytochrome p450, putative; protein id: supported by cDNA: 36334., supported by cDNA: gi_14596098, by cDNA: gi_15450716, supported by cDNA: gi_17380617, supported
  misc_feature (1)..(461): Homolog of NCBI NO: 20520627 NR Description: putative cytochrome P450 [Oryza sativa (japonica

SEQ ID NO: 77592 - protein, 461 aa, Arabidopsis thaliana; identical to SEQ ID NO: 28633
  peptide (1)..(461): Ceres Seq. ID no. 12576902
  misc_feature (208)..(458): Pfam Name: Cytochrome P450 Pfam Description: Cytochrome P450
  misc_feature (1)..(461): Homolog of NCBI NO: 18406372 NR Description: cytochrome p450, putative; protein id: supported by cDNA: 11278., supported by cDNA: gi_15450574, by cDNA: gi_17380629 [Arabidopsis thaliana]
  misc_feature (1)..(461): Homolog of NCBI NO: 9294419 NR Description: cytochrome P450 [Arabidopsis thaliana]
  misc_feature (1)..(461): Homolog of NCBI NO: 21536828 NR Description: cytochrome P450 homolog, putative [Arabidopsis
  misc_feature (1)..(461): Homolog of NCBI NO: 30693327 NR Description: cytochrome p450, putative [Arabidopsis thaliana]
  misc_feature (1)..(402): Homolog of NCBI NO: 30693331 NR Description: cytochrome p450, putative [Arabidopsis thaliana]
  misc_feature (1)..(461): Homolog of NCBI NO: 5921933 NR Description: Cytochrome P450 85 (Dwarf protein)
  misc_feature (1)..(461): Homolog of NCBI NO: 27127269 NR Description: cytochrome P450 [Oryza sativa (japonica
  misc_feature (1)..(454): Homolog of NCBI NO: 9587211 NR Description: cytochrome P450 [Vigna radiata]
  misc_feature (1)..(454): Homolog of NCBI NO: 15239203 NR Description: cytochrome p450, putative; protein id: supported by cDNA: 36334., supported by cDNA: gi_14596098, by cDNA: gi_15450716, supported by cDNA: gi_17380617, supported
  misc_feature (1)..(460): Homolog of NCBI NO: 20520627 NR Description: putative cytochrome P450 [Oryza sativa (japonica

SEQ ID NO: 77593 - DNA, 833 bp, Arabidopsis thaliana
  misc_feature (1)..(833): Ceres Seq. ID no. 12576917
  misc_feature: MA Experiment ID: 108433 Result: Up-regulated in Transcription
  misc_feature: MA Experiment 108433 PARAMETER Experiment Name: At_rhl_Mutant2_cDNA_P Parameter: Age (day) Value: 7
  misc_feature: MA Experiment 108433 PARAMETER Experiment Name: At_rhl_Mutant2_cDNA_P Parameter: Organism Value: A. thaliana
  misc_feature: MA Experiment 108433 PARAMETER Experiment Name: At_rhl_Mutant2_cDNA_P Parameter: Plant Line Value: rhl Mutant vs. wt landsburg
  misc_feature: MA Experiment 108433 PARAMETER Experiment Name: At_rhl_Mutant2_cDNA_P Parameter: Tissue Value: Roots
  misc_feature: MA Experiment ID: 108434 Result: Down-regulated in Transcription
  misc_feature: MA Experiment 108434 PARAMETER Experiment Name: At_Root_Tips_cDNA_P Parameter: Tissue Value: Root Tips
  misc_feature: MA Experiment ID: 108461 Result: Down-regulated in Transcription
  misc_feature: MA Experiment 108461 PARAMETER Experiment Name: At_Germinating_Seeds_cDNA_P Parameter: Age (day) Value: 1 vs. 0
  misc_feature: MA Experiment 108461 PARAMETER Experiment Name: At_Germinating_Seeds_cDNA_P Parameter: Tissue Value: Germinating Seeds
  misc_feature: MA Experiment ID: 108585 Result: Up-regulated in Transcription
  misc_feature: MA Experiment 108585 PARAMETER Experiment Name: At_5mM_NaNP_cDNA_P Parameter: Timepoint (hr) Value: 6
  misc_feature: MA Experiment 108585 PARAMETER Experiment Name: At_5mM_NaNP_cDNA_P Parameter: Tissue Value: Aerial
  misc_feature: MA Experiment 108585 PARAMETER Experiment Name: At_5mM_NaNP_cDNA_P Parameter: Treatment Value: null
  misc_feature: MA Experiment ID: 108595 Result: Down-regulated in Transcription
  misc_feature: MA Experiment 108595 PARAMETER Experiment Name: At_Ler-pi_Ovule_cDNA_P Parameter: Plant Line Value: null
  misc_feature: MA Experiment ID: 108605 Result: Up-regulated in Transcription
  misc_feature: MA Experiment 108605 PARAMETER Experiment Name: At_100uM_ABA_cDNA_P Parameter: Timepoint (hr) Value: 6
  misc_feature: MA Experiment 108605 PARAMETER Experiment Name: At_100uM_ABA_cDNA_P Parameter: Tissue Value: Aerial
  misc_feature: MA Experiment 108605 PARAMETER Experiment Name: At_100uM_ABA_cDNA_P Parameter: Treatment Value: 100uM ABA vs. No Treatment
  misc_feature: MA Experiment ID: 108607 Result: Up-regulated in Transcription
  misc_feature: MA Experiment 108607 PARAMETER Experiment Name: At_100uM_ABA_cDNA_P Parameter: Timepoint (hr) Value: 4
  misc_feature: MA Experiment 108607 PARAMETER Experiment Name: At_100uM_ABA_cDNA_P Parameter: Tissue Value: Aerial
  misc_feature: MA Experiment 108607 PARAMETER Experiment Name: At_100uM_ABA_cDNA_P Parameter: Treatment Value: 100uM ABA vs. No Treatment
  misc_feature: MA Experiment ID: 108609 Result: Up-regulated in Transcription
  misc_feature: MA Experiment 108609 PARAMETER Experiment Name: At_100uM_ABA_cDNA_P Parameter: Timepoint (hr) Value: 24
  misc_feature: MA Experiment 108609 PARAMETER Experiment Name: At_100uM_ABA_cDNA_P Parameter: Tissue Value: Aerial
  misc_feature: MA Experiment 108609 PARAMETER Experiment Name: At_100uM_ABA_cDNA_P Parameter: Treatment Value: 100uM ABA vs. No Treatment
  misc_feature: MA Experiment ID: 108667 Result: Up-regulated in Transcription
  misc_feature: MA Experiment 108667 PARAMETER Experiment Name: At_2mM_SA_cDNA_P Parameter: Plant Line Value: WS
  misc_feature: MA Experiment 108667 PARAMETER Experiment Name: At_2mM_SA_cDNA_P Parameter: Timepoint (hr) Value: 1
  misc_feature: MA Experiment 108667 PARAMETER Experiment Name: At_2mM_SA_cDNA_P Parameter: Treatment Value: 2mM SA vs. No Treatment
  misc_feature: MA Experiment ID: 108668 Result: Up-regulated in Transcription
  misc_feature: MA Experiment 108668 PARAMETER Experiment Name: At_2mM_SA_cDNA_P Parameter: Plant Line Value: WS
  misc_feature: MA Experiment 108668 PARAMETER Experiment Name: At_2mM_SA_cDNA_P Parameter: Timepoint (hr) Value: 6
  misc_feature: MA Experiment 108668 PARAMETER Experiment Name: At_2mM_SA_cDNA_P Parameter: Treatment Value: 2mM SA vs. No Treatment
  misc_feature: MA Experiment ID: 20000069 Result: Up-regulated in Transcription
  misc_feature: MA Experiment 20000069 PARAMETER Experiment Name: At_100uM_ABA_Mutants_cDNA_P Parameter: Plant Line Value: CS23
  misc_feature: MA Experiment 20000069 PARAMETER Experiment Name: At_100uM_ABA_Mutants_cDNA_P Parameter: Timepoint (hr) Value: 6
  misc_feature: MA Experiment 20000069 PARAMETER Experiment Name: At_100uM_ABA_Mutants_cDNA_P Parameter: Tissue Value: Aerial
  misc_feature: MA Experiment 20000069 PARAMETER Experiment Name: At_100uM_ABA_Mutants_cDNA_P Parameter: Treatment Value: 100uM ABA vs. No Treatment
  misc_feature: MA Experiment ID: 20000070 Result: Up-regulated in Transcription
  misc_feature: MA Experiment 20000070 PARAMETER Experiment Name: At_100uM_ABA_Mutants_cDNA_P Parameter: Plant Line Value: CS24
  misc_feature: MA Experiment 20000070 PARAMETER Experiment Name: At_100uM_ABA_Mutants_cDNA_P Parameter: Timepoint (hr) Value: 6
  misc_feature: MA Experiment 20000070 PARAMETER Experiment Name: At_100uM_ABA_Mutants_cDNA_P Parameter: Tissue Value: Aerial
  misc_feature: MA Experiment 20000070 PARAMETER Experiment Name: At_100uM_ABA_Mutants_cDNA_P Parameter: Treatment Value: 100uM ABA vs. No Treatment
  misc_feature: MA Experiment ID: 20000071 Result: Up-regulated in Transcription
  misc_feature: MA Experiment 20000071 PARAMETER Experiment Name: At_100uM_ABA_Mutants_cDNA_P Parameter: Plant Line Value: CS8104
  misc_feature: MA Experiment 20000071 PARAMETER Experiment Name: At_100uM_ABA_Mutants_cDNA_P Parameter: Timepoint (hr) Value: 6
  misc_feature: MA Experiment 20000071 PARAMETER Experiment Name: At_100uM_ABA_Mutants_cDNA_P Parameter: Tissue Value: Aerial
  misc_feature: MA Experiment 20000071 PARAMETER Experiment Name: At_100uM_ABA_Mutants_cDNA_P Parameter: Treatment Value: 100uM ABA vs. No Treatment
  misc_feature: MA Experiment ID: 20000086 Result: Up-regulated in Transcription
  misc_feature: MA Experiment 20000086 PARAMETER Experiment Name: At_100uM_ABA_Mutants_cDNA_P Parameter: Plant Line Value: CS22
  misc_feature: MA Experiment 20000086 PARAMETER Experiment Name: At_100uM_ABA_Mutants_cDNA_P Parameter: Timepoint (hr) Value: 6
  misc_feature: MA Experiment 20000086 PARAMETER Experiment Name: At_100uM_ABA_Mutants_cDNA_P Parameter: Tissue Value: Aerial
  misc_feature: MA Experiment 20000086 PARAMETER Experiment Name: At_100uM_ABA_Mutants_cDNA_P Parameter: Treatment Value: 100uM ABA vs. No Treatment
  misc_feature: MA Experiment ID: 20000087 Result: Up-regulated in Transcription
  misc_feature: MA Experiment 20000087 PARAMETER Experiment Name: At_100uM_ABA_Mutants_cDNA_P Parameter: Plant Line Value: WS
  misc_feature: MA Experiment 20000087 PARAMETER Experiment Name: At_100uM_ABA_Mutants_cDNA_P Parameter: Timepoint (hr) Value: 6
  misc_feature: MA Experiment 20000087 PARAMETER Experiment Name: At_100uM_ABA_Mutants_cDNA_P Parameter: Tissue Value: Aerial
  misc_feature: MA Experiment 20000087 PARAMETER Experiment Name: At_100uM_ABA_Mutants_cDNA_P Parameter: Treatment Value: 100uM ABA vs. No Treatment
  misc_feature: MA Experiment ID: 20000088 Result: Up-regulated in Transcription
  misc_feature: MA Experiment 20000088 PARAMETER Experiment Name: At_100uM_ABA_Mutants_cDNA_P Parameter: Plant Line Value: Landsberg
  misc_feature: MA Experiment 20000088 PARAMETER Experiment Name: At_100uM_ABA_Mutants_cDNA_P Parameter: Timepoint (hr) Value: 6
  misc_feature: MA Experiment 20000088 PARAMETER Experiment Name: At_100uM_ABA_Mutants_cDNA_P Parameter: Tissue Value: Aerial
  misc_feature: MA Experiment 20000088 PARAMETER Experiment Name: At_100uM_ABA_Mutants_cDNA_P Parameter: Treatment Value: 100uM ABA vs. No Treatment
  misc_feature: MA Experiment ID: 20000089 Result: Up-regulated in Transcription
  misc_feature: MA Experiment ID: 20000090 Result: Up-regulated in Transcription
  misc_feature: MA Experiment ID: 20000117 Result: Up-regulated in Transcription
  misc_feature: MA Experiment 20000117 PARAMETER Experiment Name: At_100uM_ABA_Mutants_cDNA_P Parameter: Plant Line Value: Columbia
  misc_feature: MA Experiment 20000117 PARAMETER Experiment Name: At_100uM_ABA_Mutants_cDNA_P Parameter: Timepoint (hr) Value: 6
  misc_feature: MA Experiment 20000117 PARAMETER Experiment Name: At_100uM_ABA_Mutants_cDNA_P Parameter: Tissue Value: Aerial
  misc_feature: MA Experiment 20000117 PARAMETER Experiment Name: At_100uM_ABA_Mutants_cDNA_P Parameter: Treatment Value: 100uM ABA vs. No Treatment
  misc_feature: MA Experiment ID: 20000182 Result: Up-regulated in Transcription
  misc_feature: MA Experiment 20000182 PARAMETER Experiment Name: At_2mM_SA_P Parameter: Age (day) Value: 14
  misc_feature: MA Experiment 20000182 PARAMETER Experiment Name: At_2mM_SA_P Parameter: Organism Value: A. thaliana
  misc_feature: MA Experiment 20000182 PARAMETER Experiment Name: At_2mM_SA_P Parameter: Plant Line Value: WS
  misc_feature: MA Experiment 20000182 PARAMETER Experiment Name: At_2mM_SA_P Parameter: Timepoint (hr) Value: 6
  misc_feature: MA Experiment 20000182 PARAMETER Experiment Name: At_2mM_SA_P Parameter: Tissue Value: Aerial
  misc_feature: MA Experiment 20000182 PARAMETER Experiment Name: At_2mM_SA_P Parameter: Treatment Value: 2mM SA vs. No Treatment
  misc_feature: MA Experiment ID: 20000185 Result: Up-regulated in Transcription
  misc_feature: MA Experiment 20000185 PARAMETER Experiment Name: At_Roots__P Parameter: Age (day) Value: 7 vs. 21
  misc_feature: MA Experiment 20000185 PARAMETER Experiment Name: At_Roots__P Parameter: Organism Value: A. thaliana
  misc_feature: MA Experiment 20000185 PARAMETER Experiment Name: At_Roots__P Parameter: Tissue Value: Roots vs. Whole Plant
  misc_feature: MA Experiment ID: 20000451 Result: Down-regulated in Transcription
  misc_feature: MA Experiment 20000451 PARAMETER Experiment Name: At_CS6879_Shoots-Roots_P Parameter: Age (day) Value: 14
  misc_feature: MA Experiment 20000451 PARAMETER Experiment Name: At_CS6879_Shoots-Roots_P Parameter: Organism Value: A. thaliana
  misc_feature: MA Experiment 20000451 PARAMETER Experiment Name: At_CS6879_Shoots-Roots_P Parameter: Plant Line Value: CS6879 vs. WS
  misc_feature: MA Experiment 20000451 PARAMETER Experiment Name: At_CS6879_Shoots-Roots_P Parameter: Tissue Value: Roots
acaacaatcgctggactctgctactgcgaagaacaacaaattccttgtttatcatggcgaattccggcgaagagaagttgaagctctactcttactggagaagctcgtgtgctcatcgtgtccgtatcgccctcgctttgaaagggcttgattatgagtatataccagtgaatttgctcaagggtgatcaattcgattcagatttcaagaagatcaatccaatgggaactgtaccagctctggtggatggagatgttgtgattaatgattcttttgcgataataatgtatctggatgagaagtaccctgagccacctttgttacctcgtgacctccataaacgagctgtgaattaccaggcaatgagtattgtcttgtctggcatacagcctcatcaaaatctggctgttattaggtatatcgaggaaaagataaatgtggaggagaagactgcctgggttaataatgctatcacaaaaggatttacagctctcgagaaactgttggtgaattgcgctgggaaacatgcgactggtgatgaaatttacctggctgatctctttctagcaccacagatccacggagcaatcaacagattccagattaacatggaaccgtacccaactcttgcaaaatgttacgaatcatacaacgaactgcctgcgtttcaaaatgcactaccggaaaagcagccagatgctccttcttccaccatctgattctgtgaacccataagctactctcactttaataaaacctcagacaacaacaacaacaacaatgataataataataccttgtactcatacatgtatcatataaaccagttacgt

SEQ ID NO: 77594 - protein, 238 aa, Arabidopsis thaliana
  peptide (1)..(238): Ceres Seq. ID no. 12576918
  misc_feature (18)..(238): Homolog of NCBI NO: 15226952 NR Description: glutathione transferase, putative; protein id: supported by cDNA: gi_11095997, supported by cDNA: gi_15450462, by cDNA: gi_16974448 [Arabidopsis thaliana]
  misc_feature (18)..(238): Homolog of NCBI NO: 30677995 NR Description: glutathione transferase, putative [Arabidopsis
  misc_feature (18)..(237): Homolog of NCBI NO: 28932698 NR Description: glutathione S-transferase zeta [Brassica napus]
  misc_feature (18)..(237): Homolog of NCBI NO: 28932694 NR Description: glutathione S-transferase zeta [Brassica napus]
  misc_feature (23)..(236): Homolog of NCBI NO: 15226949 NR Description: glutathione transferase, putative; protein id:
  misc_feature (18)..(236): Homolog of NCBI NO: 29420155 NR Description: glutathione S-transferase Z1 [Malva pusilla]
  misc_feature (25)..(237): Homolog of NCBI NO: 11132235 NR Description: Glutathione S-transferase zeta class
  misc_feature (18)..(235): Homolog of NCBI NO: 24061762 NR Description: glutathione S-transferase [Capsicum annuum]
NNRWTLLLRRTTNSLFIMANSGEEKLKLYSYWRSSCAHRVRIALALKGLDYEYIPVNLLKGDQFDSDFKKINPMGTVPALVDGDVVINDSFAIIMYLDEKYPEPPLLPRDLHKRAVNYQAMSIVLSGIQPHQNLAVIRYIEEKINVEEKTAWVNNAITKGFTALEKLLVNCAGKHATGDEIYLADLFLAPQIHGAINRFQINMEPYPTLAKCYESYNELPAFQNALPEKQPDAPSSTI

SEQ ID NO: 77595 - protein, 221 aa, Arabidopsis thaliana
  peptide (1)..(221): Ceres Seq. ID no. 12576919
  misc_feature (1)..(221): Homolog of NCBI NO: 15226952 NR Description: glutathione transferase, putative; protein id: supported by cDNA: gi_11095997, supported by cDNA: gi_15450462, by cDNA: gi_16974448 [Arabidopsis thaliana]
  misc_feature (1)..(221): Homolog of NCBI NO: 30677995 NR Description: glutathione transferase, putative [Arabidopsis
  misc_feature (1)..(220): Homolog of NCBI NO: 28932698 NR Description: glutathione S-transferase zeta [Brassica napus]
  misc_feature (1)..(220): Homolog of NCBI NO: 28932694 NR Description: glutathione S-transferase zeta [Brassica napus]
  misc_feature (6)..(219): Homolog of NCBI NO: 15226949 NR Description: glutathione transferase, putative; protein id:
  misc_feature (1)..(219): Homolog of NCBI NO: 29420155 NR Description: glutathione S-transferase Z1 [Malva pusilla]
  misc_feature (8)..(220): Homolog of NCBI NO: 11132235 NR Description: Glutathione S-transferase zeta class
  misc_feature (1)..(218): Homolog of NCBI NO: 24061762 NR Description: glutathione S-transferase [Capsicum annuum]
MANSGEEKLKLYSYWRSSCAHRVRIALALKGLDYEYIPVNLLKGDQFDSDFKKINPMGTVPALVDGDVVINDSFAIIMYLDEKYPEPPLLPRDLHKRAVNYQAMSIVLSGIQPHQNLAVIRYIEEKINVEEKTAWVNNAITKGFTALEKLLVNCAGKHATGDEIYLADLFLAPQIHGAINRFQINMEPYPTLAKCYESYNELPAFQNALPEKQPDAPSSTI

SEQ ID NO: 77596 - protein, 165 aa, Arabidopsis thaliana
  peptide (1)..(165): Ceres Seq. ID no. 12576920
  misc_feature (1)..(165): Homolog of NCBI NO: 15226952 NR Description: glutathione transferase, putative; protein id: supported by cDNA: gi_11095997, supported by cDNA: gi_15450462, by cDNA: gi_16974448 [Arabidopsis thaliana]
  misc_feature (1)..(165): Homolog of NCBI NO: 30677995 NR Description: glutathione transferase, putative [Arabidopsis
  misc_feature (1)..(164): Homolog of NCBI NO: 28932698 NR Description: glutathione S-transferase zeta [Brassica napus]
  misc_feature (1)..(164): Homolog of NCBI NO: 28932694 NR Description: glutathione S-transferase zeta [Brassica napus]
  misc_feature (1)..(163): Homolog of NCBI NO: 15226949 NR Description: glutathione transferase, putative; protein id:
  misc_feature (1)..(163): Homolog of NCBI NO: 29420155 NR Description: glutathione S-transferase Z1 [Malva pusilla]
  misc_feature (1)..(164): Homolog of NCBI NO: 11132235 NR Description: Glutathione S-transferase zeta class
  misc_feature (1)..(162): Homolog of NCBI NO: 24061762 NR Description: glutathione S-transferase [Capsicum annuum]
MGTVPALVDGDVVINDSFAIIMYLDEKYPEPPLLPRDLHKRAVNYQAMSIVLSGIQPHQNLAVIRYIEEKINVEEKTAWVNNAITKGFTALEKLLVNCAGKHATGDEIYLADLFLAPQIHGAINRFQINMEPYPTLAKCYESYNELPAFQNALPEKQPDAPSSTI

SEQ ID NO: 77597 - DNA, 734 bp, Arabidopsis thaliana
  misc_feature (1)..(734): Ceres Seq. ID no. 12576934
  misc_feature: MA Experiment ID: 20000234 Result: Up-regulated in Transcription
  misc_feature: MA Experiment 20000234 PARAMETER Experiment Name: At_Siliques_P Parameter: Age (day) Value: 21
  misc_feature: MA Experiment 20000234 PARAMETER Experiment Name: At_Siliques_P Parameter: Organism Value: A. thaliana
  misc_feature: MA Experiment 20000234 PARAMETER Experiment Name: At_Siliques_P Parameter: Plant Line Value: WS
  misc_feature: MA Experiment 20000234 PARAMETER Experiment Name: At_Siliques_P Parameter: Tissue Value: Less Than 5mm Siliques vs. Whole Plant
  misc_feature: MA Experiment ID: 20000235 Result: Up-regulated in Transcription
  misc_feature: MA Experiment 20000235 PARAMETER Experiment Name: At_Siliques_P Parameter: Age (day) Value: 21
  misc_feature: MA Experiment 20000235 PARAMETER Experiment Name: At_Siliques_P Parameter: Organism Value: A. thaliana
  misc_feature: MA Experiment 20000235 PARAMETER Experiment Name: At_Siliques_P Parameter: Plant Line Value: WS
  misc_feature: MA Experiment 20000235 PARAMETER Experiment Name: At_Siliques_P Parameter: Tissue Value: 5-10mm Siliques vs. Whole Plant
  misc_feature: MA Experiment ID: 20001760 Result: Up-regulated in Transcription
  misc_feature: MA Experiment 20001760 PARAMETER Experiment Name: At_50mM_NH4NO3_L-to-H_P Parameter: Timepoint (hr) Value: 2
  misc_feature: MA Experiment 20001760 PARAMETER Experiment Name: At_50mM_NH4NO3_L-to-H_P Parameter: Tissue Value: Siliques
  misc_feature: MA Experiment 20001760 PARAMETER Experiment Name: At_50mM_NH4NO3_L-to-H_P Parameter: Treatment Value: 50mM NH4NO3 vs 100mM Mannitol
atcacacaattcacaatcaatcgcagagccgattctcttcaaaacttgtctagtcctttgtccttgttgcaaacgatggcagaaacgaagaagatgatcatcctcaagagctccgacggtgaatccttcgaggtcgaggaagccgtcgcggtcgagtcccagacgattaagcacatgatcgaggacgactgcgtcgataacggaattccacttcccaatgtcaccggagccatcctcgcgaaggttatcgagtactgcaagaaacacgttgaagccgctgctgaggctggtggagacaaggatttctatggttccaccgagaaccacgagctcaagacttgggacaacgatttcgtcaaagttgatcatcctactctcttcgatctccttcgggctgccaactatttgaacatcagtggacttcttgaccttacgtgcaaggccgtggctgatcagatgagaggcaaaactccagcgcagatgcgtgaacacttcaacatcaagaacgactacacacctgaggaagaggccgaggttcgcaatgagaacaggtgggcgttcgagtgattggaaaagaatttaagaacatttgatatcaacaaataaaataagagaaatttattttgcctgaatttctttttgcttccaatctcttttgtcacaaaactcccagaagtgtttcacattttcttcattcaatcccggctaaactttatatacataaaatcacaaag

SEQ ID NO: 77598 - protein, 188 aa, Arabidopsis thaliana
  peptide (1)..(188): Ceres Seq. ID no. 12576935
  misc_feature (111)..(188): Pfam Name: Skp1 family, dimerisation domain Pfam Description: Skp1 family, dimerisation domain
  misc_feature (26)..(188): Homolog of NCBI NO: 18400912 NR Description: E3 ubiquitin ligase SCF complex subunit SKP1/ASK1 putative; protein id: At2g25700.1, supported by cDNA: gi_15450664 thaliana] >gi|25366630|pir||F84651 probable SKP1/ASK1 (At3),
  misc_feature (26)..(188): Homolog of NCBI NO: 18394828 NR Description: SKP1/ASK1 (At4), putative; protein id: supported by cDNA: gi_16648854, supported by cDNA: gi_20466136
  misc_feature (29)..(188): Homolog of NCBI NO: 18958257 NR Description: kinetochore protein [Brassica juncea]
  misc_feature (29)..(188): Homolog of NCBI NO: 18958259 NR Description: kinetochore protein [Brassica juncea]
  misc_feature (31)..(188): Homolog of NCBI NO: 18410982 NR Description: E3 ubiquitin ligase SCF complex subunit, (At1); protein id: At1g75950.1, supported by cDNA: gi_1432082, by cDNA: gi_19424109, supported by cDNA: gi_21281126, supported
  misc_feature (27)..(188): Homolog of NCBI NO: 40644754 NR Description: putative SKP1 protein [Triticum aestivum]
  misc_feature (29)..(188): Homolog of NCBI NO: 18958253 NR Description: kinetochore protein [Brassica juncea]
  misc_feature (27)..(188): Homolog of NCBI NO: 7378764 NR Description: putative kinetochore protein [Hordeum vulgare
  misc_feature (29)..(188): Homolog of NCBI NO: 3719211 NR Description: UIP2 [Arabidopsis thaliana]
  misc_feature (29)..(188): Homolog of NCBI NO: 18422184 NR Description: E3 ubiquitin ligase SCF complex subunit, (At2); protein id: At5g42190.1, supported by cDNA: gi_3068808
ITQFTINRRADSLQNLSSPLSLLQTMAETKKMIILKSSDGESFEVEEAVAVESQTIKHMIEDDCVDNGIPLPNVTGAILAKVIEYCKKHVEAAAEAGGDKDFYGSTENHELKTWDNDFVKVDHPTLFDLLRAANYLNISGLLDLTCKAVADQMRGKTPAQMREHFNIKNDYTPEEEAEVRNENRWAFE

SEQ ID NO: 77599 - protein, 163 aa, Arabidopsis thaliana
  peptide (1)..(163): Ceres Seq. ID no. 12576936
  misc_feature (86)..(163): Pfam Name: Skp1 family, dimerisation domain Pfam Description: Skp1 family, dimerisation domain
  misc_feature (1)..(163): Homolog of NCBI NO: 18400912 NR Description: E3 ubiquitin ligase SCF complex subunit SKP1/ASK1 putative; protein id: At2g25700.1, supported by cDNA: gi_15450664 thaliana] >gi|25366630|pir||F84651 probable SKP1/ASK1 (At3),
  misc_feature (1)..(163): Homolog of NCBI NO: 18394828 NR Description: SKP1/ASK1 (At4), putative; protein id: supported by cDNA: gi_16648854, supported by cDNA: gi_20466136
  misc_feature (4)..(163): Homolog of NCBI NO: 18958257 NR Description: kinetochore protein [Brassica juncea]
  misc_feature (4)..(163): Homolog of NCBI NO: 18958259 NR Description: kinetochore protein [Brassica juncea]
  misc_feature (6)..(163): Homolog of NCBI NO: 18410982 NR Description: E3 ubiquitin ligase SCF complex subunit, (At1); protein id: At1g75950.1, supported by cDNA: gi_1432082, by cDNA: gi_19424109, supported by cDNA: gi_21281126, supported
  misc_feature (2)..(163): Homolog of NCBI NO: 40644754 NR Description: putative SKP1 protein [Triticum aestivum]
  misc_feature (4)..(163): Homolog of NCBI NO: 18958253 NR Description: kinetochore protein [Brassica juncea]
  misc_feature (2)..(163): Homolog of NCBI NO: 7378764 NR Description: putative kinetochore protein [Hordeum vulgare
  misc_feature (4)..(163): Homolog of NCBI NO: 3719211 NR Description: UIP2 [Arabidopsis thaliana]
  misc_feature (4)..(163): Homolog of NCBI NO: 18422184 NR Description: E3 ubiquitin ligase SCF complex subunit, (At2); protein id: At5g42190.1, supported by cDNA: gi_3068808
MAETKKMIILKSSDGESFEVEEAVAVESQTIKHMIEDDCVDNGIPLPNVTGAILAKVIEYCKKHVEAAAEAGGDKDFYGSTENHELKTWDNDFVKVDHPTLFDLLRAANYLNISGLLDLTCKAVADQMRGKTPAQMREHFNIKNDYTPEEEAEVRNENRWAFE

SEQ ID NO: 77600 - protein, 157 aa, Arabidopsis thaliana
  peptide (1)..(157): Ceres Seq. ID no. 12576937
  misc_feature (80)..(157): Pfam Name: Skp1 family, dimerisation domain Pfam Description: Skp1 family, dimerisation domain
  misc_feature (1)..(157): Homolog of NCBI NO: 18400912 NR Description: E3 ubiquitin ligase SCF complex subunit SKP1/ASK1 putative; protein id: At2g25700.1, supported by cDNA: gi_15450664 thaliana] >gi|25366630|pir||F84651 probable SKP1/ASK1 (At3),
  misc_feature (1)..(157): Homolog of NCBI NO: 18394828 NR Description: SKP1/ASK1 (At4), putative; protein id: supported by cDNA: gi_16648854, supported by cDNA: gi_20466136
  misc_feature (1)..(157): Homolog of NCBI NO: 18958257 NR Description: kinetochore protein [Brassica juncea]
  misc_feature (1)..(157): Homolog of NCBI NO: 18958259 NR Description: kinetochore protein [Brassica juncea]
  misc_feature (1)..(157): Homolog of NCBI NO: 18410982 NR Description: E3 ubiquitin ligase SCF complex subunit, (At1); protein id: At1g75950.1, supported by cDNA: gi_1432082, by cDNA: gi_19424109, supported by cDNA: gi_21281126, supported
  misc_feature (1)..(157): Homolog of NCBI NO: 40644754 NR Description: putative SKP1 protein [Triticum aestivum]
  misc_feature (1)..(157): Homolog of NCBI NO: 18958253 NR Description: kinetochore protein [Brassica juncea]
  misc_feature (1)..(157): Homolog of NCBI NO: 7378764 NR Description: putative kinetochore protein [Hordeum vulgare
  misc_feature (1)..(157): Homolog of NCBI NO: 3719211 NR Description: UIP2 [Arabidopsis thaliana]
  misc_feature (1)..(157): Homolog of NCBI NO: 18422184 NR Description: E3 ubiquitin ligase SCF complex subunit, (At2); protein id: At5g42190.1, supported by cDNA: gi_3068808
MIILKSSDGESFEVEEAVAVESQTIKHMIEDDCVDNGIPLPNVTGAILAKVIEYCKKHVEAAAEAGGDKDFYGSTENHELKTWDNDFVKVDHPTLFDLLRAANYLNISGLLDLTCKAVADQMRGKTPAQMREHFNIKNDYTPEEEAEVRNENRWAFE

SEQ ID NO: 77601 - DNA, 1656 bp, Arabidopsis thaliana
  misc_feature (1)..(1656): Ceres Seq. ID no. 12576952
  misc_feature: MA Experiment ID: 20000184 Result: Down-regulated in Transcription
  misc_feature: MA Experiment 20000184 PARAMETER Experiment Name: At_Shoots__P Parameter: Age (day) Value: 7
  misc_feature: MA Experiment 20000184 PARAMETER Experiment Name: At_Shoots__P Parameter: Tissue Value: Shoots vs. Whole Plant
  misc_feature: MA Experiment ID: 20000794 Result: Up-regulated in Transcription
  misc_feature: MA Experiment 20000794 PARAMETER Experiment Name: At_Petals_P Parameter: Age (day) Value: 23-25 days
  misc_feature: MA Experiment 20000794 PARAMETER Experiment Name: At_Petals_P Parameter: Plant Line Value: WS
  misc_feature: MA Experiment 20000794 PARAMETER Experiment Name: At_Petals_P Parameter: Tissue Value: Petals vs. Whole plant
aaacaatccatcgaaagatcatcaaaaaaatcatcttcttcctcaatttcttctgattcctcctctctttcttctacttctcaccaaatttctgttagttctctgataagtacatttcgtgcttatcaaatacttatattttaaggggttgaagttgtaattttgaagaagttgaagatcaatcaaaaataatagaagaacagagacgacgaaacgaaaccagccggagaactgagcagagaaaaacccccggcgagaatgggaaattcgaattcgtcttctgttgatcatcgcttcatttctgcttccagagcttttactcagaagaagctcgatgatctcaaatctctcttcgtctccctcgcttccaattctcagagcaatgaccaatacgtctcgtaccctgttttccaggagtattttggtctgagtggttctttaggagaaaggatgtttgatatggtcactcaacgcaggaaagatgataaaatgacttatgaagatcttgttattgctaaggcaacatacgagaaaggaactgacgatgagattgctgagtttatttaccagactttggatgttaatggcaatggggtcttgtcaaggtctgatttagagtcgttcctggtggtgattttgaagagtgtgttctccactgagagttctgatgcggaatcaagtgattacaagaagatggtggatgcgctactcaatgccgctactttctcaaaatctgatgatggttctgaaaaaggaatgtcttttgaagacttcagaagctggtgctcattcgttccaactatcagaaagttcctcggaagcttgcttatgcccccgagtacagtgagacctggatatcaagtcccgcatctgctatatgaagatagtgtgagttcagataggctactattaaagaaggaatacgcttggcatattggaggagctcttcctcaccatgagcttgtagagtggaagctgttgtatcacagttccgtacacggtcaaagcttcaacacattcctcggacacacatcaaacactggtatgtcggcatctgtgctaatcatcaaagacacagaaggatatgtgtatggagggtacgcctctcaaccttgggagaggtacagcgatttctatggagacatgaagtcttttcttttccagcttaaccctaaagcagccatttaccgaccaactggagcaaacaccaacattcaatggtgtgctactaatttcacatcggagaacattccgaatgggataggatttggaggtaagataaatcactttggcctgtttatatcagcaagcttcgatcaaggccagacattcgaatgcacaacgtttggtagcccgagcctttccaagacgagcagaattcagccagaagtgatagaatgctggggaatcgttcaggcctcaaatgaacaagacaccaaacataacgccatgaaaggtactgttctggagaggtttaaggaagatcgcaacatgctcaaactagtcggcatggcaggcaattcaaatgattgaatagagaatttaggttctgagattcaatcttagatatacactcaacgttcgtatacattgtgagagtgagtgtgcaaaaacattatgtacaataaagagtgttgtatgattcataccatttcc

SEQ ID NO: 77602 - protein, 424 aa, Arabidopsis thaliana
  peptide (1)..(424): Ceres Seq. ID no. 12576953
  misc_feature (1)..(424): Homolog of NCBI NO: 15239986 NR Description: putative protein; protein id: At5g06260.1, by cDNA: gi_15292792, supported by cDNA: gi_20258858 [Arabidopsis
  misc_feature (1)..(266): Homolog of NCBI NO: 22329148 NR Description: putative protein; protein id: At4g34070.1
  misc_feature (1)..(193): Homolog of NCBI NO: 7486284 NR Description: hypothetical protein F28A23.170 - Arabidopsis >gi|2911055|emb|CAA17565.1| putative protein [Arabidopsis >gi|7270356|emb|CAB80124.1| putative protein [Arabidopsis
  misc_feature (146)..(266): Homolog of NCBI NO: 17065420 NR Description: Unknown protein [Arabidopsis thaliana]
  misc_feature (1)..(91): Homolog of NCBI NO: 30690004 NR Description: hypothetical protein [Arabidopsis thaliana]
  misc_feature (1)..(91): Homolog of NCBI NO: 25408950 NR Description: hypothetical protein At2g45380 [imported] - thaliana >gi|2583116|gb|AAB82625.1| unknown protein [Arabidopsis
  misc_feature (175)..(422): Homolog of NCBI NO: 28077021 NR Description: RIKEN cDNA 4632415K11 [Mus musculus] RIKEN cDNA 4632415K11 gene [Mus musculus]
  misc_feature (175)..(422): Homolog of NCBI NO: 23270886 NR Description: Unknown (protein for MGC:25024) [Homo sapiens]
  misc_feature (175)..(422): Homolog of NCBI NO: 10047293 NR Description: KIAA1609 protein [Homo sapiens]
  misc_feature (202)..(423): Homolog of NCBI NO: 19920876 NR Description: CG5149-PA [Drosophila melanogaster]
MGNSNSSSVDHRFISASRAFTQKKLDDLKSLFVSLASNSQSNDQYVSYPVFQEYFGLSGSLGERMFDMVTQRRKDDKMTYEDLVIAKATYEKGTDDEIAEFIYQTLDVNGNGVLSRSDLESFLVVILKSVFSTESSDAESSDYKKMVDALLNAATFSKSDDGSEKGMSFEDFRSWCSFVPTIRKFLGSLLMPPSTVRPGYQVPHLLYEDSVSSDRLLLKKEYAWHIGGALPHHELVEWKLLYHSSVHGQSFNTFLGHTSNTGMSASVLIIKDTEGYVYGGYASQPWERYSDFYGDMKSFLFQLNPKAAIYRPTGANTNIQWCATNFTSENIPNGIGFGGKINHFGLFISASFDQGQTFECTTFGSPSLSKTSRIQPEVIECWGIVQASNEQDTKHNAMKGTVLERFKEDRNMLKLVGMAGNSND

SEQ ID NO: 77603 - protein, 360 aa, Arabidopsis thaliana
  peptide (1)..(360): Ceres Seq. ID no. 12576954
  misc_feature (1)..(360): Homolog of NCBI NO: 15239986 NR Description: putative protein; protein id: At5g06260.1, by cDNA: gi_15292792, supported by cDNA: gi_20258858 [Arabidopsis
  misc_feature (1)..(202): Homolog of NCBI NO: 22329148 NR Description: putative protein; protein id: At4g34070.1
  misc_feature (1)..(129): Homolog of NCBI NO: 7486284 NR Description: hypothetical protein F28A23.170 - Arabidopsis >gi|2911055|emb|CAA17565.1| putative protein [Arabidopsis >gi|7270356|emb|CAB80124.1| putative protein [Arabidopsis
  misc_feature (82)..(202): Homolog of NCBI NO: 17065420 NR Description: Unknown protein [Arabidopsis thaliana]
  misc_feature (1)..(27): Homolog of NCBI NO: 30690004 NR Description: hypothetical protein [Arabidopsis thaliana]
  misc_feature (1)..(27): Homolog of NCBI NO: 25408950 NR Description: hypothetical protein At2g45380 [imported] - thaliana >gi|2583116|gb|AAB82625.1| unknown protein [Arabidopsis
  misc_feature (111)..(358): Homolog of NCBI NO: 28077021 NR Description: RIKEN cDNA 4632415K11 [Mus musculus] RIKEN cDNA 4632415K11 gene [Mus musculus]
  misc_feature (111)..(358): Homolog of NCBI NO: 23270886 NR Description: Unknown (protein for MGC:25024) [Homo sapiens]
  misc_feature (111)..(358): Homolog of NCBI NO: 10047293 NR Description: KIAA1609 protein [Homo sapiens]
  misc_feature (138)..(359): Homolog of NCBI NO: 19920876 NR Description: CG5149-PA [Drosophila melanogaster]
MFDMVTQRRKDDKMTYEDLVIAKATYEKGTDDEIAEFIYQTLDVNGNGVLSRSDLESFLVVILKSVFSTESSDAESSDYKKMVDALLNAATFSKSDDGSEKGMSFEDFRSWCSFVPTIRKFLGSLLMPPSTVRPGYQVPHLLYEDSVSSDRLLLKKEYAWHIGGALPHHELVEWKLLYHSSVHGQSFNTFLGHTSNTGMSASVLIIKDTEGYVYGGYASQPWERYSDFYGDMKSFLFQLNPKAAIYRPTGANTNIQWCATNFTSENIPNGIGFGGKINHFGLFISASFDQGQTFECTTFGSPSLSKTSRIQPEVIECWGIVQASNEQDTKHNAMKGTVLERFKEDRNMLKLVGMAGNSND

SEQ ID NO: 77604 - protein, 357 aa, Arabidopsis thaliana
  peptide (1)..(357): Ceres Seq. ID no. 12576955
  misc_feature (1)..(357): Homolog of NCBI NO: 15239986 NR Description: putative protein; protein id: At5g06260.1, by cDNA: gi_15292792, supported by cDNA: gi_20258858 [Arabidopsis
  misc_feature (1)..(199): Homolog of NCBI NO: 22329148 NR Description: putative protein; protein id: At4g34070.1
  misc_feature (1)..(126): Homolog of NCBI NO: 7486284 NR Description: hypothetical protein F28A23.170 - Arabidopsis >gi|2911055|emb|CAA17565.1| putative protein [Arabidopsis >gi|7270356|emb|CAB80124.1| putative protein [Arabidopsis
  misc_feature (79)..(199): Homolog of NCBI NO: 17065420 NR Description: Unknown protein [Arabidopsis thaliana]
  misc_feature (1)..(24): Homolog of NCBI NO: 30690004 NR Description: hypothetical protein [Arabidopsis thaliana]
  misc_feature (1)..(24): Homolog of NCBI NO: 25408950 NR Description: hypothetical protein At2g45380 [imported] - thaliana >gi|2583116|gb|AAB82625.1| unknown protein [Arabidopsis
  misc_feature (108)..(355): Homolog of NCBI NO: 28077021 NR Description: RIKEN cDNA 4632415K11 [Mus musculus] RIKEN cDNA 4632415K11 gene [Mus musculus]
  misc_feature (108)..(355): Homolog of NCBI NO: 23270886 NR Description: Unknown (protein for MGC:25024) [Homo sapiens]
  misc_feature (108)..(355): Homolog of NCBI NO: 10047293 NR Description: KIAA1609 protein [Homo sapiens]
  misc_feature (135)..(356): Homolog of NCBI NO: 19920876 NR Description: CG5149-PA [Drosophila melanogaster]
MVTQRRKDDKMTYEDLVIAKATYEKGTDDEIAEFIYQTLDVNGNGVLSRSDLESFLVVILKSVFSTESSDAESSDYKKMVDALLNAATFSKSDDGSEKGMSFEDFRSWCSFVPTIRKFLGSLLMPPSTVRPGYQVPHLLYEDSVSSDRLLLKKEYAWHIGGALPHHELVEWKLLYHSSVHGQSFNTFLGHTSNTGMSASVLIIKDTEGYVYGGYASQPWERYSDFYGDMKSFLFQLNPKAAIYRPTGANTNIQWCATNFTSENIPNGIGFGGKINHFGLFISASFDQGQTFECTTFGSPSLSKTSRIQPEVIECWGIVQASNEQDTKHNAMKGTVLERFKEDRNMLKLVGMAGNSND

SEQ ID NO: 77605 - DNA, 1064 bp, Arabidopsis thaliana
  misc_feature (1)..(1064): Ceres Seq. ID no. 12576982
  misc_feature: MA Experiment ID: 108434 Result: Down-regulated in Transcription
  misc_feature: MA Experiment 108434 PARAMETER Experiment Name: At_Root_Tips_cDNA_P Parameter: Tissue Value: Root Tips
  misc_feature: MA Experiment ID: 108463 Result: Up-regulated in Transcription
  misc_feature: MA Experiment 108463 PARAMETER Experiment Name: At_Germinating_Seeds_cDNA_P Parameter: Age (day) Value: 3 vs. 0
  misc_feature: MA Experiment 108463 PARAMETER Experiment Name: At_Germinating_Seeds_cDNA_P Parameter: Tissue Value: Germinating Seeds
  misc_feature: MA Experiment ID: 108464 Result: Up-regulated in Transcription
  misc_feature: MA Experiment 108464 PARAMETER Experiment Name: At_Germinating_Seeds_cDNA_P Parameter: Age (day) Value: 4 vs. 0
  misc_feature: MA Experiment 108464 PARAMETER Experiment Name: At_Germinating_Seeds_cDNA_P Parameter: Tissue Value: Germinating Seeds
  misc_feature: MA Experiment ID: 108474 Result: Down-regulated in Transcription
  misc_feature: MA Experiment 108474 PARAMETER Experiment Name: At_Drought_Flowers_cDNA_P Parameter: Timepoint (hr) Value: null
  misc_feature: MA Experiment 108474 PARAMETER Experiment Name: At_Drought_Flowers_cDNA_P Parameter: Treatment Value: Drought vs. No Drought
  misc_feature: MA Experiment ID: 108488 Result: Down-regulated in Transcription
  misc_feature: MA Experiment ID: 108489 Result: Up-regulated in Transcription
  misc_feature: MA Experiment ID: 108501 Result: Down-regulated in Transcription
  misc_feature: MA Experiment 108501 PARAMETER Experiment Name: At_ap2_floral_buds_cDNA_P Parameter: Plant Line Value: ap2 (Ler.)
  misc_feature: MA Experiment 108501 PARAMETER Experiment Name: At_ap2_floral_buds_cDNA_P Parameter: Tissue Value: Closed Flower
  misc_feature: MA Experiment ID: 108561 Result: Up-regulated in Transcription
  misc_feature: MA Experiment 108561 PARAMETER Experiment Name: At_100uM_ABA_cDNA_P Parameter: Timepoint (hr) Value: 6
  misc_feature: MA Experiment 108561 PARAMETER Experiment Name: At_100uM_ABA_cDNA_P Parameter: Tissue Value: Aerial
  misc_feature: MA Experiment 108561 PARAMETER Experiment Name: At_100uM_ABA_cDNA_P Parameter: Treatment Value: 100uM ABA vs. No Treatment
  misc_feature: MA Experiment ID: 108572 Result: Up-regulated in Transcription
  misc_feature: MA Experiment 108572 PARAMETER Experiment Name: At_Drought_cDNA_P Parameter: Timepoint (hr) Value: 1
  misc_feature: MA Experiment 108572 PARAMETER Experiment Name: At_Drought_cDNA_P Parameter: Tissue Value: Aerial
  misc_feature: MA Experiment 108572 PARAMETER Experiment Name: At_Drought_cDNA_P Parameter: Treatment Value: Drought vs. No Drought
  misc_feature: MA Experiment ID: 108573 Result: Up-regulated in Transcription
  misc_feature: MA Experiment 108573 PARAMETER Experiment Name: At_Drought_cDNA_P Parameter: Timepoint (hr) Value: 6
  misc_feature: MA Experiment 108573 PARAMETER Experiment Name: At_Drought_cDNA_P Parameter: Tissue Value: Aerial
  misc_feature: MA Experiment 108573 PARAMETER Experiment Name: At_Drought_cDNA_P Parameter: Treatment Value: Drought vs. No Drought
  misc_feature: MA Experiment ID: 108585 Result: Up-regulated in Transcription
  misc_feature: MA Experiment 108585 PARAMETER Experiment Name: At_5mM_NaNP_cDNA_P Parameter: Timepoint (hr) Value: 6
  misc_feature: MA Experiment 108585 PARAMETER Experiment Name: At_5mM_NaNP_cDNA_P Parameter: Tissue Value: Aerial
  misc_feature: MA Experiment 108585 PARAMETER Experiment Name: At_5mM_NaNP_cDNA_P Parameter: Treatment Value: null
  misc_feature: MA Experiment ID: 108594 Result: Down-regulated in Transcription
  misc_feature: MA Experiment 108594 PARAMETER Experiment Name: At_Ler-rhl_Root_cDNA_P Parameter: Plant Line Value: null
  misc_feature: MA Experiment ID: 108595 Result: Up-regulated in Transcription
  misc_feature: MA Experiment 108595 PARAMETER Experiment Name: At_Ler-pi_Ovule_cDNA_P Parameter: Plant Line Value: null
  misc_feature: MA Experiment ID: 108605 Result: Up-regulated in Transcription
  misc_feature: MA Experiment 108605 PARAMETER Experiment Name: At_100uM_ABA_cDNA_P Parameter: Timepoint (hr) Value: 6
  misc_feature: MA Experiment 108605 PARAMETER Experiment Name: At_100uM_ABA_cDNA_P Parameter: Tissue Value: Aerial
  misc_feature: MA Experiment 108605 PARAMETER Experiment Name: At_100uM_ABA_cDNA_P Parameter: Treatment Value: 100uM ABA vs. No Treatment
  misc_feature: MA Experiment ID: 108607 Result: Up-regulated in Transcription
  misc_feature: MA Experiment 108607 PARAMETER Experiment Name: At_100uM_ABA_cDNA_P Parameter: Timepoint (hr) Value: 4
  misc_feature: MA Experiment 108607 PARAMETER Experiment Name: At_100uM_ABA_cDNA_P Parameter: Tissue Value: Aerial
  misc_feature: MA Experiment 108607 PARAMETER Experiment Name: At_100uM_ABA_cDNA_P Parameter: Treatment Value: 100uM ABA vs. No Treatment
  misc_feature: MA Experiment ID: 108608 Result: Up-regulated in Transcription
  misc_feature: MA Experiment 108608 PARAMETER Experiment Name: At_100uM_ABA_cDNA_P Parameter: Timepoint (hr) Value: 1
  misc_feature: MA Experiment 108608 PARAMETER Experiment Name: At_100uM_ABA_cDNA_P Parameter: Tissue Value: Aerial
  misc_feature: MA Experiment 108608 PARAMETER Experiment Name: At_100uM_ABA_cDNA_P Parameter: Treatment Value: 100uM ABA vs. No Treatment
  misc_feature: MA Experiment ID: 108668 Result: Up-regulated in Transcription
  misc_feature: MA Experiment 108668 PARAMETER Experiment Name: At_2mM_SA_cDNA_P Parameter: Plant Line Value: WS
  misc_feature: MA Experiment 108668 PARAMETER Experiment Name: At_2mM_SA_cDNA_P Parameter: Timepoint (hr) Value: 6
  misc_feature: MA Experiment 108668 PARAMETER Experiment Name: At_2mM_SA_cDNA_P Parameter: Treatment Value: 2mM SA vs. No Treatment
  misc_feature: MA Experiment ID: 20000069 Result: Up-regulated in Transcription
  misc_feature: MA Experiment 20000069 PARAMETER Experiment Name: At_100uM_ABA_Mutants_cDNA_P Parameter: Plant Line Value: CS23
  misc_feature: MA Experiment 20000069 PARAMETER Experiment Name: At_100uM_ABA_Mutants_cDNA_P Parameter: Timepoint (hr) Value: 6
  misc_feature: MA Experiment 20000069 PARAMETER Experiment Name: At_100uM_ABA_Mutants_cDNA_P Parameter: Tissue Value: Aerial
  misc_feature: MA Experiment 20000069 PARAMETER Experiment Name: At_100uM_ABA_Mutants_cDNA_P Parameter: Treatment Value: 100uM ABA vs. No Treatment
  misc_feature: MA Experiment ID: 20000070 Result: Up-regulated in Transcription
  misc_feature: MA Experiment 20000070 PARAMETER Experiment Name: At_100uM_ABA_Mutants_cDNA_P Parameter: Plant Line Value: CS24
  misc_feature: MA Experiment 20000070 PARAMETER Experiment Name: At_100uM_ABA_Mutants_cDNA_P Parameter: Timepoint (hr) Value: 6
  misc_feature: MA Experiment 20000070 PARAMETER Experiment Name: At_100uM_ABA_Mutants_cDNA_P Parameter: Tissue Value: Aerial
  misc_feature: MA Experiment 20000070 PARAMETER Experiment Name: At_100uM_ABA_Mutants_cDNA_P Parameter: Treatment Value: 100uM ABA vs. No Treatment
  misc_feature: MA Experiment ID: 20000071 Result: Up-regulated in Transcription
  misc_feature: MA Experiment 20000071 PARAMETER Experiment Name: At_100uM_ABA_Mutants_cDNA_P Parameter: Plant Line Value: CS8104
  misc_feature: MA Experiment 20000071 PARAMETER Experiment Name: At_100uM_ABA_Mutants_cDNA_P Parameter: Timepoint (hr) Value: 6
  misc_feature: MA Experiment 20000071 PARAMETER Experiment Name: At_100uM_ABA_Mutants_cDNA_P Parameter: Tissue Value: Aerial
  misc_feature: MA Experiment 20000071 PARAMETER Experiment Name: At_100uM_ABA_Mutants_cDNA_P Parameter: Treatment Value: 100uM ABA vs. No Treatment
  misc_feature: MA Experiment ID: 20000072 Result: Up-regulated in Transcription
  misc_feature: MA Experiment 20000072 PARAMETER Experiment Name: At_100uM_ABA_Mutants_cDNA_P Parameter: Plant Line Value: CS8105
  misc_feature: MA Experiment 20000072 PARAMETER Experiment Name: At_100uM_ABA_Mutants_cDNA_P Parameter: Timepoint (hr) Value: 6
  misc_feature: MA Experiment 20000072 PARAMETER Experiment Name: At_100uM_ABA_Mutants_cDNA_P Parameter: Tissue Value: Aerial
  misc_feature: MA Experiment 20000072 PARAMETER Experiment Name: At_100uM_ABA_Mutants_cDNA_P Parameter: Treatment Value: 100uM ABA vs. No Treatment
  misc_feature: MA Experiment ID: 20000087 Result: Up-regulated in Transcription
  misc_feature: MA Experiment 20000087 PARAMETER Experiment Name: At_100uM_ABA_Mutants_cDNA_P Parameter: Plant Line Value: WS
  misc_feature: MA Experiment 20000087 PARAMETER Experiment Name: At_100uM_ABA_Mutants_cDNA_P Parameter: Timepoint (hr) Value: 6
  misc_feature: MA Experiment 20000087 PARAMETER Experiment Name: At_100uM_ABA_Mutants_cDNA_P Parameter: Tissue Value: Aerial
  misc_feature: MA Experiment 20000087 PARAMETER Experiment Name: At_100uM_ABA_Mutants_cDNA_P Parameter: Treatment Value: 100uM ABA vs. No Treatment
  misc_feature: MA Experiment ID: 20000089 Result: Down-regulated in Transcription
  misc_feature: MA Experiment ID: 20000111 Result: Up-regulated in Transcription
  misc_feature: MA Experiment 20000111 PARAMETER Experiment Name: At_42deg_Heat_cDNA_P Parameter: Temperature (deg C) Value: 42 vs. 22
  misc_feature: MA Experiment 20000111 PARAMETER Experiment Name: At_42deg_Heat_cDNA_P Parameter: Timepoint (hr) Value: 6
  misc_feature: MA Experiment 20000111 PARAMETER Experiment Name: At_42deg_Heat_cDNA_P Parameter: Tissue Value: Aerial
  misc_feature: MA Experiment ID: 20000113 Result: Up-regulated in Transcription
  misc_feature: MA Experiment 20000113 PARAMETER Experiment Name: At_42deg_Heat_cDNA_P Parameter: Temperature (deg C) Value: 42 vs. 22
  misc_feature: MA Experiment 20000113 PARAMETER Experiment Name: At_42deg_Heat_cDNA_P Parameter: Timepoint (hr) Value: 8
  misc_feature: MA Experiment 20000113 PARAMETER Experiment Name: At_42deg_Heat_cDNA_P Parameter: Tissue Value: Aerial
  misc_feature: MA Experiment ID: 20000117 Result: Up-regulated in Transcription
  misc_feature: MA Experiment 20000117 PARAMETER Experiment Name: At_100uM_ABA_Mutants_cDNA_P Parameter: Plant Line Value: Columbia
  misc_feature: MA Experiment 20000117 PARAMETER Experiment Name: At_100uM_ABA_Mutants_cDNA_P Parameter: Timepoint (hr) Value: 6
  misc_feature: MA Experiment 20000117 PARAMETER Experiment Name: At_100uM_ABA_Mutants_cDNA_P Parameter: Tissue Value: Aerial
  misc_feature: MA Experiment 20000117 PARAMETER Experiment Name: At_100uM_ABA_Mutants_cDNA_P Parameter: Treatment Value: 100uM ABA vs. No Treatment
  misc_feature: MA Experiment ID: 20000166 Result: Up-regulated in Transcription
  misc_feature: MA Experiment 20000166 PARAMETER Experiment Name: At_100uM_ABA_P Parameter: Age (day) Value: 14
  misc_feature: MA Experiment 20000166 PARAMETER Experiment Name: At_100uM_ABA_P Parameter: Organism Value: A. thaliana
  misc_feature: MA Experiment 20000166 PARAMETER Experiment Name: At_100uM_ABA_P Parameter: Plant Line Value: WS
  misc_feature: MA Experiment 20000166 PARAMETER Experiment Name: At_100uM_ABA_P Parameter: Timepoint (hr) Value: 1
  misc_feature: MA Experiment 20000166 PARAMETER Experiment Name: At_100uM_ABA_P Parameter: Tissue Value: Aerial
  misc_feature: MA Experiment 20000166 PARAMETER Experiment Name: At_100uM_ABA_P Parameter: Treatment Value: 100uM ABA vs. No Treatment
  misc_feature: MA Experiment ID: 20000169 Result: Up-regulated in Transcription
  misc_feature: MA Experiment 20000169 PARAMETER Experiment Name: At_100uM_ABA_P Parameter: Age (day) Value: 14
  misc_feature: MA Experiment 20000169 PARAMETER Experiment Name: At_100uM_ABA_P Parameter: Organism Value: A. thaliana
  misc_feature: MA Experiment 20000169 PARAMETER Experiment Name: At_100uM_ABA_P Parameter: Plant Line Value: WS
  misc_feature: MA Experiment 20000169 PARAMETER Experiment Name: At_100uM_ABA_P Parameter: Timepoint (hr) Value: 6
  misc_feature: MA Experiment 20000169 PARAMETER Experiment Name: At_100uM_ABA_P Parameter: Tissue Value: Aerial
  misc_feature: MA Experiment 20000169 PARAMETER Experiment Name: At_100uM_ABA_P Parameter: Treatment Value: 100uM ABA vs. No Treatment
  misc_feature: MA Experiment ID: 20000173 Result: Up-regulated in Transcription
  misc_feature: MA Experiment 20000173 PARAMETER Experiment Name: At_42deg_Heat_P Parameter: Age (day) Value: 14
  misc_feature: MA Experiment 20000173 PARAMETER Experiment Name: At_42deg_Heat_P Parameter: Organism Value: A. thaliana
  misc_feature: MA Experiment 20000173 PARAMETER Experiment Name: At_42deg_Heat_P Parameter: Plant Line Value: WS
  misc_feature: MA Experiment 20000173 PARAMETER Experiment Name: At_42deg_Heat_P Parameter: Temperature (deg C) Value: 42 vs. 22
  misc_feature: MA Experiment 20000173 PARAMETER Experiment Name: At_42deg_Heat_P Parameter: Timepoint (hr) Value: 6
  misc_feature: MA Experiment 20000173 PARAMETER Experiment Name: At_42deg_Heat_P Parameter: Tissue Value: Aerial
  misc_feature: MA Experiment ID: 20000182 Result: Up-regulated in Transcription
  misc_feature: MA Experiment 20000182 PARAMETER Experiment Name: At_2mM_SA_P Parameter: Age (day) Value: 14
  misc_feature: MA Experiment 20000182 PARAMETER Experiment Name: At_2mM_SA_P Parameter: Organism Value: A. thaliana
  misc_feature: MA Experiment 20000182 PARAMETER Experiment Name: At_2mM_SA_P Parameter: Plant Line Value: WS
  misc_feature: MA Experiment 20000182 PARAMETER Experiment Name: At_2mM_SA_P Parameter: Timepoint (hr) Value: 6
  misc_feature: MA Experiment 20000182 PARAMETER Experiment Name: At_2mM_SA_P Parameter: Tissue Value: Aerial
  misc_feature: MA Experiment 20000182 PARAMETER Experiment Name: At_2mM_SA_P Parameter: Treatment Value: 2mM SA vs. No Treatment
  misc_feature: MA Experiment ID: 20000184 Result: Down-regulated in Transcription
  misc_feature: MA Experiment 20000184 PARAMETER Experiment Name: At_Shoots__P Parameter: Age (day) Value: 7
  misc_feature: MA Experiment 20000184 PARAMETER Experiment Name: At_Shoots__P Parameter: Tissue Value: Shoots vs. Whole Plant
  misc_feature: MA Experiment ID: 20000227 Result: Down-regulated in Transcription
  misc_feature: MA Experiment 20000227 PARAMETER Experiment Name: At_Root-Tips-vs-Tops_P Parameter: Tissue Value: Root Tips vs. Root Tops
  misc_feature: MA Experiment ID: 20000234 Result: Down-regulated in Transcription
  misc_feature: MA Experiment 20000234 PARAMETER Experiment Name: At_Siliques_P Parameter: Age (day) Value: 21
  misc_feature: MA Experiment 20000234 PARAMETER Experiment Name: At_Siliques_P Parameter: Organism Value: A. thaliana
  misc_feature: MA Experiment 20000234 PARAMETER Experiment Name: At_Siliques_P Parameter: Plant Line Value: WS
  misc_feature: MA Experiment 20000234 PARAMETER Experiment Name: At_Siliques_P Parameter: Tissue Value: Less Than 5mm Siliques vs. Whole Plant
  misc_feature: MA Experiment ID: 20000235 Result: Down-regulated in Transcription
  misc_feature: MA Experiment 20000235 PARAMETER Experiment Name: At_Siliques_P Parameter: Age (day) Value: 21
  misc_feature: MA Experiment 20000235 PARAMETER Experiment Name: At_Siliques_P Parameter: Organism Value: A. thaliana
  misc_feature: MA Experiment 20000235 PARAMETER Experiment Name: At_Siliques_P Parameter: Plant Line Value: WS
  misc_feature: MA Experiment 20000235 PARAMETER Experiment Name: At_Siliques_P Parameter: Tissue Value: 5-10mm Siliques vs. Whole Plant
  misc_feature: MA Experiment ID: 20000265 Result: Down-regulated in Transcription
  misc_feature: MA Experiment 20000265 PARAMETER Experiment Name: At_Open_Flower_P Parameter: Age (day) Value: 21
  misc_feature: MA Experiment 20000265 PARAMETER Experiment Name: At_Open_Flower_P Parameter: Plant Line Value: WS
  misc_feature: MA Experiment 20000265 PARAMETER Experiment Name: At_Open_Flower_P Parameter: Tissue Value: Closed Flower vs. Whole Plant
  misc_feature: MA Experiment ID: 20000267 Result: Up-regulated in Transcription
  misc_feature: MA Experiment 20000267 PARAMETER Experiment Name: At_Drought_P Parameter: Age (day) Value: 7
  misc_feature: MA Experiment 20000267 PARAMETER Experiment Name: At_Drought_P Parameter: Organism Value: A. thaliana
  misc_feature: MA Experiment 20000267 PARAMETER Experiment Name: At_Drought_P Parameter: Plant Line Value: WS
  misc_feature: MA Experiment 20000267 PARAMETER Experiment Name: At_Drought_P Parameter: Timepoint (hr) Value: 6
  misc_feature: MA Experiment 20000267 PARAMETER Experiment Name: At_Drought_P Parameter: Tissue Value: Whole Plant
  misc_feature: MA Experiment 20000267 PARAMETER Experiment Name: At_Drought_P Parameter: Treatment Value: Drought vs. No Drought
  misc_feature: MA Experiment ID: 20000286 Result: Down-regulated in Transcription
  misc_feature: MA Experiment 20000286 PARAMETER Experiment Name: At_Open_Flower_P Parameter: Age (day) Value: 21
  misc_feature: MA Experiment 20000286 PARAMETER Experiment Name: At_Open_Flower_P Parameter: Plant Line Value: WS
  misc_feature: MA Experiment 20000286 PARAMETER Experiment Name: At_Open_Flower_P Parameter: Tissue Value: Half Open vs. Whole Plant
  misc_feature: MA Experiment ID: 20000436 Result: Up-regulated in Transcription
  misc_feature: MA Experiment 20000436 PARAMETER Experiment Name: At_Drought_P Parameter: Age (day) Value: 7
  misc_feature: MA Experiment 20000436 PARAMETER Experiment Name: At_Drought_P Parameter: Organism Value: A. thaliana
  misc_feature: MA Experiment 20000436 PARAMETER Experiment Name: At_Drought_P Parameter: Plant Line Value: WS
  misc_feature: MA Experiment 20000436 PARAMETER Experiment Name: At_Drought_P Parameter: Timepoint (hr) Value: 12
  misc_feature: MA Experiment 20000436 PARAMETER Experiment Name: At_Drought_P Parameter: Tissue Value: Whole Plant
  misc_feature: MA Experiment 20000436 PARAMETER Experiment Name: At_Drought_P Parameter: Treatment Value: Drought vs. No Drought
  misc_feature: MA Experiment ID: 20000437 Result: Up-regulated in Transcription
  misc_feature: MA Experiment 20000437 PARAMETER Experiment Name: At_Drought_P Parameter: Age (day) Value: 8
  misc_feature: MA Experiment 20000437 PARAMETER Experiment Name: At_Drought_P Parameter: Organism Value: A. thaliana
  misc_feature: MA Experiment 20000437 PARAMETER Experiment Name: At_Drought_P Parameter: Plant Line Value: WS
  misc_feature: MA Experiment 20000437 PARAMETER Experiment Name: At_Drought_P Parameter: Timepoint (hr) Value: 24
  misc_feature: MA Experiment 20000437 PARAMETER Experiment Name: At_Drought_P Parameter: Tissue Value: Whole Plant
  misc_feature: MA Experiment 20000437 PARAMETER Experiment Name: At_Drought_P Parameter: Treatment Value: Drought vs. No Drought
  misc_feature: MA Experiment ID: 20000438 Result: Down-regulated in Transcription
  misc_feature: MA Experiment 20000438 PARAMETER Experiment Name: At_Shoots__P Parameter: Age (day) Value: 14
  misc_feature: MA Experiment 20000438 PARAMETER Experiment Name: At_Shoots__P Parameter: Tissue Value: Shoots vs. Whole Plant
  misc_feature: MA Experiment ID: 20000439 Result: Down-regulated in Transcription
  misc_feature: MA Experiment 20000439 PARAMETER Experiment Name: At_Roots__P Parameter: Age (day) Value: 14 vs. 21
  misc_feature: MA Experiment 20000439 PARAMETER Experiment Name: At_Roots__P Parameter: Organism Value: A. thaliana
  misc_feature: MA Experiment 20000439 PARAMETER Experiment Name: At_Roots__P Parameter: Tissue Value: Roots vs. Whole Plant
  misc_feature: MA Experiment ID: 20000460 Result: Up-regulated in Transcription
  misc_feature: MA Experiment 20000460 PARAMETER Experiment Name: At_10percent_PEG_P Parameter: Age (day) Value: 12
  misc_feature: MA Experiment 20000460 PARAMETER Experiment Name: At_10percent_PEG_P Parameter: Organism Value: A. thaliana
  misc_feature: MA Experiment 20000460 PARAMETER Experiment Name: At_10percent_PEG_P Parameter: Plant Line Value: WS
  misc_feature: MA Experiment 20000460 PARAMETER Experiment Name: At_10percent_PEG_P Parameter: Timepoint (day) Value: 12
  misc_feature: MA Experiment 20000460 PARAMETER Experiment Name: At_10percent_PEG_P Parameter: Tissue Value: Whole Plant
  misc_feature: MA Experiment 20000460 PARAMETER Experiment Name: At_10percent_PEG_P Parameter: Treatment Value: 10percent PEG vs. No Treatment
  misc_feature: MA Experiment ID: 20000495 Result: Down-regulated in Transcription
  misc_feature: MA Experiment 20000495 PARAMETER Experiment Name: At_Guard_Cells_P Parameter: Harvest Date Value: 8/2/2002
  misc_feature: MA Experiment 20000495 PARAMETER Experiment Name: At_Guard_Cells_P Parameter: Organism Value: A. thaliana
  misc_feature: MA Experiment 20000495 PARAMETER Experiment Name: At_Guard_Cells_P Parameter: Tissue Value: Guard Cells vs. Leaves
  misc_feature: MA Experiment ID: 20000573 Result: Down-regulated in Transcription
  misc_feature: MA Experiment 20000573 PARAMETER Experiment Name: At_100uM_ABA_Mutants__P Parameter: Organism Value: A. thaliana
  misc_feature: MA Experiment 20000573 PARAMETER Experiment Name: At_100uM_ABA_Mutants__P Parameter: Plant Line Value: CS22 vs. Ler wt
  misc_feature: MA Experiment 20000573 PARAMETER Experiment Name: At_100uM_ABA_Mutants__P Parameter: Timepoint (hr) Value: N/A
  misc_feature: MA Experiment 20000573 PARAMETER Experiment Name: At_100uM_ABA_Mutants__P Parameter: Tissue Value: Whole Plant
  misc_feature: MA Experiment 20000573 PARAMETER Experiment Name: At_100uM_ABA_Mutants__P Parameter: Treatment Value: None
  misc_feature: MA Experiment ID: 20000574 Result: Down-regulated in Transcription
  misc_feature: MA Experiment 20000574 PARAMETER Experiment Name: At_100uM_ABA_Mutants__P Parameter: Organism Value: A. thaliana
  misc_feature: MA Experiment 20000574 PARAMETER Experiment Name: At_100uM_ABA_Mutants__P Parameter: Plant Line Value: CS23 vs. Ler wt
  misc_feature: MA Experiment 20000574 PARAMETER Experiment Name: At_100uM_ABA_Mutants__P Parameter: Timepoint (hr) Value: N/A
  misc_feature: MA Experiment 20000574 PARAMETER Experiment Name: At_100uM_ABA_Mutants__P Parameter: Tissue Value: Whole Plant
  misc_feature: MA Experiment 20000574 PARAMETER Experiment Name: At_100uM_ABA_Mutants__P Parameter: Treatment Value: None
  misc_feature: MA Experiment ID: 20000794 Result: Up-regulated in Transcription
  misc_feature: MA Experiment 20000794 PARAMETER Experiment Name: At_Petals_P Parameter: Age (day) Value: 23-25 days
  misc_feature: MA Experiment 20000794 PARAMETER Experiment Name: At_Petals_P Parameter: Plant Line Value: WS
  misc_feature: MA Experiment 20000794 PARAMETER Experiment Name: At_Petals_P Parameter: Tissue Value: Petals vs. Whole plant
  misc_feature: MA Experiment ID: 20001247 Result: Up-regulated in Transcription
  misc_feature: MA Experiment 20001247 PARAMETER Experiment Name: At_Far-red-induction_P Parameter: Age (day) Value: 7
  misc_feature: MA Experiment 20001247 PARAMETER Experiment Name: At_Far-red-induction_P Parameter: Light Value: Far-red vs. White
  misc_feature: MA Experiment 20001247 PARAMETER Experiment Name: At_Far-red-induction_P Parameter: Organism Value: A. thaliana
  misc_feature: MA Experiment 20001247 PARAMETER Experiment Name: At_Far-red-induction_P Parameter: Plant Line Value: Columbia
  misc_feature: MA Experiment 20001247 PARAMETER Experiment Name: At_Far-red-induction_P Parameter: Timepoint (hr) Value: 1
  misc_feature: MA Experiment 20001247 PARAMETER Experiment Name: At_Far-red-induction_P Parameter: Tissue Value: Whole Plant
  misc_feature: MA Experiment ID: 20001248 Result: Up-regulated in Transcription
  misc_feature: MA Experiment 20001248 PARAMETER Experiment Name: At_Far-red-induction_P Parameter: Age (day) Value: 7
  misc_feature: MA Experiment 20001248 PARAMETER Experiment Name: At_Far-red-induction_P Parameter: Light Value: Far-red vs. White
  misc_feature: MA Experiment 20001248 PARAMETER Experiment Name: At_Far-red-induction_P Parameter: Organism Value: A. thaliana
  misc_feature: MA Experiment 20001248 PARAMETER Experiment Name: At_Far-red-induction_P Parameter: Plant Line Value: Columbia
  misc_feature: MA Experiment 20001248 PARAMETER Experiment Name: At_Far-red-induction_P Parameter: Timepoint (hr) Value: 4
  misc_feature: MA Experiment 20001248 PARAMETER Experiment Name: At_Far-red-induction_P Parameter: Tissue Value: Whole Plant
  misc_feature: MA Experiment ID: 20001451 Result: Up-regulated in Transcription
  misc_feature: MA Experiment 20001451 PARAMETER Experiment Name: At_Far-red-induction_P Parameter: Age (day) Value: 7
  misc_feature: MA Experiment 20001451 PARAMETER Experiment Name: At_Far-red-induction_P Parameter: Light Value: Far-red vs. White
  misc_feature: MA Experiment 20001451 PARAMETER Experiment Name: At_Far-red-induction_P Parameter: Organism Value: A. thaliana
  misc_feature: MA Experiment 20001451 PARAMETER Experiment Name: At_Far-red-induction_P Parameter: Plant Line Value: Columbia
  misc_feature: MA Experiment 20001451 PARAMETER Experiment Name: At_Far-red-induction_P Parameter: Timepoint (hr) Value: 24
  misc_feature: MA Experiment 20001451 PARAMETER Experiment Name: At_Far-red-induction_P Parameter: Tissue Value: Whole Plant
  misc_feature: MA Experiment ID: 20001554 Result: Up-regulated in Transcription
  misc_feature: MA Experiment 20001554 PARAMETER Experiment Name: At_Drought_Soil_Dry_P Parameter: Age (day) Value: 21
  misc_feature: MA Experiment 20001554 PARAMETER Experiment Name: At_Drought_Soil_Dry_P Parameter: Organism Value: A. thaliana
  misc_feature: MA Experiment 20001554 PARAMETER Experiment Name: At_Drought_Soil_Dry_P Parameter: Plant Line Value: WS
  misc_feature: MA Experiment 20001554 PARAMETER Experiment Name: At_Drought_Soil_Dry_P Parameter: Post Timepoint (hr) Value: None
  misc_feature: MA Experiment 20001554 PARAMETER Experiment Name: At_Drought_Soil_Dry_P Parameter: Post-Treatment Value: None
  misc_feature: MA Experiment 20001554 PARAMETER Experiment Name: At_Drought_Soil_Dry_P Parameter: Timepoint (day) Value: 7
  misc_feature: MA Experiment 20001554 PARAMETER Experiment Name: At_Drought_Soil_Dry_P Parameter: Treatment Value: Drought vs. No Drought
  misc_feature: MA Experiment ID: 20001904 Result: Up-regulated in Transcription
  misc_feature: MA Experiment 20001904 PARAMETER Experiment Name: At_Drought_Reproduction_P Parameter: Age (day) Value: 37
  misc_feature: MA Experiment 20001904 PARAMETER Experiment Name: At_Drought_Reproduction_P Parameter: Organism Value: A. thaliana
  misc_feature: MA Experiment 20001904 PARAMETER Experiment Name: At_Drought_Reproduction_P Parameter: Plant Line Value: WS
  misc_feature: MA Experiment 20001904 PARAMETER Experiment Name: At_Drought_Reproduction_P Parameter: Timepoint (day) Value: 7
  misc_feature: MA Experiment 20001904 PARAMETER Experiment Name: At_Drought_Reproduction_P Parameter: Tissue Value: Rosettes
  misc_feature: MA Experiment 20001904 PARAMETER Experiment Name: At_Drought_Reproduction_P Parameter: Treatment Value: Drought vs. No Drought
  misc_feature: MA Experiment ID: 20001905 Result: Up-regulated in Transcription
  misc_feature: MA Experiment 20001905 PARAMETER Experiment Name: At_Drought_Reproduction_P Parameter: Age (day) Value: 40
  misc_feature: MA Experiment 20001905 PARAMETER Experiment Name: At_Drought_Reproduction_P Parameter: Organism Value: A. thaliana
  misc_feature: MA Experiment 20001905 PARAMETER Experiment Name: At_Drought_Reproduction_P Parameter: Plant Line Value: WS
  misc_feature: MA Experiment 20001905 PARAMETER Experiment Name: At_Drought_Reproduction_P Parameter: Timepoint (day) Value: 10
  misc_feature: MA Experiment 20001905 PARAMETER Experiment Name: At_Drought_Reproduction_P Parameter: Tissue Value: Rosettes
  misc_feature: MA Experiment 20001905 PARAMETER Experiment Name: At_Drought_Reproduction_P Parameter: Treatment Value: Drought vs. No Drought
  misc_feature: MA Experiment ID: 20001906 Result: Up-regulated in Transcription
  misc_feature: MA Experiment 20001906 PARAMETER Experiment Name: At_Drought_Reproduction_P Parameter: Age (day) Value: 35
  misc_feature: MA Experiment 20001906 PARAMETER Experiment Name: At_Drought_Reproduction_P Parameter: Organism Value: A. thaliana
  misc_feature: MA Experiment 20001906 PARAMETER Experiment Name: At_Drought_Reproduction_P Parameter: Plant Line Value: WS
  misc_feature: MA Experiment 20001906 PARAMETER Experiment Name: At_Drought_Reproduction_P Parameter: Timepoint (day) Value: 5
  misc_feature: MA Experiment 20001906 PARAMETER Experiment Name: At_Drought_Reproduction_P Parameter: Tissue Value: Siliques
  misc_feature: MA Experiment 20001906 PARAMETER Experiment Name: At_Drought_Reproduction_P Parameter: Treatment Value: Drought vs. No Drought
  misc_feature: MA Experiment ID: 20001908 Result: Up-regulated in Transcription
  misc_feature: MA Experiment 20001908 PARAMETER Experiment Name: At_Drought_Reproduction_P Parameter: Age (day) Value: 40
  misc_feature: MA Experiment 20001908 PARAMETER Experiment Name: At_Drought_Reproduction_P Parameter: Organism Value: A. thaliana
  misc_feature: MA Experiment 20001908 PARAMETER Experiment Name: At_Drought_Reproduction_P Parameter: Plant Line Value: WS
  misc_feature: MA Experiment 20001908 PARAMETER Experiment Name: At_Drought_Reproduction_P Parameter: Timepoint (day) Value: 10
  misc_feature: MA Experiment 20001908 PARAMETER Experiment Name: At_Drought_Reproduction_P Parameter: Tissue Value: Siliques
  misc_feature: MA Experiment 20001908 PARAMETER Experiment Name: At_Drought_Reproduction_P Parameter: Treatment Value: Drought vs. No Drought
  misc_feature: MA Experiment ID: 20001911 Result: Up-regulated in Transcription
  misc_feature: MA Experiment 20001911 PARAMETER Experiment Name: At_Drought_Reproduction_P Parameter: Age (day) Value: 40
  misc_feature: MA Experiment 20001911 PARAMETER Experiment Name: At_Drought_Reproduction_P Parameter: Organism Value: A. thaliana
  misc_feature: MA Experiment 20001911 PARAMETER Experiment Name: At_Drought_Reproduction_P Parameter: Plant Line Value: WS
  misc_feature: MA Experiment 20001911 PARAMETER Experiment Name: At_Drought_Reproduction_P Parameter: Timepoint (day) Value: 10
  misc_feature: MA Experiment 20001911 PARAMETER Experiment Name: At_Drought_Reproduction_P Parameter: Tissue Value: Flowers
  misc_feature: MA Experiment 20001911 PARAMETER Experiment Name: At_Drought_Reproduction_P Parameter: Treatment Value: Drought vs. No Drought
acttcactctctaatttccttctctctatctctcaccatattcgcgattaaaaactctcaacttttctctcaaatttctgatcctttgatccaacagttagaagaagattcatctgatcatggccctcgaagcgatgaacactccaacttcttctttcaccagaatcgaaacgaaagaagatttgatgaacgacgccgttttcattgagccgtggcttaaacgcaaacgctccaaacgtcagcgttctcacagcccttcttcgtcttcttcctcaccgcctcgatctcgacccaaatcccagaatcaagatcttacggaagaagagtatctcgctctttgtctcctcatgctcgctaaagatcaaccgtcgcaaacgcgatttcatcaacagtcgcaatcgttaacgccgccgccagaatcaaagaaccttccgtacaagtgtaacgtctgtgaaaaagcgtttccttcctatcaggctttaggcggtcacaaagcaagtcaccgaatcaaaccaccaaccgtaatctcaacaaccgccgatgattcaacagctccgaccatctccatcgtcgccggagaaaaacatccgattgctgcctccggaaagatccacgagtgttcaatctgtcataaagtgtttccgacgggtcaagctttaggcggtcacaaacgttgtcactacgaaggcaacctcggcggcggaggaggaggaggaagcaaatcaatcagtcacagtggaagcgtgtcgagcacggtatcggaagaaaggagccaccgtggattcatcgatctaaacctaccggcgttacctgaactcagccttcatcacaatccaatcgtcgacgaagagatcttgagtccgttgaccggtaaaaaaccgcttttgttgaccgatcacgaccaagtcatcaagaaagaagatttatctttaaaaatctaatactcgactattaattcttgtgtgatttttttcgttacaaccatagtttcattttcatttttttagttacaaatttttaattgttctgatttggattgaatattggtatattgttaggggttg

SEQ ID NO: 77606 - protein, 273 aa, Arabidopsis thaliana; identical to SEQ ID NO: 37506
  peptide (1)..(273): Ceres Seq. ID no. 12576983
  misc_feature (165)..(187): Pfam Name: Zinc finger, C2H2 type Pfam Description: Zinc finger, C2H2 type
  misc_feature (1)..(273): Homolog of NCBI NO: 15230889 NR Description: zinc finger protein, putative; protein id: supported by cDNA: gi_15028256, supported by cDNA: gi_9965732
  misc_feature (1)..(256): Homolog of NCBI NO: 439493 NR Description: zinc-finger protein [Petunia x hybrida]
  misc_feature (21)..(256): Homolog of NCBI NO: 7228329 NR Description: putative TFIIIA (or kruppel)-like zinc finger
  misc_feature (48)..(253): Homolog of NCBI NO: 15237692 NR Description: putative c2h2 zinc finger transcription factor; id: At5g04340.1, supported by cDNA: gi_2511545 [Arabidopsis >gi|2511546|gb|AAB80922.1| putative c2h2 zinc finger
  misc_feature (48)..(253): Homolog of NCBI NO: 26452746 NR Description: putative C2H2 zinc finger transcription factor
  misc_feature (55)..(254): Homolog of NCBI NO: 6693033 NR Description: T22C5.18 [Arabidopsis thaliana]
  misc_feature (55)..(254): Homolog of NCBI NO: 15217692 NR Description: salt-tolerance zinc finger protein; protein id: supported by cDNA: gi_14334649, supported by cDNA: gi_17104582,
  misc_feature (1)..(256): Homolog of NCBI NO: 33331578 NR Description: zinc finger protein [Capsicum annuum]
  misc_feature (55)..(254): Homolog of NCBI NO: 1418323 NR Description: zinc finger protein [Arabidopsis thaliana]
  misc_feature (46)..(257): Homolog of NCBI NO: 4666360 NR Description: zinc-finger protein 1 [Datisca glomerata]

SEQ ID NO: 77607 - protein, 268 aa, Arabidopsis thaliana; identical to SEQ ID NO: 37507
  peptide (1)..(268): Ceres Seq. ID no. 12576984
  misc_feature (160)..(182): Pfam Name: Zinc finger, C2H2 type Pfam Description: Zinc finger, C2H2 type
  misc_feature (1)..(268): Homolog of NCBI NO: 15230889 NR Description: zinc finger protein, putative; protein id: supported by cDNA: gi_15028256, supported by cDNA: gi_9965732
  misc_feature (1)..(251): Homolog of NCBI NO: 439493 NR Description: zinc-finger protein [Petunia x hybrida]
  misc_feature (16)..(251): Homolog of NCBI NO: 7228329 NR Description: putative TFIIIA (or kruppel)-like zinc finger
  misc_feature (43)..(248): Homolog of NCBI NO: 15237692 NR Description: putative c2h2 zinc finger transcription factor; id: At5g04340.1, supported by cDNA: gi_2511545 [Arabidopsis >gi|2511546|gb|AAB80922.1| putative c2h2 zinc finger
  misc_feature (43)..(248): Homolog of NCBI NO: 26452746 NR Description: putative C2H2 zinc finger transcription factor
  misc_feature (50)..(249): Homolog of NCBI NO: 6693033 NR Description: T22C5.18 [Arabidopsis thaliana]
  misc_feature (50)..(249): Homolog of NCBI NO: 15217692 NR Description: salt-tolerance zinc finger protein; protein id: supported by cDNA: gi_14334649, supported by cDNA: gi_17104582,
  misc_feature (1)..(251): Homolog of NCBI NO: 33331578 NR Description: zinc finger protein [Capsicum annuum]
  misc_feature (50)..(249): Homolog of NCBI NO: 1418323 NR Description: zinc finger protein [Arabidopsis thaliana]
  misc_feature (41)..(252): Homolog of NCBI NO: 4666360 NR Description: zinc-finger protein 1 [Datisca glomerata]

SEQ ID NO: 77608 - protein, 251 aa, Arabidopsis thaliana; identical to SEQ ID NO: 37508
  peptide (1)..(251): Ceres Seq. ID no. 12576985
  misc_feature (143)..(165): Pfam Name: Zinc finger, C2H2 type Pfam Description: Zinc finger, C2H2 type
  misc_feature (1)..(251): Homolog of NCBI NO: 15230889 NR Description: zinc finger protein, putative; protein id: supported by cDNA: gi_15028256, supported by cDNA: gi_9965732
  misc_feature (1)..(234): Homolog of NCBI NO: 439493 NR Description: zinc-finger protein [Petunia x hybrida]
  misc_feature (1)..(234): Homolog of NCBI NO: 7228329 NR Description: putative TFIIIA (or kruppel)-like zinc finger
  misc_feature (26)..(231): Homolog of NCBI NO: 15237692 NR Description: putative c2h2 zinc finger transcription factor; id: At5g04340.1, supported by cDNA: gi_2511545 [Arabidopsis >gi|2511546|gb|AAB80922.1| putative c2h2 zinc finger
  misc_feature (26)..(231): Homolog of NCBI NO: 26452746 NR Description: putative C2H2 zinc finger transcription factor
  misc_feature (33)..(232): Homolog of NCBI NO: 6693033 NR Description: T22C5.18 [Arabidopsis thaliana]
  misc_feature (33)..(232): Homolog of NCBI NO: 15217692 NR Description: salt-tolerance zinc finger protein; protein id: supported by cDNA: gi_14334649, supported by cDNA: gi_17104582,
  misc_feature (1)..(234): Homolog of NCBI NO: 33331578 NR Description: zinc finger protein [Capsicum annuum]
  misc_feature (33)..(232): Homolog of NCBI NO: 1418323 NR Description: zinc finger protein [Arabidopsis thaliana]
  misc_feature (24)..(235): Homolog of NCBI NO: 4666360 NR Description: zinc-finger protein 1 [Datisca glomerata]

SEQ ID NO: 77609 - DNA, 2111 bp, Arabidopsis thaliana
  misc_feature (1)..(2111): Ceres Seq. ID no. 12576990
  misc_feature: MA Experiment ID: 108434 Result: Down-regulated in Transcription
  misc_feature: MA Experiment 108434 PARAMETER Experiment Name: At_Root_Tips_cDNA_P Parameter: Tissue Value: Root Tips
  misc_feature: MA Experiment ID: 108462 Result: Up-regulated in Transcription
  misc_feature: MA Experiment 108462 PARAMETER Experiment Name: At_Germinating_Seeds_cDNA_P Parameter: Age (day) Value: 2 vs. 0
  misc_feature: MA Experiment 108462 PARAMETER Experiment Name: At_Germinating_Seeds_cDNA_P Parameter: Tissue Value: Germinating Seeds
  misc_feature: MA Experiment ID: 108463 Result: Up-regulated in Transcription
  misc_feature: MA Experiment 108463 PARAMETER Experiment Name: At_Germinating_Seeds_cDNA_P Parameter: Age (day) Value: 3 vs. 0
  misc_feature: MA Experiment 108463 PARAMETER Experiment Name: At_Germinating_Seeds_cDNA_P Parameter: Tissue Value: Germinating Seeds
  misc_feature: MA Experiment ID: 108464 Result: Up-regulated in Transcription
  misc_feature: MA Experiment 108464 PARAMETER Experiment Name: At_Germinating_Seeds_cDNA_P Parameter: Age (day) Value: 4 vs. 0
  misc_feature: MA Experiment 108464 PARAMETER Experiment Name: At_Germinating_Seeds_cDNA_P Parameter: Tissue Value: Germinating Seeds
  misc_feature: MA Experiment ID: 108473 Result: Up-regulated in Transcription
  misc_feature: MA Experiment 108473 PARAMETER Experiment Name: At_Drought_Flowers_cDNA_P Parameter: Timepoint (hr) Value: 7 d
  misc_feature: MA Experiment 108473 PARAMETER Experiment Name: At_Drought_Flowers_cDNA_P Parameter: Tissue Value: Flower
  misc_feature: MA Experiment 108473 PARAMETER Experiment Name: At_Drought_Flowers_cDNA_P Parameter: Treatment Value: Drought vs. No Drought
  misc_feature: MA Experiment ID: 108572 Result: Up-regulated in Transcription
  misc_feature: MA Experiment 108572 PARAMETER Experiment Name: At_Drought_cDNA_P Parameter: Timepoint (hr) Value: 1
  misc_feature: MA Experiment 108572 PARAMETER Experiment Name: At_Drought_cDNA_P Parameter: Tissue Value: Aerial
  misc_feature: MA Experiment 108572 PARAMETER Experiment Name: At_Drought_cDNA_P Parameter: Treatment Value: Drought vs. No Drought
  misc_feature: MA Experiment ID: 108573 Result: Up-regulated in Transcription
  misc_feature: MA Experiment 108573 PARAMETER Experiment Name: At_Drought_cDNA_P Parameter: Timepoint (hr) Value: 6
  misc_feature: MA Experiment 108573 PARAMETER Experiment Name: At_Drought_cDNA_P Parameter: Tissue Value: Aerial
  misc_feature: MA Experiment 108573 PARAMETER Experiment Name: At_Drought_cDNA_P Parameter: Treatment Value: Drought vs. No Drought
  misc_feature: MA Experiment ID: 20000071 Result: Up-regulated in Transcription
  misc_feature: MA Experiment 20000071 PARAMETER Experiment Name: At_100uM_ABA_Mutants_cDNA_P Parameter: Plant Line Value: CS8104
  misc_feature: MA Experiment 20000071 PARAMETER Experiment Name: At_100uM_ABA_Mutants_cDNA_P Parameter: Timepoint (hr) Value: 6
  misc_feature: MA Experiment 20000071 PARAMETER Experiment Name: At_100uM_ABA_Mutants_cDNA_P Parameter: Tissue Value: Aerial
  misc_feature: MA Experiment 20000071 PARAMETER Experiment Name: At_100uM_ABA_Mutants_cDNA_P Parameter: Treatment Value: 100uM ABA vs. No Treatment
  misc_feature: MA Experiment ID: 20000093 Result: Up-regulated in Transcription
  misc_feature: MA Experiment 20000093 PARAMETER Experiment Name: At_42deg_Heat_cDNA_P Parameter: Temperature (deg C) Value: 42 vs. 22
  misc_feature: MA Experiment 20000093 PARAMETER Experiment Name: At_42deg_Heat_cDNA_P Parameter: Timepoint (hr) Value: 0.5
  misc_feature: MA Experiment 20000093 PARAMETER Experiment Name: At_42deg_Heat_cDNA_P Parameter: Tissue Value: Aerial
  misc_feature: MA Experiment ID: 20000113 Result: Up-regulated in Transcription
  misc_feature: MA Experiment 20000113 PARAMETER Experiment Name: At_42deg_Heat_cDNA_P Parameter: Temperature (deg C) Value: 42 vs. 22
  misc_feature: MA Experiment 20000113 PARAMETER Experiment Name: At_42deg_Heat_cDNA_P Parameter: Timepoint (hr) Value: 8
  misc_feature: MA Experiment 20000113 PARAMETER Experiment Name: At_42deg_Heat_cDNA_P Parameter: Tissue Value: Aerial
  misc_feature: MA Experiment ID: 20000117 Result: Up-regulated in Transcription
  misc_feature: MA Experiment 20000117 PARAMETER Experiment Name: At_100uM_ABA_Mutants_cDNA_P Parameter: Plant Line Value: Columbia
  misc_feature: MA Experiment 20000117 PARAMETER Experiment Name: At_100uM_ABA_Mutants_cDNA_P Parameter: Timepoint (hr) Value: 6
  misc_feature: MA Experiment 20000117 PARAMETER Experiment Name: At_100uM_ABA_Mutants_cDNA_P Parameter: Tissue Value: Aerial
  misc_feature: MA Experiment 20000117 PARAMETER Experiment Name: At_100uM_ABA_Mutants_cDNA_P Parameter: Treatment Value: 100uM ABA vs. No Treatment
  misc_feature: MA Experiment ID: 20000144 Result: Up-regulated in Transcription
  misc_feature: MA Experiment 20000144 PARAMETER Experiment Name: At_42deg_Heat_cDNA_P Parameter: Temperature (deg C) Value: 42 vs. 22
  misc_feature: MA Experiment 20000144 PARAMETER Experiment Name: At_42deg_Heat_cDNA_P Parameter: Timepoint (hr) Value: 1
  misc_feature: MA Experiment 20000144 PARAMETER Experiment Name: At_42deg_Heat_cDNA_P Parameter: Tissue Value: Aerial
  misc_feature: MA Experiment ID: 20000224 Result: Down-regulated in Transcription
  misc_feature: MA Experiment ID: 20000307 Result: Up-regulated in Transcription
  misc_feature: MA Experiment 20000307 PARAMETER Experiment Name: At_Germinating_Seeds_Sub_P Parameter: Age (hr) Value: 24 vs. 0
  misc_feature: MA Experiment 20000307 PARAMETER Experiment Name: At_Germinating_Seeds_Sub_P Parameter: Organism Value: A. thaliana
  misc_feature: MA Experiment 20000307 PARAMETER Experiment Name: At_Germinating_Seeds_Sub_P Parameter: Plant Line Value: WS
  misc_feature: MA Experiment 20000307 PARAMETER Experiment Name: At_Germinating_Seeds_Sub_P Parameter: Tissue Value: Germinating Seeds
  misc_feature: MA Experiment ID: 20000314 Result: Down-regulated in Transcription
  misc_feature: MA Experiment 20000314 PARAMETER Experiment Name: At_14day_Shoots-Roots_Sub_P Parameter: Age (day) Value: 14
  misc_feature: MA Experiment 20000314 PARAMETER Experiment Name: At_14day_Shoots-Roots_Sub_P Parameter: Organism Value: A. thaliana
  misc_feature: MA Experiment 20000314 PARAMETER Experiment Name: At_14day_Shoots-Roots_Sub_P Parameter: Plant Line Value: WS
  misc_feature: MA Experiment 20000314 PARAMETER Experiment Name: At_14day_Shoots-Roots_Sub_P Parameter: Tissue Value: Roots vs. Whole Plant
  misc_feature: MA Experiment ID: 20000327 Result: Up-regulated in Transcription
  misc_feature: MA Experiment 20000327 PARAMETER Experiment Name: At_42deg_Heat_Sub_P Parameter: Age (day) Value: 14
  misc_feature: MA Experiment 20000327 PARAMETER Experiment Name: At_42deg_Heat_Sub_P Parameter: Organism Value: A. thaliana
  misc_feature: MA Experiment 20000327 PARAMETER Experiment Name: At_42deg_Heat_Sub_P Parameter: Plant Line Value: WS
  misc_feature: MA Experiment 20000327 PARAMETER Experiment Name: At_42deg_Heat_Sub_P Parameter: Temperature (deg C) Value: 42 vs. 22
  misc_feature: MA Experiment 20000327 PARAMETER Experiment Name: At_42deg_Heat_Sub_P Parameter: Timepoint (hr) Value: 1
  misc_feature: MA Experiment 20000327 PARAMETER Experiment Name: At_42deg_Heat_Sub_P Parameter: Tissue Value: Aerial
  misc_feature: MA Experiment ID: 20000355 Result: Down-regulated in Transcription
  misc_feature: MA Experiment 20000355 PARAMETER Experiment Name: At_Siliques_Sub_P Parameter: Age (day) Value: 21
  misc_feature: MA Experiment 20000355 PARAMETER Experiment Name: At_Siliques_Sub_P Parameter: Organism Value: A. thaliana
  misc_feature: MA Experiment 20000355 PARAMETER Experiment Name: At_Siliques_Sub_P Parameter: Plant Line Value: WS
  misc_feature: MA Experiment 20000355 PARAMETER Experiment Name: At_Siliques_Sub_P Parameter: Tissue Value: Less Than 5mm Siliques vs. Whole Plant
  misc_feature: MA Experiment ID: 20000440 Result: Down-regulated in Transcription
  misc_feature: MA Experiment 20000440 PARAMETER Experiment Name: At_Closed-Flower__Sub_P Parameter: Tissue Value: Closed Flower vs. Whole Plant
gaaccaatcaccctaaggggacacttaaagagagaaacaaatccttcttctaaaatattcttcaatcttcttctcgaagcttctccaaaaatggcgattacttcttctagaaccaccagatcaaacggatctgcttcgctccgatccaaatcaccgtccggtcgattctgtggcgtttactcaaaccgtatgccgtcatcatctccgtcgtcgtcaggtttcgcttcttccacaagctcaagtttctcctcaccgtctacagcgtttttcagcagccacaatcagaacaaccaccaccaacacagatctgcttctccgacgcgtgtgaatctattcacatcagctccgatgacgcaatcgtttcgttactcaatcgataacagatctatatcaccgaatcgatccatcgctgtttcttccaacaaacctagcaatcatcacaagattccggattcgaggagaagatgtatgtgctctccgacaacgcatcctggttcattccggtgtagtctacacaagaacgtcgcgaatccacatggtcaaggtacagcttcgtatacaacgaatggattgaatatgcgtcgatctgcgatgacgaattctcttgtgagaattggtggtgttgaaggtgaatgggtgcgaagagctttgactactttgattagaccatcttcacatcaactaaagagaagatctgcttatgagcctcgtcgtagtagactcgcatctatgtcgaaagcagaagatctttgaatctctcttcaggtttgttcttgtttttgatatactcagatctgccatgaacgagttgaatcaaggagcagaatcggagctgagtcataccggaccgagtcaaattcggagctgagttataccggaccgagttatgtaaaacggtgactaagacgacaccgtttttgttttgttgggtgggagatgagatgatgatgatgcattgtacatacacatattgcttattgaagcagaacaaaaaaatttcgcaagtcgaaagtatctagaaatctaaaaatggaaaatagtagtgacgaattgggtaattaaaatctggaaaaggacttagtagtaaatattgtttggattcaactttgcaaatctctccatctccattgttcgttgccttcaccgttagtttgttccgtcaagtcaacgttctctattctccgtcgttgacccgttctgtttgccgttaaccgtcgtcgtgtgttatgtgtgttccgttattatttctccaggtatgtgttgttcgtcgtgtcaggtttcgtacaatgaggagaagatgattacttaaccgttacgttcaactttggaatattttgggtttgtggactttggaagaaaaatgaatttggactatgagaaaaatcaaatatatgacctaaaacacggagaatttgataaaggacgatcgaatatgagtgattttgattcgtggaacgattaaggttttggttttggagctggagaatgtgaaagattcgaaggaatcagatttttctctggaatttgtgaatcacagatttagattcctgaaacggttgaggttaaagtgaaaagattcaatgaaatcatatttttaccataaatatctcaagaaggatatggtaaatgatgaaattcgtgagggtaagtttggaaagtaaaagattcttgaacggtatatatgagaaaaggacagctggccgatgaattgagaacagcccaacacgattacgttggggattccaacgtcttccttatctcgagggattaaagttggattatactattgtatgcataggtcgattttatagatcccttgattaattggttaattaaatataaactatactccttaggtttgctttagttgactgattatatcgtaatctctaagtactaggttctgtgtaaccttttcttcacggtagatgatggatgcactttttgttaatttggttttgattgtgttggattattctgtactttctttactcgtttagtttacttgactatttttatatatctgtaactctttctatatgttttctcattgtttttggaagttgaatatgatttactctattttcttctaaacatcataaaatgatacg

SEQ ID NO: 77610 - protein, 250 aa, Arabidopsis thaliana
  peptide (1)..(250): Ceres Seq. ID no. 12576991
  misc_feature (31)..(250): Homolog of NCBI NO: 15238753 NR Description: serine-rich protein; protein id: At5g25280.1 thaliana] >gi|15146224|gb|AAK83595.1| AT5g25280/F18G18_20 thaliana] >gi|15529141|gb|AAK97665.1| AT5g25280/F18G18_20
  misc_feature (31)..(250): Homolog of NCBI NO: 21618161 NR Description: serine-rich protein [Arabidopsis thaliana]
  misc_feature (31)..(249): Homolog of NCBI NO: 15238947 NR Description: putative protein; protein id: At5g11090.1, by cDNA: 32958. [Arabidopsis thaliana] >gi|11358372|pir||T51798
  misc_feature (31)..(250): Homolog of NCBI NO: 24461857 NR Description: CTV.15 [Poncirus trifoliata]
  misc_feature (78)..(240): Homolog of NCBI NO: 15241329 NR Description: putative protein; protein id: At5g20370.1
EPITLRGHLKRETNPSSKIFFNLLLEASPKMAITSSRTTRSNGSASLRSKSPSGRFCGVYSNRMPSSSPSSSGFASSTSSSFSSPSTAFFSSHNQNNHHQHRSASPTRVNLFTSAPMTQSFRYSIDNRSISPNRSIAVSSNKPSNHHKIPDSRRRCMCSPTTHPGSFRCSLHKNVANPHGQGTASYTTNGLNMRRSAMTNSLVRIGGVEGEWVRRALTTLIRPSSHQLKRRSAYEPRRSRLASMSKAEDL

SEQ ID NO: 77611 - protein, 220 aa, Arabidopsis thaliana; identical to SEQ ID NO: 38621
  peptide (1)..(220): Ceres Seq. ID no. 12576992
  misc_feature (1)..(220): Homolog of NCBI NO: 15238753 NR Description: serine-rich protein; protein id: At5g25280.1 thaliana] >gi|15146224|gb|AAK83595.1| AT5g25280/F18G18_20 thaliana] >gi|15529141|gb|AAK97665.1| AT5g25280/F18G18_20
  misc_feature (1)..(220): Homolog of NCBI NO: 21618161 NR Description: serine-rich protein [Arabidopsis thaliana]
  misc_feature (1)..(219): Homolog of NCBI NO: 15238947 NR Description: putative protein; protein id: At5g11090.1, by cDNA: 32958. [Arabidopsis thaliana] >gi|11358372|pir||T51798
  misc_feature (1)..(220): Homolog of NCBI NO: 24461857 NR Description: CTV.15 [Poncirus trifoliata]
  misc_feature (48)..(210): Homolog of NCBI NO: 15241329 NR Description: putative protein; protein id: At5g20370.1

SEQ ID NO: 77612 - protein, 187 aa, Arabidopsis thaliana; identical to SEQ ID NO: 38622
  peptide (1)..(187): Ceres Seq. ID no. 12576993
  misc_feature (1)..(187): Homolog of NCBI NO: 15238753 NR Description: serine-rich protein; protein id: At5g25280.1 thaliana] >gi|15146224|gb|AAK83595.1| AT5g25280/F18G18_20 thaliana] >gi|15529141|gb|AAK97665.1| AT5g25280/F18G18_20
  misc_feature (1)..(187): Homolog of NCBI NO: 21618161 NR Description: serine-rich protein [Arabidopsis thaliana]
  misc_feature (1)..(186): Homolog of NCBI NO: 15238947 NR Description: putative protein; protein id: At5g11090.1, by cDNA: 32958. [Arabidopsis thaliana] >gi|11358372|pir||T51798
  misc_feature (1)..(187): Homolog of NCBI NO: 24461857 NR Description: CTV.15 [Poncirus trifoliata]
  misc_feature (15)..(177): Homolog of NCBI NO: 15241329 NR Description: putative protein; protein id: At5g20370.1

SEQ ID NO: 77613 - DNA, 1671 bp, Arabidopsis thaliana
  misc_feature (1)..(1671): Ceres Seq. ID no. 12577001
  misc_feature: MA Experiment ID: 20000214 Result: Down-regulated in Transcription
  misc_feature: MA Experiment 20000214 PARAMETER Experiment Name: At_4deg_Cold_P Parameter: Timepoint (hr) Value: 6
  misc_feature: MA Experiment ID: 20001247 Result: Up-regulated in Transcription
  misc_feature: MA Experiment 20001247 PARAMETER Experiment Name: At_Far-red-induction_P Parameter: Age (day) Value: 7
  misc_feature: MA Experiment 20001247 PARAMETER Experiment Name: At_Far-red-induction_P Parameter: Light Value: Far-red vs. White
  misc_feature: MA Experiment 20001247 PARAMETER Experiment Name: At_Far-red-induction_P Parameter: Organism Value: A. thaliana
  misc_feature: MA Experiment 20001247 PARAMETER Experiment Name: At_Far-red-induction_P Parameter: Plant Line Value: Columbia
  misc_feature: MA Experiment 20001247 PARAMETER Experiment Name: At_Far-red-induction_P Parameter: Timepoint (hr) Value: 1
  misc_feature: MA Experiment 20001247 PARAMETER Experiment Name: At_Far-red-induction_P Parameter: Tissue Value: Whole Plant
  misc_feature: MA Experiment ID: 20001248 Result: Up-regulated in Transcription
  misc_feature: MA Experiment 20001248 PARAMETER Experiment Name: At_Far-red-induction_P Parameter: Age (day) Value: 7
  misc_feature: MA Experiment 20001248 PARAMETER Experiment Name: At_Far-red-induction_P Parameter: Light Value: Far-red vs. White
  misc_feature: MA Experiment 20001248 PARAMETER Experiment Name: At_Far-red-induction_P Parameter: Organism Value: A. thaliana
  misc_feature: MA Experiment 20001248 PARAMETER Experiment Name: At_Far-red-induction_P Parameter: Plant Line Value: Columbia
  misc_feature: MA Experiment 20001248 PARAMETER Experiment Name: At_Far-red-induction_P Parameter: Timepoint (hr) Value: 4
  misc_feature: MA Experiment 20001248 PARAMETER Experiment Name: At_Far-red-induction_P Parameter: Tissue Value: Whole Plant
  misc_feature: MA Experiment ID: 20001450 Result: Up-regulated in Transcription
  misc_feature: MA Experiment 20001450 PARAMETER Experiment Name: At_Far-red-induction_P Parameter: Age (day) Value: 7
  misc_feature: MA Experiment 20001450 PARAMETER Experiment Name: At_Far-red-induction_P Parameter: Light Value: Far-red vs. White
  misc_feature: MA Experiment 20001450 PARAMETER Experiment Name: At_Far-red-induction_P Parameter: Organism Value: A. thaliana
  misc_feature: MA Experiment 20001450 PARAMETER Experiment Name: At_Far-red-induction_P Parameter: Plant Line Value: Columbia
  misc_feature: MA Experiment 20001450 PARAMETER Experiment Name: At_Far-red-induction_P Parameter: Timepoint (hr) Value: 8
  misc_feature: MA Experiment 20001450 PARAMETER Experiment Name: At_Far-red-induction_P Parameter: Tissue Value: Whole Plant
  misc_feature: MA Experiment ID: 20001451 Result: Up-regulated in Transcription
  misc_feature: MA Experiment 20001451 PARAMETER Experiment Name: At_Far-red-induction_P Parameter: Age (day) Value: 7
  misc_feature: MA Experiment 20001451 PARAMETER Experiment Name: At_Far-red-induction_P Parameter: Light Value: Far-red vs. White
  misc_feature: MA Experiment 20001451 PARAMETER Experiment Name: At_Far-red-induction_P Parameter: Organism Value: A. thaliana
  misc_feature: MA Experiment 20001451 PARAMETER Experiment Name: At_Far-red-induction_P Parameter: Plant Line Value: Columbia
  misc_feature: MA Experiment 20001451 PARAMETER Experiment Name: At_Far-red-induction_P Parameter: Timepoint (hr) Value: 24
  misc_feature: MA Experiment 20001451 PARAMETER Experiment Name: At_Far-red-induction_P Parameter: Tissue Value: Whole Plant
attttcgaacttgctttgctgtgataaagttctctcctttcctttctaaaggaagaagaaaggctttatctctcaaaaccctcatccacaaaatcccctttaatccgctaatcagagggtttttctgtttttgtgttgcttcgttactacggttacattcttctcttccccttttgatttcaaagaaccctcttgataccttaagaagaggcaatttgaagttttcttcacagatccgtcttagctctttctagagaatggcggatttgataccattttatctgaatattgtggcgtttctatgtactgttggagctattgctttggcgatatttcatatctacaggcatcttttgaattacacggaaccaacttatcagagatatattgtacgcattatcttcatggtcccggtttatgccttcatgtcattcttgtctcttgtgttacccaaaagctcgatatattttgattccatacgagaagtatatgaagcatgggttatctacaattttctatcgctgtgtttggcatgggttggaggcccaggatcagtagtgcttagtttgagtggtcgttctttaaagccatcatggtctcttatgacatgttgctttccgcctttaacactggacgggcgatttattcgacgatgcaagcagggttgtctgcaatttgtaattctgaagcctatcctagttgctgtcacacttgtgctttatgctaaagggaagtacaaggatggaaattttaaccctgatcaagcatatctctatcttaccatcatctataccatatcctacacagtggctttgtacgcacttgtgctgttttatatggcatgcagagatctacttcagccattcaatccagtcccaaagtttgtgatcataaagtctgtggtctttctaacctattggcagggtgttctcgttttccttgctgcaaaatctggattcataaagagtgcagaggcagcagctcattttcaaaattttataatatgtgtcgagatgctcattgctgcagcatgtcatttctatgcttttccatacaaggagtatgctggtgccaatgttggtggatctggcagtttctcaggaagcttatcacatgctgtaaaactaaatgacttttaccatgacactgttcaccagtttgctcctacctatcacgattatgtgctctataaccatcaagatggtggtgacgaggggacaaagaagtaccgatcgagaacctttgtgccaactggccaagagatggatgcaatgagaaaaaacaaacctgtgtatgcaaacaagatagatggtgtttcagtctcaagtagtctatcttcagaggcaagctcacctaaaagctccagcgtaacttctgatcctgcacgctctgatgctgtgaaatcttccttgctggtggatgcctcagattctcttgaaacaatgtatgatatgtcgctcattgacattgatctatctagtttccccagcaatgtcccatctgcaagtgaaagtgggcctagataggagcagagaaaatgtagaaatcaccattaacaggtacaaaacatgctcctaatagttgtattcagatgaatcttctgaggtgtgttcttagttggaagatgttgttagttggagacttgaggataaatgaaaaaagcttataaac

SEQ ID NO: 77614 - protein, 422 aa, Arabidopsis thaliana; identical to SEQ ID NO: 72790
  peptide (1)..(422): Ceres Seq. ID no. 12577002
  misc_feature (5)..(281): Pfam Name: Domain of unknown function Pfam Description: Domain of unknown function
  misc_feature (1)..(422): Homolog of NCBI NO: 30690265 NR Description: expressed protein [Arabidopsis thaliana] unknown protein [Arabidopsis thaliana]
  misc_feature (81)..(422): Homolog of NCBI NO: 7485938 NR Description: hypothetical protein F21E10.13 - Arabidopsis >gi|3047085|gb|AAC13598.1| Hypothetical protein F21E10.13
  misc_feature (1)..(81): Homolog of NCBI NO: 7485938 NR Description: hypothetical protein F21E10.13 - Arabidopsis >gi|3047085|gb|AAC13598.1| Hypothetical protein F21E10.13
  misc_feature (1)..(420): Homolog of NCBI NO: 6671963 NR Description: unknown protein [Arabidopsis thaliana]
  misc_feature (128)..(420): Homolog of NCBI NO: 15230584 NR Description: unknown protein; protein id: At3g05940.1 thaliana] >gi|6714407|gb|AAF26096.1|AC012393_22 unknown protein
  misc_feature (1)..(77): Homolog of NCBI NO: 15230584 NR Description: unknown protein; protein id: At3g05940.1 thaliana] >gi|6714407|gb|AAF26096.1|AC012393_22 unknown protein
  misc_feature (13)..(400): Homolog of NCBI NO: 34897328 NR Description: putative organic solute transporter [Oryza >gi|18855064|gb|AAL79756.1| putative organic solute transporter
  misc_feature (13)..(388): Homolog of NCBI NO: 34900750 NR Description: OJ1341_A08.33 [Oryza sativa (japonica
  misc_feature (20)..(308): Homolog of NCBI NO: 7110635 NR Description: chromosome 22 open reading frame 5 [Homo sapiens] Protein C22orf5 >gi|5596705|emb|CAB51403.1| hypothetical protein sapiens] >gi|15930090|gb|AAH15489.1|AAH15489 chromosome 22 open
  misc_feature (20)..(308): Homolog of NCBI NO: 39932737 NR Description: Putative MAP kinase activating protein C22orf5

SEQ ID NO: 77615 - protein, 373 aa, Arabidopsis thaliana; identical to SEQ ID NO: 72791
  peptide (1)..(373): Ceres Seq. ID no. 12577003
  misc_feature (1)..(232): Pfam Name: Domain of unknown function Pfam Description: Domain of unknown function
  misc_feature (1)..(373): Homolog of NCBI NO: 30690265 NR Description: expressed protein [Arabidopsis thaliana] unknown protein [Arabidopsis thaliana]
  misc_feature (32)..(373): Homolog of NCBI NO: 7485938 NR Description: hypothetical protein F21E10.13 - Arabidopsis >gi|3047085|gb|AAC13598.1| Hypothetical protein F21E10.13
  misc_feature (1)..(32): Homolog of NCBI NO: 7485938 NR Description: hypothetical protein F21E10.13 - Arabidopsis >gi|3047085|gb|AAC13598.1| Hypothetical protein F21E10.13
  misc_feature (1)..(371): Homolog of NCBI NO: 6671963 NR Description: unknown protein [Arabidopsis thaliana]
  misc_feature (79)..(371): Homolog of NCBI NO: 15230584 NR Description: unknown protein; protein id: At3g05940.1 thaliana] >gi|6714407|gb|AAF26096.1|AC012393_22 unknown protein
  misc_feature (1)..(28): Homolog of NCBI NO: 15230584 NR Description: unknown protein; protein id: At3g05940.1 thaliana] >gi|6714407|gb|AAF26096.1|AC012393_22 unknown protein
  misc_feature (1)..(351): Homolog of NCBI NO: 34897328 NR Description: putative organic solute transporter [Oryza >gi|18855064|gb|AAL79756.1| putative organic solute transporter
  misc_feature (1)..(339): Homolog of NCBI NO: 34900750 NR Description: OJ1341_A08.33 [Oryza sativa (japonica
  misc_feature (1)..(259): Homolog of NCBI NO: 7110635 NR Description: chromosome 22 open reading frame 5 [Homo sapiens] Protein C22orf5 >gi|5596705|emb|CAB51403.1| hypothetical protein sapiens] >gi|15930090|gb|AAH15489.1|AAH15489 chromosome 22 open
  misc_feature (1)..(259): Homolog of NCBI NO: 39932737 NR Description: Putative MAP kinase activating protein C22orf5

SEQ ID NO: 77616 - protein, 366 aa, Arabidopsis thaliana; identical to SEQ ID NO: 72792
  peptide (1)..(366): Ceres Seq. ID no. 12577004
  misc_feature (1)..(225): Pfam Name: Domain of unknown function Pfam Description: Domain of unknown function
  misc_feature (1)..(366): Homolog of NCBI NO: 30690265 NR Description: expressed protein [Arabidopsis thaliana] unknown protein [Arabidopsis thaliana]
  misc_feature (25)..(366): Homolog of NCBI NO: 7485938 NR Description: hypothetical protein F21E10.13 - Arabidopsis >gi|3047085|gb|AAC13598.1| Hypothetical protein F21E10.13
  misc_feature (1)..(25): Homolog of NCBI NO: 7485938 NR Description: hypothetical protein F21E10.13 - Arabidopsis >gi|3047085|gb|AAC13598.1| Hypothetical protein F21E10.13
  misc_feature (1)..(364): Homolog of NCBI NO: 6671963 NR Description: unknown protein [Arabidopsis thaliana]
  misc_feature (72)..(364): Homolog of NCBI NO: 15230584 NR Description: unknown protein; protein id: At3g05940.1 thaliana] >gi|6714407|gb|AAF26096.1|AC012393_22 unknown protein
  misc_feature (1)..(21): Homolog of NCBI NO: 15230584 NR Description: unknown protein; protein id: At3g05940.1 thaliana] >gi|6714407|gb|AAF26096.1|AC012393_22 unknown protein
  misc_feature (1)..(344): Homolog of NCBI NO: 34897328 NR Description: putative organic solute transporter [Oryza >gi|18855064|gb|AAL79756.1| putative organic solute transporter
  misc_feature (1)..(332): Homolog of NCBI NO: 34900750 NR Description: OJ1341_A08.33 [Oryza sativa (japonica
  misc_feature (1)..(252): Homolog of NCBI NO: 7110635 NR Description: chromosome 22 open reading frame 5 [Homo sapiens] Protein C22orf5 >gi|5596705|emb|CAB51403.1| hypothetical protein sapiens] >gi|15930090|gb|AAH15489.1|AAH15489 chromosome 22 open
  misc_feature (1)..(252): Homolog of NCBI NO: 39932737 NR Description: Putative MAP kinase activating protein C22orf5

SEQ ID NO: 77617 - DNA, 962 bp, Arabidopsis thaliana
  misc_feature (1)..(962): Ceres Seq. ID no. 12577015
  misc_feature: MA Experiment ID: 20000185 Result: Down-regulated in Transcription
  misc_feature: MA Experiment 20000185 PARAMETER Experiment Name: At_Roots__P Parameter: Age (day) Value: 7 vs. 21
  misc_feature: MA Experiment 20000185 PARAMETER Experiment Name: At_Roots__P Parameter: Organism Value: A. thaliana
  misc_feature: MA Experiment 20000185 PARAMETER Experiment Name: At_Roots__P Parameter: Tissue Value: Roots vs. Whole Plant
  misc_feature: MA Experiment ID: 20000264 Result: Down-regulated in Transcription
  misc_feature: MA Experiment 20000264 PARAMETER Experiment Name: At_Open_Flower_P Parameter: Age (day) Value: 21
  misc_feature: MA Experiment 20000264 PARAMETER Experiment Name: At_Open_Flower_P Parameter: Plant Line Value: WS
  misc_feature: MA Experiment 20000264 PARAMETER Experiment Name: At_Open_Flower_P Parameter: Tissue Value: Open Flower vs. Whole Plant
  misc_feature: MA Experiment ID: 20000437 Result: Down-regulated in Transcription
  misc_feature: MA Experiment 20000437 PARAMETER Experiment Name: At_Drought_P Parameter: Age (day) Value: 8
  misc_feature: MA Experiment 20000437 PARAMETER Experiment Name: At_Drought_P Parameter: Organism Value: A. thaliana
  misc_feature: MA Experiment 20000437 PARAMETER Experiment Name: At_Drought_P Parameter: Plant Line Value: WS
  misc_feature: MA Experiment 20000437 PARAMETER Experiment Name: At_Drought_P Parameter: Timepoint (hr) Value: 24
  misc_feature: MA Experiment 20000437 PARAMETER Experiment Name: At_Drought_P Parameter: Tissue Value: Whole Plant
  misc_feature: MA Experiment 20000437 PARAMETER Experiment Name: At_Drought_P Parameter: Treatment Value: Drought vs. No Drought
  misc_feature: MA Experiment ID: 20000438 Result: Up-regulated in Transcription
  misc_feature: MA Experiment 20000438 PARAMETER Experiment Name: At_Shoots__P Parameter: Age (day) Value: 14
  misc_feature: MA Experiment 20000438 PARAMETER Experiment Name: At_Shoots__P Parameter: Tissue Value: Shoots vs. Whole Plant
  misc_feature: MA Experiment ID: 20000439 Result: Down-regulated in Transcription
  misc_feature: MA Experiment 20000439 PARAMETER Experiment Name: At_Roots__P Parameter: Age (day) Value: 14 vs. 21
  misc_feature: MA Experiment 20000439 PARAMETER Experiment Name: At_Roots__P Parameter: Organism Value: A. thaliana
  misc_feature: MA Experiment 20000439 PARAMETER Experiment Name: At_Roots__P Parameter: Tissue Value: Roots vs. Whole Plant
  misc_feature: MA Experiment ID: 20000794 Result: Down-regulated in Transcription
  misc_feature: MA Experiment 20000794 PARAMETER Experiment Name: At_Petals_P Parameter: Age (day) Value: 23-25 days
  misc_feature: MA Experiment 20000794 PARAMETER Experiment Name: At_Petals_P Parameter: Plant Line Value: WS
  misc_feature: MA Experiment 20000794 PARAMETER Experiment Name: At_Petals_P Parameter: Tissue Value: Petals vs. Whole plant
  misc_feature: MA Experiment ID: 20001757 Result: Up-regulated in Transcription
  misc_feature: MA Experiment 20001757 PARAMETER Experiment Name: At_50mM_NH4NO3_L-to-H_P Parameter: Timepoint (hr) Value: 6
  misc_feature: MA Experiment 20001757 PARAMETER Experiment Name: At_50mM_NH4NO3_L-to-H_P Parameter: Tissue Value: Leaf
  misc_feature: MA Experiment 20001757 PARAMETER Experiment Name: At_50mM_NH4NO3_L-to-H_P Parameter: Treatment Value: 50mM NH4NO3 vs 100mM Mannitol
  misc_feature: MA Experiment ID: 20001905 Result: Down-regulated in Transcription
  misc_feature: MA Experiment 20001905 PARAMETER Experiment Name: At_Drought_Reproduction_P Parameter: Age (day) Value: 40
  misc_feature: MA Experiment 20001905 PARAMETER Experiment Name: At_Drought_Reproduction_P Parameter: Organism Value: A. thaliana
  misc_feature: MA Experiment 20001905 PARAMETER Experiment Name: At_Drought_Reproduction_P Parameter: Plant Line Value: WS
  misc_feature: MA Experiment 20001905 PARAMETER Experiment Name: At_Drought_Reproduction_P Parameter: Timepoint (day) Value: 10
  misc_feature: MA Experiment 20001905 PARAMETER Experiment Name: At_Drought_Reproduction_P Parameter: Tissue Value: Rosettes
  misc_feature: MA Experiment 20001905 PARAMETER Experiment Name: At_Drought_Reproduction_P Parameter: Treatment Value: Drought vs. No Drought
aaacaaactagtggtgagtgaatcttctctggtgagtaatggaagtgagtatgtctttgaatgcgttaactcggcttcctctgaagaacacaggaagattcgaagaggttggtttagcgagacactctctgtttagctcaagaacggcatgccgagagacggcggtacagcagcggcggatggtttttgtggtggaggctaagggaaagaaaggtatggcggcgcgtcagtatcaacgtacacctcctcctatgcctaagattgaagacgatggaaacccaagattcgttatcttcattcgtatggccaatgtgtatctttggtatcctctgagtataatagctggtggtactactgctaagatcatggttgctgcaaaagataacctcttggggaagtatatctacaaagacaccattgcaagaaacattgccgctgttatttacagagatgagaaagagattcaaaagacagcaattaagcagcatcgtgtcttgcgtacagccaccgagtttcgatatggctacaaacttgtagaaaacggaaacatgagagctgcacttagtacttcagatgttattgagctcccaacccaggaccagcttaaaacagtgttcgacaaagttaaagactactttggggatgcaaaagagtcattcggaaagctatcatcgctgaacccggggagtgacgaaaaaactgaagaaacctcggatgagaaagccaagtaagtataaacagggcctgaggctgaacaattgacacttggttggttgattttgatgtctcaaccgtctcggtatgggctgcagaaggtcactggatatgacgagactaccgctattttgtgcacattttctctatacatctctcacagaaacagcttctgttaaatctcttgtaacatataacttattgtgtattgtagatttgttgaaagaaagagccattggttacaactt

SEQ ID NO: 77618 - protein, 230 aa, Arabidopsis thaliana
  peptide (1)..(230): Ceres Seq. ID no. 12577016
  misc_feature (135)..(230): Homolog of NCBI NO: 11072026 NR Description: F12A21.16 [Arabidopsis thaliana]
  misc_feature (17)..(137): Homolog of NCBI NO: 11072026 NR Description: F12A21.16 [Arabidopsis thaliana]
  misc_feature (1)..(230): Homolog of NCBI NO: 30697554 NR Description: auxin-regulated protein [Arabidopsis thaliana] At1g67700/F12A21_30 [Arabidopsis thaliana]
  misc_feature (1)..(230): Homolog of NCBI NO: 30697556 NR Description: auxin-regulated protein [Arabidopsis thaliana]
MEVSMSLNALTRLPLKNTGRFEEVGLARHSLFSSRTACRETAVQQRRMVFVVEAKGKKGMAARQYQRTPPPMPKIEDDGNPRFVIFIRMANVYLWYPLSIIAGGTTAKIMVAAKDNLLGKYIYKDTIARNIAAVIYRDEKEIQKTAIKQHRVLRTATEFRYGYKLVENGNMRAALSTSDVIELPTQDQLKTVFDKVKDYFGDAKESFGKLSSLNPGSDEKTEETSDEKAK

SEQ ID NO: 77619 - protein, 226 aa, Arabidopsis thaliana
  peptide (1)..(226): Ceres Seq. ID no. 12577017
  misc_feature (131)..(226): Homolog of NCBI NO: 11072026 NR Description: F12A21.16 [Arabidopsis thaliana]
  misc_feature (13)..(133): Homolog of NCBI NO: 11072026 NR Description: F12A21.16 [Arabidopsis thaliana]
  misc_feature (1)..(226): Homolog of NCBI NO: 30697554 NR Description: auxin-regulated protein [Arabidopsis thaliana] At1g67700/F12A21_30 [Arabidopsis thaliana]
  misc_feature (1)..(226): Homolog of NCBI NO: 30697556 NR Description: auxin-regulated protein [Arabidopsis thaliana]
MSLNALTRLPLKNTGRFEEVGLARHSLFSSRTACRETAVQQRRMVFVVEAKGKKGMAARQYQRTPPPMPKIEDDGNPRFVIFIRMANVYLWYPLSIIAGGTTAKIMVAAKDNLLGKYIYKDTIARNIAAVIYRDEKEIQKTAIKQHRVLRTATEFRYGYKLVENGNMRAALSTSDVIELPTQDQLKTVFDKVKDYFGDAKESFGKLSSLNPGSDEKTEETSDEKAK

SEQ ID NO: 77620 - protein, 183 aa, Arabidopsis thaliana
  peptide (1)..(183): Ceres Seq. ID no. 12577018
  misc_feature (88)..(183): Homolog of NCBI NO: 11072026 NR Description: F12A21.16 [Arabidopsis thaliana]
  misc_feature (1)..(90): Homolog of NCBI NO: 11072026 NR Description: F12A21.16 [Arabidopsis thaliana]
  misc_feature (1)..(183): Homolog of NCBI NO: 30697554 NR Description: auxin-regulated protein [Arabidopsis thaliana] At1g67700/F12A21_30 [Arabidopsis thaliana]
  misc_feature (1)..(183): Homolog of NCBI NO: 30697556 NR Description: auxin-regulated protein [Arabidopsis thaliana]
MVFVVEAKGKKGMAARQYQRTPPPMPKIEDDGNPRFVIFIRMANVYLWYPLSIIAGGTTAKIMVAAKDNLLGKYIYKDTIARNIAAVIYRDEKEIQKTAIKQHRVLRTATEFRYGYKLVENGNMRAALSTSDVIELPTQDQLKTVFDKVKDYFGDAKESFGKLSSLNPGSDEKTEETSDEKAK

SEQ ID NO: 77621 - DNA, 1333 bp, Arabidopsis thaliana
  misc_feature (1)..(1333): Ceres Seq. ID no. 12577021
  misc_feature: MA Experiment ID: 20000227 Result: Up-regulated in Transcription
  misc_feature: MA Experiment 20000227 PARAMETER Experiment Name: At_Root-Tips-vs-Tops_P Parameter: Tissue Value: Root Tips vs. Root Tops
  misc_feature: MA Experiment ID: 20000234 Result: Down-regulated in Transcription
  misc_feature: MA Experiment 20000234 PARAMETER Experiment Name: At_Siliques_P Parameter: Age (day) Value: 21
  misc_feature: MA Experiment 20000234 PARAMETER Experiment Name: At_Siliques_P Parameter: Organism Value: A. thaliana
  misc_feature: MA Experiment 20000234 PARAMETER Experiment Name: At_Siliques_P Parameter: Plant Line Value: WS
  misc_feature: MA Experiment 20000234 PARAMETER Experiment Name: At_Siliques_P Parameter: Tissue Value: Less Than 5mm Siliques vs. Whole Plant
  misc_feature: MA Experiment ID: 20000267 Result: Up-regulated in Transcription
  misc_feature: MA Experiment 20000267 PARAMETER Experiment Name: At_Drought_P Parameter: Age (day) Value: 7
  misc_feature: MA Experiment 20000267 PARAMETER Experiment Name: At_Drought_P Parameter: Organism Value: A. thaliana
  misc_feature: MA Experiment 20000267 PARAMETER Experiment Name: At_Drought_P Parameter: Plant Line Value: WS
  misc_feature: MA Experiment 20000267 PARAMETER Experiment Name: At_Drought_P Parameter: Timepoint (hr) Value: 6
  misc_feature: MA Experiment 20000267 PARAMETER Experiment Name: At_Drought_P Parameter: Tissue Value: Whole Plant
  misc_feature: MA Experiment 20000267 PARAMETER Experiment Name: At_Drought_P Parameter: Treatment Value: Drought vs. No Drought
  misc_feature: MA Experiment ID: 20000436 Result: Up-regulated in Transcription
  misc_feature: MA Experiment 20000436 PARAMETER Experiment Name: At_Drought_P Parameter: Age (day) Value: 7
  misc_feature: MA Experiment 20000436 PARAMETER Experiment Name: At_Drought_P Parameter: Organism Value: A. thaliana
  misc_feature: MA Experiment 20000436 PARAMETER Experiment Name: At_Drought_P Parameter: Plant Line Value: WS
  misc_feature: MA Experiment 20000436 PARAMETER Experiment Name: At_Drought_P Parameter: Timepoint (hr) Value: 12
  misc_feature: MA Experiment 20000436 PARAMETER Experiment Name: At_Drought_P Parameter: Tissue Value: Whole Plant
  misc_feature: MA Experiment 20000436 PARAMETER Experiment Name: At_Drought_P Parameter: Treatment Value: Drought vs. No Drought
  misc_feature: MA Experiment ID: 20000437 Result: Up-regulated in Transcription
  misc_feature: MA Experiment 20000437 PARAMETER Experiment Name: At_Drought_P Parameter: Age (day) Value: 8
  misc_feature: MA Experiment 20000437 PARAMETER Experiment Name: At_Drought_P Parameter: Organism Value: A. thaliana
  misc_feature: MA Experiment 20000437 PARAMETER Experiment Name: At_Drought_P Parameter: Plant Line Value: WS
  misc_feature: MA Experiment 20000437 PARAMETER Experiment Name: At_Drought_P Parameter: Timepoint (hr) Value: 24
  misc_feature: MA Experiment 20000437 PARAMETER Experiment Name: At_Drought_P Parameter: Tissue Value: Whole Plant
  misc_feature: MA Experiment 20000437 PARAMETER Experiment Name: At_Drought_P Parameter: Treatment Value: Drought vs. No Drought
  misc_feature: MA Experiment ID: 20001556 Result: Up-regulated in Transcription
  misc_feature: MA Experiment 20001556 PARAMETER Experiment Name: At_Drought_Soil_Dry_P Parameter: Age (day) Value: 26
  misc_feature: MA Experiment 20001556 PARAMETER Experiment Name: At_Drought_Soil_Dry_P Parameter: Organism Value: A. thaliana
  misc_feature: MA Experiment 20001556 PARAMETER Experiment Name: At_Drought_Soil_Dry_P Parameter: Plant Line Value: WS
  misc_feature: MA Experiment 20001556 PARAMETER Experiment Name: At_Drought_Soil_Dry_P Parameter: Post Timepoint (hr) Value: None
  misc_feature: MA Experiment 20001556 PARAMETER Experiment Name: At_Drought_Soil_Dry_P Parameter: Post-Treatment Value: None
  misc_feature: MA Experiment 20001556 PARAMETER Experiment Name: At_Drought_Soil_Dry_P Parameter: Timepoint (day) Value: 12
  misc_feature: MA Experiment 20001556 PARAMETER Experiment Name: At_Drought_Soil_Dry_P Parameter: Treatment Value: Drought vs. No Drought
  misc_feature: MA Experiment ID: 20001557 Result: Up-regulated in Transcription
  misc_feature: MA Experiment 20001557 PARAMETER Experiment Name: At_Drought_Soil_Dry_P Parameter: Age (day) Value: 27
  misc_feature: MA Experiment 20001557 PARAMETER Experiment Name: At_Drought_Soil_Dry_P Parameter: Organism Value: A. thaliana
  misc_feature: MA Experiment 20001557 PARAMETER Experiment Name: At_Drought_Soil_Dry_P Parameter: Plant Line Value: WS
  misc_feature: MA Experiment 20001557 PARAMETER Experiment Name: At_Drought_Soil_Dry_P Parameter: Post Timepoint (hr) Value: 3
  misc_feature: MA Experiment 20001557 PARAMETER Experiment Name: At_Drought_Soil_Dry_P Parameter: Post-Treatment Value: Re-Water vs. No Drought
  misc_feature: MA Experiment 20001557 PARAMETER Experiment Name: At_Drought_Soil_Dry_P Parameter: Timepoint (day) Value: 13
  misc_feature: MA Experiment 20001557 PARAMETER Experiment Name: At_Drought_Soil_Dry_P Parameter: Treatment Value: Drought vs. No Drought
  misc_feature: MA Experiment ID: 20001559 Result: Up-regulated in Transcription
  misc_feature: MA Experiment 20001559 PARAMETER Experiment Name: At_Drought_Soil_Dry_P Parameter: Age (day) Value: 28
  misc_feature: MA Experiment 20001559 PARAMETER Experiment Name: At_Drought_Soil_Dry_P Parameter: Organism Value: A. thaliana
  misc_feature: MA Experiment 20001559 PARAMETER Experiment Name: At_Drought_Soil_Dry_P Parameter: Plant Line Value: WS
  misc_feature: MA Experiment 20001559 PARAMETER Experiment Name: At_Drought_Soil_Dry_P Parameter: Post Timepoint (hr) Value: 29
  misc_feature: MA Experiment 20001559 PARAMETER Experiment Name: At_Drought_Soil_Dry_P Parameter: Post-Treatment Value: Re-Water vs. No Drought
  misc_feature: MA Experiment 20001559 PARAMETER Experiment Name: At_Drought_Soil_Dry_P Parameter: Timepoint (day) Value: 14
  misc_feature: MA Experiment 20001559 PARAMETER Experiment Name: At_Drought_Soil_Dry_P Parameter: Treatment Value: Drought vs. No Drought
  misc_feature: MA Experiment ID: 20001911 Result: Up-regulated in Transcription
  misc_feature: MA Experiment 20001911 PARAMETER Experiment Name: At_Drought_Reproduction_P Parameter: Age (day) Value: 40
  misc_feature: MA Experiment 20001911 PARAMETER Experiment Name: At_Drought_Reproduction_P Parameter: Organism Value: A. thaliana
  misc_feature: MA Experiment 20001911 PARAMETER Experiment Name: At_Drought_Reproduction_P Parameter: Plant Line Value: WS
  misc_feature: MA Experiment 20001911 PARAMETER Experiment Name: At_Drought_Reproduction_P Parameter: Timepoint (day) Value: 10
  misc_feature: MA Experiment 20001911 PARAMETER Experiment Name: At_Drought_Reproduction_P Parameter: Tissue Value: Flowers
  misc_feature: MA Experiment 20001911 PARAMETER Experiment Name: At_Drought_Reproduction_P Parameter: Treatment Value: Drought vs. No Drought
acatttggtgtctgctgctggcgttgagaagaagaagaagaagaaaggcacacaaaataacccatgtctggtttatacaataactcatcttacttctctcctgctcgagctgcttctcctcagattagaagcactcctgagatcgacagctctcagtacttgacggagcttctcgctgaacatcaaaagcttactccttttatgcaggtcctacccatatgtagccgtctattgaatcaagagatgttcagggtctctggaatgatgtctaaccaaggatttggtgattttgatagacttcgacacagaagtcccagccctatggcttcttctaatcttatgtctaatgtctctaataccgggttaggaggctggaacggcctctctcaggagagacttagtggaacacctggaatgacaatggattggcaaggtgcacctggaagccccagttcatacaccgtcaaaaggatattgcgtctggagattcctgtagataactatcctaatttcaattttgttggacgacttctcggccctagaggcaactcgttaaaacgcgttgaagctaccaccggttgccgagtattcatcagagggaaagggtcaatcaaggatcccgaaaaggaagataaattaaggggaagacctggctatgaacacttgaatgagcagcttcacatcttaatagaggcagatcttccagctagtattgtggagatacgtctgcgacaagctcaagaaattatagaagagttactaaagcctgtggacgagtcgcaagatttcataaagagacagcagctgagggaactggcattgctaaactcgaacaacctgagggaagagagtccggggccaagcggaggtggaagcgtttcgcctttcaattcaagtggtaaacgcccgaaaacaggatgctaagtagcgttttgtacgtctcgcccaaaacgctccttcaagccttataatggttacttcaaccaaaagtacatgtctgcatgcattacacagacgcacatgtgtatatctggtttctccagtagtggctgcaatggtggtggtctggtcaaggcctgccctggtctctctcgggtgagcgaccctgtggctttcgtttttcttcttctttattttaaacttttgtttttctttttcctcatcaaaaattcattacagattatttaaaaaagattcatgcaaaaaaaaaaaaaaagagtatgagatatataatatatatagggagaaaaagatgtggtggcttgggagggcgtggactgaaaattcttattgtataaacataaacaaaaaacacatttattggattgattct

SEQ ID NO: 77622 - protein, 286 aa, Arabidopsis thaliana; identical to SEQ ID NO: 39267
  peptide (1)..(286): Ceres Seq. ID no. 12577022
  misc_feature (139)..(194): Pfam Name: KH domain Pfam Description: KH domain
  misc_feature (1)..(286): Homolog of NCBI NO: 15224909 NR Description: KH domain protein; protein id: At2g38610.1, by cDNA: gi_14596032, supported by cDNA: gi_17473661, supported
  misc_feature (1)..(285): Homolog of NCBI NO: 12322716 NR Description: unknown protein; 28504-31237 [Arabidopsis
  misc_feature (1)..(285): Homolog of NCBI NO: 30680583 NR Description: KH domain protein [Arabidopsis thaliana]
  misc_feature (1)..(285): Homolog of NCBI NO: 40645104 NR Description: hypothetical protein [Nicotiana tabacum]
  misc_feature (3)..(283): Homolog of NCBI NO: 34900448 NR Description: contains EST C27129(C51039)~similar to
  misc_feature (1)..(283): Homolog of NCBI NO: 34909270 NR Description: P0454H12.18 [Oryza sativa (japonica
  misc_feature (13)..(284): Homolog of NCBI NO: 15236738 NR Description: KH domain protein; protein id: At4g26480.1
  misc_feature (13)..(284): Homolog of NCBI NO: 20268733 NR Description: unknown protein [Arabidopsis thaliana]
  misc_feature (5)..(284): Homolog of NCBI NO: 15241136 NR Description: KH domain protein; protein id: At5g56140.1
  misc_feature (27)..(284): Homolog of NCBI NO: 19424087 NR Description: putative RNA-binding protein [Arabidopsis

SEQ ID NO: 77623 - protein, 240 aa, Arabidopsis thaliana; identical to SEQ ID NO: 39268
  peptide (1)..(240): Ceres Seq. ID no. 12577023
  misc_feature (93)..(148): Pfam Name: KH domain Pfam Description: KH domain
  misc_feature (1)..(240): Homolog of NCBI NO: 15224909 NR Description: KH domain protein; protein id: At2g38610.1, by cDNA: gi_14596032, supported by cDNA: gi_17473661, supported
  misc_feature (1)..(239): Homolog of NCBI NO: 12322716 NR Description: unknown protein; 28504-31237 [Arabidopsis
  misc_feature (1)..(239): Homolog of NCBI NO: 30680583 NR Description: KH domain protein [Arabidopsis thaliana]
  misc_feature (1)..(239): Homolog of NCBI NO: 40645104 NR Description: hypothetical protein [Nicotiana tabacum]
  misc_feature (1)..(237): Homolog of NCBI NO: 34900448 NR Description: contains EST C27129(C51039)~similar to
  misc_feature (1)..(237): Homolog of NCBI NO: 34909270 NR Description: P0454H12.18 [Oryza sativa (japonica
  misc_feature (1)..(238): Homolog of NCBI NO: 15236738 NR Description: KH domain protein; protein id: At4g26480.1
  misc_feature (1)..(238): Homolog of NCBI NO: 20268733 NR Description: unknown protein [Arabidopsis thaliana]
  misc_feature (1)..(238): Homolog of NCBI NO: 15241136 NR Description: KH domain protein; protein id: At5g56140.1
  misc_feature (1)..(238): Homolog of NCBI NO: 19424087 NR Description: putative RNA-binding protein [Arabidopsis

SEQ ID NO: 77624 - protein, 226 aa, Arabidopsis thaliana; identical to SEQ ID NO: 39269
  peptide (1)..(226): Ceres Seq. ID no. 12577024
  misc_feature (79)..(134): Pfam Name: KH domain Pfam Description: KH domain
  misc_feature (1)..(226): Homolog of NCBI NO: 15224909 NR Description: KH domain protein; protein id: At2g38610.1, by cDNA: gi_14596032, supported by cDNA: gi_17473661, supported
  misc_feature (1)..(225): Homolog of NCBI NO: 12322716 NR Description: unknown protein; 28504-31237 [Arabidopsis
  misc_feature (1)..(225): Homolog of NCBI NO: 30680583 NR Description: KH domain protein [Arabidopsis thaliana]
  misc_feature (1)..(225): Homolog of NCBI NO: 40645104 NR Description: hypothetical protein [Nicotiana tabacum]
  misc_feature (1)..(223): Homolog of NCBI NO: 34900448 NR Description: contains EST C27129(C51039)~similar to
  misc_feature (1)..(223): Homolog of NCBI NO: 34909270 NR Description: P0454H12.18 [Oryza sativa (japonica
  misc_feature (1)..(224): Homolog of NCBI NO: 15236738 NR Description: KH domain protein; protein id: At4g26480.1
  misc_feature (1)..(224): Homolog of NCBI NO: 20268733 NR Description: unknown protein [Arabidopsis thaliana]
  misc_feature (1)..(224): Homolog of NCBI NO: 15241136 NR Description: KH domain protein; protein id: At5g56140.1
  misc_feature (1)..(224): Homolog of NCBI NO: 19424087 NR Description: putative RNA-binding protein [Arabidopsis

SEQ ID NO: 77625 - DNA, 1192 bp, Arabidopsis thaliana
  misc_feature (1)..(1192): Ceres Seq. ID no. 12577029
  misc_feature: MA Experiment ID: 108434 Result: Down-regulated in Transcription
  misc_feature: MA Experiment 108434 PARAMETER Experiment Name: At_Root_Tips_cDNA_P Parameter: Tissue Value: Root Tips
  misc_feature: MA Experiment ID: 108595 Result: Down-regulated in Transcription
  misc_feature: MA Experiment 108595 PARAMETER Experiment Name: At_Ler-pi_Ovule_cDNA_P Parameter: Plant Line Value: null
  misc_feature: MA Experiment ID: 20000111 Result: Down-regulated in Transcription
  misc_feature: MA Experiment 20000111 PARAMETER Experiment Name: At_42deg_Heat_cDNA_P Parameter: Temperature (deg C) Value: 42 vs. 22
  misc_feature: MA Experiment 20000111 PARAMETER Experiment Name: At_42deg_Heat_cDNA_P Parameter: Timepoint (hr) Value: 6
  misc_feature: MA Experiment 20000111 PARAMETER Experiment Name: At_42deg_Heat_cDNA_P Parameter: Tissue Value: Aerial
  misc_feature: MA Experiment ID: 20000113 Result: Down-regulated in Transcription
  misc_feature: MA Experiment 20000113 PARAMETER Experiment Name: At_42deg_Heat_cDNA_P Parameter: Temperature (deg C) Value: 42 vs. 22
  misc_feature: MA Experiment 20000113 PARAMETER Experiment Name: At_42deg_Heat_cDNA_P Parameter: Timepoint (hr) Value: 8
  misc_feature: MA Experiment 20000113 PARAMETER Experiment Name: At_42deg_Heat_cDNA_P Parameter: Tissue Value: Aerial
agttgcggaattgaacccaacttagggtttgtttacttctcatttctctcttcaatttcgtctcttgcttccatttctcaactcaaaatcgtaaatttcgcggatttttttgttcaattcagaatcaaatgcccaagatctgctgctctcgttccgctacacaagttgtggtagcacaaaaatcaaactcgggtaaaggaagaaacggtgaaggaggaatcaagtatggatttagtttgataaaagggaaatctaaccattcaatggaggattatcatgttgctaagtttaccaatttcaatggcaatgaattggggctttttgcaatctttgatggtcataaaggtgatcatgttgctgcttatctgcagaaacatctcttctctaatatccttaaagatggagagttcttggttgatcctcgaagagcaattgcgaaagcttatgagaatacagatcaaaagattttagcagataatagaacggatttagagagtggtggttcgactgctgtgactgcgattttgatcaatgggaaagctttgtggatagctaatgttggtgattcacgagctattgtttctagtcgaggtaaagcaaaacagatgagtgttgatcatgatcctgatgatgatactgagaggagtatgattgagagtaaaggtggatttgtgaccaacagaccaggtgatgttcctcgagtgaacggtttgttagcggtctctcgtgtctttggagataaaaaccttaaagcatatttgaactcagagcctgagattaaggacgtaaccattgatagtcacacagattttcttattctggctagtgacggtatttcgaaggtgatgtcaaaccaagaagcagttgatgtagctaagaagttgaaagatccaaaggaagcggcgaggcaagtagttgctgaagcattgaaaagaaacagcaaggatgacatatcttgcattgttgtccggtttagatgataaccaagaagactcagcttatattggatttggagcttcctttgcttcaccatgattcttttggggtccggtttagtttgattctgggtcttggttacttgtgcatttttaagaacatgagtttgaataggactattatatattactagtttgacaaaccagatattttatcatataaattacatgaaaagaatagtcgattttaaatggtt

SEQ ID NO: 77626 - protein, 283 aa, Arabidopsis thaliana
  peptide (1)..(283): Ceres Seq. ID no. 12577030
  misc_feature (33)..(275): Pfam Name: Protein phosphatase 2C Pfam Description: Protein phosphatase 2C
  misc_feature (1)..(283): Homolog of NCBI NO: 18411863 NR Description: protein phosphatase 2C (PP2C); protein id: supported by cDNA: gi_15081702 [Arabidopsis thaliana]
  misc_feature (1)..(283): Homolog of NCBI NO: 15081703 NR Description: At1g78200/T11I11_14 [Arabidopsis thaliana]
  misc_feature (46)..(283): Homolog of NCBI NO: 25406547 NR Description: hypothetical protein T11I11.14 [imported] - thaliana >gi|12324254|gb|AAG52101.1|AC012680_12 putative protein
  misc_feature (1)..(283): Homolog of NCBI NO: 18395099 NR Description: protein phosphatase 2C (PP2C), putative; protein At1g22280.1, supported by cDNA: 119977., supported by cDNA:
  misc_feature (1)..(283): Homolog of NCBI NO: 21537096 NR Description: protein phosphatase type 2C, putative
  misc_feature (1)..(283): Homolog of NCBI NO: 15218759 NR Description: protein phosphatase 2C (PP2C); protein id: supported by cDNA: gi_13877698 [Arabidopsis thaliana] Strong similarity to gb|AF092432 protein phosphatase type 2C from
  misc_feature (22)..(282): Homolog of NCBI NO: 18417190 NR Description: protein phosphatase 2C (PP2C); protein id: supported by cDNA: gi_16604584, supported by cDNA: gi_20258990 thaliana] >gi|16604585|gb|AAL24149.1| putative protein putative
  misc_feature (19)..(283): Homolog of NCBI NO: 18399423 NR Description: protein phosphatase 2C (PP2C); protein id: supported by cDNA: 22316., supported by cDNA: gi_15724169, by cDNA: gi_18652944, supported by cDNA: gi_20147398 [Arabidopsis
  misc_feature (46)..(283): Homolog of NCBI NO: 38567903 NR Description: OSJNBa0060N03.23 [Oryza sativa (japonica
  misc_feature (21)..(282): Homolog of NCBI NO: 23307574 NR Description: putative protein phosphatase 2C homolog [Oryza
MPKICCSRSATQVVVAQKSNSGKGRNGEGGIKYGFSLIKGKSNHSMEDYHVAKFTNFNGNELGLFAIFDGHKGDHVAAYLQKHLFSNILKDGEFLVDPRRAIAKAYENTDQKILADNRTDLESGGSTAVTAILINGKALWIANVGDSRAIVSSRGKAKQMSVDHDPDDDTERSMIESKGGFVTNRPGDVPRVNGLLAVSRVFGDKNLKAYLNSEPEIKDVTIDSHTDFLILASDGISKVMSNQEAVDVAKKLKDPKEAARQVVAEALKRNSKDDISCIVVRFR

SEQ ID NO: 77627 - protein, 238 aa, Arabidopsis thaliana
  peptide (1)..(238): Ceres Seq. ID no. 12577031
  misc_feature (1)..(230): Pfam Name: Protein phosphatase 2C Pfam Description: Protein phosphatase 2C
  misc_feature (1)..(238): Homolog of NCBI NO: 18411863 NR Description: protein phosphatase 2C (PP2C); protein id: supported by cDNA: gi_15081702 [Arabidopsis thaliana]
  misc_feature (1)..(238): Homolog of NCBI NO: 15081703 NR Description: At1g78200/T11I11_14 [Arabidopsis thaliana]
  misc_feature (1)..(238): Homolog of NCBI NO: 25406547 NR Description: hypothetical protein T11I11.14 [imported] - thaliana >gi|12324254|gb|AAG52101.1|AC012680_12 putative protein
  misc_feature (1)..(238): Homolog of NCBI NO: 18395099 NR Description: protein phosphatase 2C (PP2C), putative; protein At1g22280.1, supported by cDNA: 119977., supported by cDNA:
  misc_feature (1)..(238): Homolog of NCBI NO: 21537096 NR Description: protein phosphatase type 2C, putative
  misc_feature (1)..(238): Homolog of NCBI NO: 15218759 NR Description: protein phosphatase 2C (PP2C); protein id: supported by cDNA: gi_13877698 [Arabidopsis thaliana] Strong similarity to gb|AF092432 protein phosphatase type 2C from
  misc_feature (1)..(237): Homolog of NCBI NO: 18417190 NR Description: protein phosphatase 2C (PP2C); protein id: supported by cDNA: gi_16604584, supported by cDNA: gi_20258990 thaliana] >gi|16604585|gb|AAL24149.1| putative protein putative
  misc_feature (1)..(238): Homolog of NCBI NO: 18399423 NR Description: protein phosphatase 2C (PP2C); protein id: supported by cDNA: 22316., supported by cDNA: gi_15724169, by cDNA: gi_18652944, supported by cDNA: gi_20147398 [Arabidopsis
  misc_feature (1)..(238): Homolog of NCBI NO: 38567903 NR Description: OSJNBa0060N03.23 [Oryza sativa (japonica
  misc_feature (1)..(237): Homolog of NCBI NO: 23307574 NR Description: putative protein phosphatase 2C homolog [Oryza
MEDYHVAKFTNFNGNELGLFAIFDGHKGDHVAAYLQKHLFSNILKDGEFLVDPRRAIAKAYENTDQKILADNRTDLESGGSTAVTAILINGKALWIANVGDSRAIVSSRGKAKQMSVDHDPDDDTERSMIESKGGFVTNRPGDVPRVNGLLAVSRVFGDKNLKAYLNSEPEIKDVTIDSHTDFLILASDGISKVMSNQEAVDVAKKLKDPKEAARQVVAEALKRNSKDDISCIVVRFR

SEQ ID NO: 77628 - DNA, 1742 bp, Arabidopsis thaliana
  misc_feature (1)..(1742): Ceres Seq. ID no. 12577032
  misc_feature: MA Experiment ID: 108461 Result: Up-regulated in Transcription
  misc_feature: MA Experiment 108461 PARAMETER Experiment Name: At_Germinating_Seeds_cDNA_P Parameter: Age (day) Value: 1 vs. 0
  misc_feature: MA Experiment 108461 PARAMETER Experiment Name: At_Germinating_Seeds_cDNA_P Parameter: Tissue Value: Germinating Seeds
agaaaagcgacgccgttttaaaggagatggataaacaaccggcgaccagttggagtatccatacccggccggagataatcgccaagtacgagatcttcgagcgagtcggatccggagcttacgccgacgtttacagagctcgccgtctctccgacggtctaatcgtcgcgctcaaggagattttcgattaccaatctgcgttccgggagattgacgcgctcaccatcctcaatggatctcctaatgtagttgttatgcacgaatacttctggcgtgaggaagagaacgctgtgcttgtgcttgagtttcttaggtcggatctcgctgcggtgatccgagatggtaagaggaagaagaaggtagaaggaggggatggattctcggttggggagattaagagatggatgattcagattttaaccggtgttgatgcttgtcatcggaatttgattgtacatagagatttgaagcctgggaatatgttgatttctgatgatggagttcttaagcttgctgattttggtcaggctaggatactcatggagcatgatattgtagcttcagatgaaaaccaacaagcttacaaactggaagacaaagatggagaaaccagcgaaccaccagaagttattcctgattatgagaactcacctaggcaagggtctgatggtcaggaacgggaagcgatgagtaaagacgagtacttccgacaggtggaagagctcaaggctaaacaggttgttagagatgatactgataaggactcgaatgtgcatgatggagacatatcttgccttgcaacgtgcactgttagtgaaatggatgatgatctcggtaggaactcgttttcttacgatgctgacgaagcagtggatgatacacagggtttgatgacatcttgtgtgggaacccgatggtttaggccaccagaactgctctatggatctacgatgtatgggttagaggtcgatctatggtcgcttggttgtgtgtttgcagaactcttgtctcttgagcctttgttcccaggaatttcagatattgatcagatcagcagagtgaccaatgtgctgggaaatttaaatgaagaggtctggcctggttgtgttgatcttccagactacaagtcaatctcatttgctaaagtagaatctcctcttggtattgaaggatgccttcccaaccattcaggggatgtgatatcgctgctcaagaagcttatctgttatgatccagctagtagagctactactatggagatgctgaatgacaaatatttaagtgaagagcctcttccagttccagtttcagagctctatgtgcctccgacaatgagtggaccagatgaggattctccgagaaagtggaatgattacagagaaatggattcagattcagattttgatggctttggacccatgaatgtaaagcctaccagtagtggatttacaatagaattcccctgaccttggcatttaagagtccatggttgagcatcttgatcatcccgacttcccctgaattcgcctactttgtcaaaaatgtgttgtgtgtgtgtgtgtgttgttcctctctctctgcctccctcgtatgaaaatggtaacatttacaattggaaagtcggtgttagcctttagctattagctgaagagctagttttcttgttgcccaggccattctttaccctatttttcatctgaagtaacaatgaaacaaaatctatatatactcgagttttgctt

SEQ ID NO: 77629 - protein, 487 aa, Arabidopsis thaliana
  peptide (1)..(487): Ceres Seq. ID no. 12577033
  misc_feature (29)..(426): Pfam Name: Protein kinase domain Pfam Description: Protein kinase domain
  misc_feature (9)..(487): Homolog of NCBI NO: 15235518 NR Description: Cyclin-dependent kinase F;1; protein id: supported by cDNA: gi_14596056, supported by cDNA: gi_17978692, by cDNA: gi_3218549 [Arabidopsis thaliana]
  misc_feature (14)..(486): Homolog of NCBI NO: 6984233 NR Description: CDK-activating kinase [Euphorbia esula]
  misc_feature (28)..(178): Homolog of NCBI NO: 23344742 NR Description: cell cycle related kinase [Homo sapiens]
  misc_feature (292)..(447): Homolog of NCBI NO: 23344742 NR Description: cell cycle related kinase [Homo sapiens]
  misc_feature (28)..(178): Homolog of NCBI NO: 16716469 NR Description: cell cycle related kinase; CDK-related protein
  misc_feature (296)..(447): Homolog of NCBI NO: 16716469 NR Description: cell cycle related kinase; CDK-related protein
  misc_feature (28)..(178): Homolog of NCBI NO: 34873735 NR Description: similar to CDK-related protein kinase PNQLARE
  misc_feature (296)..(447): Homolog of NCBI NO: 34873735 NR Description: similar to CDK-related protein kinase PNQLARE
  misc_feature (29)..(177): Homolog of NCBI NO: 4557439 NR Description: cyclin-dependent kinase 3 [Homo sapiens]
  misc_feature (301)..(440): Homolog of NCBI NO: 4557439 NR Description: cyclin-dependent kinase 3 [Homo sapiens]
KSDAVLKEMDKQPATSWSIHTRPEIIAKYEIFERVGSGAYADVYRARRLSDGLIVALKEIFDYQSAFREIDALTILNGSPNVVVMHEYFWREEENAVLVLEFLRSDLAAVIRDGKRKKKVEGGDGFSVGEIKRWMIQILTGVDACHRNLIVHRDLKPGNMLISDDGVLKLADFGQARILMEHDIVASDENQQAYKLEDKDGETSEPPEVIPDYENSPRQGSDGQEREAMSKDEYFRQVEELKAKQVVRDDTDKDSNVHDGDISCLATCTVSEMDDDLGRNSFSYDADEAVDDTQGLMTSCVGTRWFRPPELLYGSTMYGLEVDLWSLGCVFAELLSLEPLFPGISDIDQISRVTNVLGNLNEEVWPGCVDLPDYKSISFAKVESPLGIEGCLPNHSGDVISLLKKLICYDPASRATTMEMLNDKYLSEEPLPVPVSELYVPPTMSGPDEDSPRKWNDYREMDSDSDFDGFGPMNVKPTSSGFTIEFP

SEQ ID NO: 77630 - protein, 479 aa, Arabidopsis thaliana; identical to SEQ ID NO: 23187
  peptide (1)..(479): Ceres Seq. ID no. 12577034
  misc_feature (21)..(418): Pfam Name: Protein kinase domain Pfam Description: Protein kinase domain
  misc_feature (1)..(479): Homolog of NCBI NO: 15235518 NR Description: Cyclin-dependent kinase F;1; protein id: supported by cDNA: gi_14596056, supported by cDNA: gi_17978692, by cDNA: gi_3218549 [Arabidopsis thaliana]
  misc_feature (6)..(478): Homolog of NCBI NO: 6984233 NR Description: CDK-activating kinase [Euphorbia esula]
  misc_feature (20)..(170): Homolog of NCBI NO: 23344742 NR Description: cell cycle related kinase [Homo sapiens]
  misc_feature (284)..(439): Homolog of NCBI NO: 23344742 NR Description: cell cycle related kinase [Homo sapiens]
  misc_feature (20)..(170): Homolog of NCBI NO: 16716469 NR Description: cell cycle related kinase; CDK-related protein
  misc_feature (288)..(439): Homolog of NCBI NO: 16716469 NR Description: cell cycle related kinase; CDK-related protein
  misc_feature (20)..(170): Homolog of NCBI NO: 34873735 NR Description: similar to CDK-related protein kinase PNQLARE
  misc_feature (288)..(439): Homolog of NCBI NO: 34873735 NR Description: similar to CDK-related protein kinase PNQLARE
  misc_feature (21)..(169): Homolog of NCBI NO: 4557439 NR Description: cyclin-dependent kinase 3 [Homo sapiens]
  misc_feature (293)..(432): Homolog of NCBI NO: 4557439 NR Description: cyclin-dependent kinase 3 [Homo sapiens]

SEQ ID NO: 77631 - protein, 403 aa, Arabidopsis thaliana; identical to SEQ ID NO: 23188
  peptide (1)..(403): Ceres Seq. ID no. 12577035
  misc_feature (1)..(342): Pfam Name: Protein kinase domain Pfam Description: Protein kinase domain
  misc_feature (1)..(403): Homolog of NCBI NO: 15235518 NR Description: Cyclin-dependent kinase F;1; protein id: supported by cDNA: gi_14596056, supported by cDNA: gi_17978692, by cDNA: gi_3218549 [Arabidopsis thaliana]
  misc_feature (1)..(402): Homolog of NCBI NO: 6984233 NR Description: CDK-activating kinase [Euphorbia esula]
  misc_feature (1)..(94): Homolog of NCBI NO: 23344742 NR Description: cell cycle related kinase [Homo sapiens]
  misc_feature (208)..(363): Homolog of NCBI NO: 23344742 NR Description: cell cycle related kinase [Homo sapiens]
  misc_feature (1)..(94): Homolog of NCBI NO: 16716469 NR Description: cell cycle related kinase; CDK-related protein
  misc_feature (212)..(363): Homolog of NCBI NO: 16716469 NR Description: cell cycle related kinase; CDK-related protein
  misc_feature (1)..(94): Homolog of NCBI NO: 34873735 NR Description: similar to CDK-related protein kinase PNQLARE
  misc_feature (212)..(363): Homolog of NCBI NO: 34873735 NR Description: similar to CDK-related protein kinase PNQLARE
  misc_feature (1)..(93): Homolog of NCBI NO: 4557439 NR Description: cyclin-dependent kinase 3 [Homo sapiens]
  misc_feature (217)..(356): Homolog of NCBI NO: 4557439 NR Description: cyclin-dependent kinase 3 [Homo sapiens]

SEQ ID NO: 77632 - DNA, 803 bp, Arabidopsis thaliana
  misc_feature (1)..(803): Ceres Seq. ID no. 12577048
  misc_feature: MA Experiment ID: 108435 Result: Down-regulated in Transcription
  misc_feature: MA Experiment 108435 PARAMETER Experiment Name: At_stm_Mutants_cDNA_P Parameter: Plant Line Value: wt Landsburg vs stm
  misc_feature: MA Experiment 108435 PARAMETER Experiment Name: At_stm_Mutants_cDNA_P Parameter: Tissue Value: Shoot Apical Meristem Region
  misc_feature: MA Experiment ID: 108461 Result: Up-regulated in Transcription
  misc_feature: MA Experiment 108461 PARAMETER Experiment Name: At_Germinating_Seeds_cDNA_P Parameter: Age (day) Value: 1 vs. 0
  misc_feature: MA Experiment 108461 PARAMETER Experiment Name: At_Germinating_Seeds_cDNA_P Parameter: Tissue Value: Germinating Seeds
  misc_feature: MA Experiment ID: 108462 Result: Up-regulated in Transcription
  misc_feature: MA Experiment 108462 PARAMETER Experiment Name: At_Germinating_Seeds_cDNA_P Parameter: Age (day) Value: 2 vs. 0
  misc_feature: MA Experiment 108462 PARAMETER Experiment Name: At_Germinating_Seeds_cDNA_P Parameter: Tissue Value: Germinating Seeds
  misc_feature: MA Experiment ID: 108595 Result: Down-regulated in Transcription
  misc_feature: MA Experiment 108595 PARAMETER Experiment Name: At_Ler-pi_Ovule_cDNA_P Parameter: Plant Line Value: null
  misc_feature: MA Experiment ID: 20000069 Result: Down-regulated in Transcription
  misc_feature: MA Experiment 20000069 PARAMETER Experiment Name: At_100uM_ABA_Mutants_cDNA_P Parameter: Plant Line Value: CS23
  misc_feature: MA Experiment 20000069 PARAMETER Experiment Name: At_100uM_ABA_Mutants_cDNA_P Parameter: Timepoint (hr) Value: 6
  misc_feature: MA Experiment 20000069 PARAMETER Experiment Name: At_100uM_ABA_Mutants_cDNA_P Parameter: Tissue Value: Aerial
  misc_feature: MA Experiment 20000069 PARAMETER Experiment Name: At_100uM_ABA_Mutants_cDNA_P Parameter: Treatment Value: 100uM ABA vs. No Treatment
  misc_feature: MA Experiment ID: 20000071 Result: Down-regulated in Transcription
  misc_feature: MA Experiment 20000071 PARAMETER Experiment Name: At_100uM_ABA_Mutants_cDNA_P Parameter: Plant Line Value: CS8104
  misc_feature: MA Experiment 20000071 PARAMETER Experiment Name: At_100uM_ABA_Mutants_cDNA_P Parameter: Timepoint (hr) Value: 6
  misc_feature: MA Experiment 20000071 PARAMETER Experiment Name: At_100uM_ABA_Mutants_cDNA_P Parameter: Tissue Value: Aerial
  misc_feature: MA Experiment 20000071 PARAMETER Experiment Name: At_100uM_ABA_Mutants_cDNA_P Parameter: Treatment Value: 100uM ABA vs. No Treatment
  misc_feature: MA Experiment ID: 20000072 Result: Down-regulated in Transcription
  misc_feature: MA Experiment 20000072 PARAMETER Experiment Name: At_100uM_ABA_Mutants_cDNA_P Parameter: Plant Line Value: CS8105
  misc_feature: MA Experiment 20000072 PARAMETER Experiment Name: At_100uM_ABA_Mutants_cDNA_P Parameter: Timepoint (hr) Value: 6
  misc_feature: MA Experiment 20000072 PARAMETER Experiment Name: At_100uM_ABA_Mutants_cDNA_P Parameter: Tissue Value: Aerial
  misc_feature: MA Experiment 20000072 PARAMETER Experiment Name: At_100uM_ABA_Mutants_cDNA_P Parameter: Treatment Value: 100uM ABA vs. No Treatment
  misc_feature: MA Experiment ID: 20000086 Result: Down-regulated in Transcription
  misc_feature: MA Experiment 20000086 PARAMETER Experiment Name: At_100uM_ABA_Mutants_cDNA_P Parameter: Plant Line Value: CS22
  misc_feature: MA Experiment 20000086 PARAMETER Experiment Name: At_100uM_ABA_Mutants_cDNA_P Parameter: Timepoint (hr) Value: 6
  misc_feature: MA Experiment 20000086 PARAMETER Experiment Name: At_100uM_ABA_Mutants_cDNA_P Parameter: Tissue Value: Aerial
  misc_feature: MA Experiment 20000086 PARAMETER Experiment Name: At_100uM_ABA_Mutants_cDNA_P Parameter: Treatment Value: 100uM ABA vs. No Treatment
  misc_feature: MA Experiment ID: 20000087 Result: Down-regulated in Transcription
  misc_feature: MA Experiment 20000087 PARAMETER Experiment Name: At_100uM_ABA_Mutants_cDNA_P Parameter: Plant Line Value: WS
  misc_feature: MA Experiment 20000087 PARAMETER Experiment Name: At_100uM_ABA_Mutants_cDNA_P Parameter: Timepoint (hr) Value: 6
  misc_feature: MA Experiment 20000087 PARAMETER Experiment Name: At_100uM_ABA_Mutants_cDNA_P Parameter: Tissue Value: Aerial
  misc_feature: MA Experiment 20000087 PARAMETER Experiment Name: At_100uM_ABA_Mutants_cDNA_P Parameter: Treatment Value: 100uM ABA vs. No Treatment
  misc_feature: MA Experiment ID: 20000117 Result: Down-regulated in Transcription
  misc_feature: MA Experiment 20000117 PARAMETER Experiment Name: At_100uM_ABA_Mutants_cDNA_P Parameter: Plant Line Value: Columbia
  misc_feature: MA Experiment 20000117 PARAMETER Experiment Name: At_100uM_ABA_Mutants_cDNA_P Parameter: Timepoint (hr) Value: 6
  misc_feature: MA Experiment 20000117 PARAMETER Experiment Name: At_100uM_ABA_Mutants_cDNA_P Parameter: Tissue Value: Aerial
  misc_feature: MA Experiment 20000117 PARAMETER Experiment Name: At_100uM_ABA_Mutants_cDNA_P Parameter: Treatment Value: 100uM ABA vs. No Treatment
  misc_feature: MA Experiment ID: 20000180 Result: Up-regulated in Transcription
  misc_feature: MA Experiment 20000180 PARAMETER Experiment Name: At_Germinating_Seeds_P Parameter: Age (hr) Value: 24 vs. 0
  misc_feature: MA Experiment 20000180 PARAMETER Experiment Name: At_Germinating_Seeds_P Parameter: Tissue Value: Germinating Seeds
  misc_feature: MA Experiment ID: 20000184 Result: Up-regulated in Transcription
  misc_feature: MA Experiment 20000184 PARAMETER Experiment Name: At_Shoots__P Parameter: Age (day) Value: 7
  misc_feature: MA Experiment 20000184 PARAMETER Experiment Name: At_Shoots__P Parameter: Tissue Value: Shoots vs. Whole Plant
  misc_feature: MA Experiment ID: 20000234 Result: Up-regulated in Transcription
  misc_feature: MA Experiment 20000234 PARAMETER Experiment Name: At_Siliques_P Parameter: Age (day) Value: 21
  misc_feature: MA Experiment 20000234 PARAMETER Experiment Name: At_Siliques_P Parameter: Organism Value: A. thaliana
  misc_feature: MA Experiment 20000234 PARAMETER Experiment Name: At_Siliques_P Parameter: Plant Line Value: WS
  misc_feature: MA Experiment 20000234 PARAMETER Experiment Name: At_Siliques_P Parameter: Tissue Value: Less Than 5mm Siliques vs. Whole Plant
  misc_feature: MA Experiment ID: 20000265 Result: Up-regulated in Transcription
  misc_feature: MA Experiment 20000265 PARAMETER Experiment Name: At_Open_Flower_P Parameter: Age (day) Value: 21
  misc_feature: MA Experiment 20000265 PARAMETER Experiment Name: At_Open_Flower_P Parameter: Plant Line Value: WS
  misc_feature: MA Experiment 20000265 PARAMETER Experiment Name: At_Open_Flower_P Parameter: Tissue Value: Closed Flower vs. Whole Plant
  misc_feature: MA Experiment ID: 20000437 Result: Down-regulated in Transcription
  misc_feature: MA Experiment 20000437 PARAMETER Experiment Name: At_Drought_P Parameter: Age (day) Value: 8
  misc_feature: MA Experiment 20000437 PARAMETER Experiment Name: At_Drought_P Parameter: Organism Value: A. thaliana
  misc_feature: MA Experiment 20000437 PARAMETER Experiment Name: At_Drought_P Parameter: Plant Line Value: WS
  misc_feature: MA Experiment 20000437 PARAMETER Experiment Name: At_Drought_P Parameter: Timepoint (hr) Value: 24
  misc_feature: MA Experiment 20000437 PARAMETER Experiment Name: At_Drought_P Parameter: Tissue Value: Whole Plant
  misc_feature: MA Experiment 20000437 PARAMETER Experiment Name: At_Drought_P Parameter: Treatment Value: Drought vs. No Drought
  misc_feature: MA Experiment ID: 20000439 Result: Down-regulated in Transcription
  misc_feature: MA Experiment 20000439 PARAMETER Experiment Name: At_Roots__P Parameter: Age (day) Value: 14 vs. 21
  misc_feature: MA Experiment 20000439 PARAMETER Experiment Name: At_Roots__P Parameter: Organism Value: A. thaliana
  misc_feature: MA Experiment 20000439 PARAMETER Experiment Name: At_Roots__P Parameter: Tissue Value: Roots vs. Whole Plant
  misc_feature: MA Experiment ID: 20000794 Result: Down-regulated in Transcription
  misc_feature: MA Experiment 20000794 PARAMETER Experiment Name: At_Petals_P Parameter: Age (day) Value: 23-25 days
  misc_feature: MA Experiment 20000794 PARAMETER Experiment Name: At_Petals_P Parameter: Plant Line Value: WS
  misc_feature: MA Experiment 20000794 PARAMETER Experiment Name: At_Petals_P Parameter: Tissue Value: Petals vs. Whole plant
  misc_feature: MA Experiment ID: 20001248 Result: Down-regulated in Transcription
  misc_feature: MA Experiment 20001248 PARAMETER Experiment Name: At_Far-red-induction_P Parameter: Age (day) Value: 7
  misc_feature: MA Experiment 20001248 PARAMETER Experiment Name: At_Far-red-induction_P Parameter: Light Value: Far-red vs. White
  misc_feature: MA Experiment 20001248 PARAMETER Experiment Name: At_Far-red-induction_P Parameter: Organism Value: A. thaliana
  misc_feature: MA Experiment 20001248 PARAMETER Experiment Name: At_Far-red-induction_P Parameter: Plant Line Value: Columbia
  misc_feature: MA Experiment 20001248 PARAMETER Experiment Name: At_Far-red-induction_P Parameter: Timepoint (hr) Value: 4
  misc_feature: MA Experiment 20001248 PARAMETER Experiment Name: At_Far-red-induction_P Parameter: Tissue Value: Whole Plant
  misc_feature: MA Experiment ID: 20001450 Result: Down-regulated in Transcription
  misc_feature: MA Experiment 20001450 PARAMETER Experiment Name: At_Far-red-induction_P Parameter: Age (day) Value: 7
  misc_feature: MA Experiment 20001450 PARAMETER Experiment Name: At_Far-red-induction_P Parameter: Light Value: Far-red vs. White
  misc_feature: MA Experiment 20001450 PARAMETER Experiment Name: At_Far-red-induction_P Parameter: Organism Value: A. thaliana
  misc_feature: MA Experiment 20001450 PARAMETER Experiment Name: At_Far-red-induction_P Parameter: Plant Line Value: Columbia
  misc_feature: MA Experiment 20001450 PARAMETER Experiment Name: At_Far-red-induction_P Parameter: Timepoint (hr) Value: 8
  misc_feature: MA Experiment 20001450 PARAMETER Experiment Name: At_Far-red-induction_P Parameter: Tissue Value: Whole Plant
  misc_feature: MA Experiment ID: 20001906 Result: Down-regulated in Transcription
  misc_feature: MA Experiment 20001906 PARAMETER Experiment Name: At_Drought_Reproduction_P Parameter: Age (day) Value: 35
  misc_feature: MA Experiment 20001906 PARAMETER Experiment Name: At_Drought_Reproduction_P Parameter: Organism Value: A. thaliana
  misc_feature: MA Experiment 20001906 PARAMETER Experiment Name: At_Drought_Reproduction_P Parameter: Plant Line Value: WS
  misc_feature: MA Experiment 20001906 PARAMETER Experiment Name: At_Drought_Reproduction_P Parameter: Timepoint (day) Value: 5
  misc_feature: MA Experiment 20001906 PARAMETER Experiment Name: At_Drought_Reproduction_P Parameter: Tissue Value: Siliques
  misc_feature: MA Experiment 20001906 PARAMETER Experiment Name: At_Drought_Reproduction_P Parameter: Treatment Value: Drought vs. No Drought
aatcacgtccttgtagaggaaaagaaaaaaaatggctgcttcatcttcctctttcactctctgtaatcacaccacacttcgtactctccctctgagaaagacccttgtcaccaaaacccaattttcagttcccacaaaatcatcagaatctaacttctttggctccacactcactcactcatcgtatatctccccagtctcttcctcttctctcaaaggcttaatctttgccaaggttaacaagggtcaggctgcaccagacttcacactaaaggatcaaaacggaaagccggtgagcctcaaaaagtataaagggaagcctgttgttctctacttctaccctgcagatgaaacccctggctgcaccaagcaggcttgtgctttcagagactcttatgagaaattcaagaaagctggtgcagaggtcattggcattagtggagatgactctgcttctcacaaggcgtttgcaagcaaatacaaactaccgtatacattgttaagcgacgaagggaataaggtgagaaaagattggggagtgcctggagacctgtttggagcattgccagggagacagacttacgttcttgacaaaaacggtgttgttcagctcatctacaacaaccagttccagcctgagaaacacatcgacgagaccttgaagtttctcaaagctgcttgatcattctctctttctcttctttctcttctttcatgcatgtctcatgtctgtctccatgagaccatgaccttcttatattgtttctgttgagtatgaattttcaataataccatgttatacc

SEQ ID NO: 77633 - protein, 216 aa, Arabidopsis thaliana
  peptide (1)..(216): Ceres Seq. ID no. 12577049
  misc_feature (71)..(210): Pfam Name: AhpC/TSA family Pfam Description: AhpC/TSA family
  misc_feature (1)..(216): Homolog of NCBI NO: 15230982 NR Description: putative peroxiredoxin; protein id: At3g26060.1, by cDNA: gi_15081742, supported by cDNA: gi_18252272 [Arabidopsis
  misc_feature (37)..(215): Homolog of NCBI NO: 6899842 NR Description: peroxiredoxin Q [Sedum lineare]
  misc_feature (23)..(216): Homolog of NCBI NO: 39748708 NR Description: peroxiredoxin Q [Gentiana triflora]
  misc_feature (69)..(214): Homolog of NCBI NO: 17230675 NR Description: bacterioferritin comigratory protein [Nostoc sp.
  misc_feature (69)..(214): Homolog of NCBI NO: 23125049 NR Description: hypothetical protein [Nostoc punctiforme]
  misc_feature (68)..(214): Homolog of NCBI NO: 28850433 NR Description: similar to Anabaena sp. (strain PCC 7120).
  misc_feature (68)..(214): Homolog of NCBI NO: 23041480 NR Description: hypothetical protein [Trichodesmium erythraeum
  misc_feature (69)..(214): Homolog of NCBI NO: 15898858 NR Description: Peroxiredoxin, bacterioferritin comigratory
  misc_feature (67)..(214): Homolog of NCBI NO: 21673494 NR Description: bacterioferritin comigratory protein, thiol putative [Chlorobium tepidum TLS] >gi|21646601|gb|AAM71901.1| comigratory protein, thiol peroxidase, putative [Chlorobium
  misc_feature (69)..(214): Homolog of NCBI NO: 16081486 NR Description: thiol-specific antioxidant related protein
MAASSSSFTLCNHTTLRTLPLRKTLVTKTQFSVPTKSSESNFFGSTLTHSSYISPVSSSSLKGLIFAKVNKGQAAPDFTLKDQNGKPVSLKKYKGKPVVLYFYPADETPGCTKQACAFRDSYEKFKKAGAEVIGISGDDSASHKAFASKYKLPYTLLSDEGNKVRKDWGVPGDLFGALPGRQTYVLDKNGVVQLIYNNQFQPEKHIDETLKFLKAA

SEQ ID NO: 77634 - DNA, 1810 bp, Arabidopsis thaliana
  misc_feature (1)..(1810): Ceres Seq. ID no. 12577050
  misc_feature: MA Experiment ID: 108461 Result: Up-regulated in Transcription
  misc_feature: MA Experiment 108461 PARAMETER Experiment Name: At_Germinating_Seeds_cDNA_P Parameter: Age (day) Value: 1 vs. 0
  misc_feature: MA Experiment 108461 PARAMETER Experiment Name: At_Germinating_Seeds_cDNA_P Parameter: Tissue Value: Germinating Seeds
  misc_feature: MA Experiment ID: 108573 Result: Up-regulated in Transcription
  misc_feature: MA Experiment 108573 PARAMETER Experiment Name: At_Drought_cDNA_P Parameter: Timepoint (hr) Value: 6
  misc_feature: MA Experiment 108573 PARAMETER Experiment Name: At_Drought_cDNA_P Parameter: Tissue Value: Aerial
  misc_feature: MA Experiment 108573 PARAMETER Experiment Name: At_Drought_cDNA_P Parameter: Treatment Value: Drought vs. No Drought
  misc_feature: MA Experiment ID: 108595 Result: Down-regulated in Transcription
  misc_feature: MA Experiment 108595 PARAMETER Experiment Name: At_Ler-pi_Ovule_cDNA_P Parameter: Plant Line Value: null
  misc_feature: MA Experiment ID: 108608 Result: Down-regulated in Transcription
  misc_feature: MA Experiment 108608 PARAMETER Experiment Name: At_100uM_ABA_cDNA_P Parameter: Timepoint (hr) Value: 1
  misc_feature: MA Experiment 108608 PARAMETER Experiment Name: At_100uM_ABA_cDNA_P Parameter: Tissue Value: Aerial
  misc_feature: MA Experiment 108608 PARAMETER Experiment Name: At_100uM_ABA_cDNA_P Parameter: Treatment Value: 100uM ABA vs. No Treatment
  misc_feature: MA Experiment ID: 20000069 Result: Up-regulated in Transcription
  misc_feature: MA Experiment 20000069 PARAMETER Experiment Name: At_100uM_ABA_Mutants_cDNA_P Parameter: Plant Line Value: CS23
  misc_feature: MA Experiment 20000069 PARAMETER Experiment Name: At_100uM_ABA_Mutants_cDNA_P Parameter: Timepoint (hr) Value: 6
  misc_feature: MA Experiment 20000069 PARAMETER Experiment Name: At_100uM_ABA_Mutants_cDNA_P Parameter: Tissue Value: Aerial
  misc_feature: MA Experiment 20000069 PARAMETER Experiment Name: At_100uM_ABA_Mutants_cDNA_P Parameter: Treatment Value: 100uM ABA vs. No Treatment
  misc_feature: MA Experiment ID: 20000087 Result: Up-regulated in Transcription
  misc_feature: MA Experiment 20000087 PARAMETER Experiment Name: At_100uM_ABA_Mutants_cDNA_P Parameter: Plant Line Value: WS
  misc_feature: MA Experiment 20000087 PARAMETER Experiment Name: At_100uM_ABA_Mutants_cDNA_P Parameter: Timepoint (hr) Value: 6
  misc_feature: MA Experiment 20000087 PARAMETER Experiment Name: At_100uM_ABA_Mutants_cDNA_P Parameter: Tissue Value: Aerial
  misc_feature: MA Experiment 20000087 PARAMETER Experiment Name: At_100uM_ABA_Mutants_cDNA_P Parameter: Treatment Value: 100uM ABA vs. No Treatment
  misc_feature: MA Experiment ID: 20000089 Result: Up-regulated in Transcription
  misc_feature: MA Experiment ID: 20000090 Result: Up-regulated in Transcription
  misc_feature: MA Experiment ID: 20000112 Result: Down-regulated in Transcription
  misc_feature: MA Experiment 20000112 PARAMETER Experiment Name: At_42deg_Heat_cDNA_P Parameter: Temperature (deg C) Value: 42 vs. 22
  misc_feature: MA Experiment 20000112 PARAMETER Experiment Name: At_42deg_Heat_cDNA_P Parameter: Timepoint (hr) Value: 2
  misc_feature: MA Experiment 20000112 PARAMETER Experiment Name: At_42deg_Heat_cDNA_P Parameter: Tissue Value: Aerial
  misc_feature: MA Experiment ID: 20000117 Result: Up-regulated in Transcription
  misc_feature: MA Experiment 20000117 PARAMETER Experiment Name: At_100uM_ABA_Mutants_cDNA_P Parameter: Plant Line Value: Columbia
  misc_feature: MA Experiment 20000117 PARAMETER Experiment Name: At_100uM_ABA_Mutants_cDNA_P Parameter: Timepoint (hr) Value: 6
  misc_feature: MA Experiment 20000117 PARAMETER Experiment Name: At_100uM_ABA_Mutants_cDNA_P Parameter: Tissue Value: Aerial
  misc_feature: MA Experiment 20000117 PARAMETER Experiment Name: At_100uM_ABA_Mutants_cDNA_P Parameter: Treatment Value: 100uM ABA vs. No Treatment
  misc_feature: MA Experiment ID: 20000173 Result: Down-regulated in Transcription
  misc_feature: MA Experiment 20000173 PARAMETER Experiment Name: At_42deg_Heat_P Parameter: Age (day) Value: 14
  misc_feature: MA Experiment 20000173 PARAMETER Experiment Name: At_42deg_Heat_P Parameter: Organism Value: A. thaliana
  misc_feature: MA Experiment 20000173 PARAMETER Experiment Name: At_42deg_Heat_P Parameter: Plant Line Value: WS
  misc_feature: MA Experiment 20000173 PARAMETER Experiment Name: At_42deg_Heat_P Parameter: Temperature (deg C) Value: 42 vs. 22
  misc_feature: MA Experiment 20000173 PARAMETER Experiment Name: At_42deg_Heat_P Parameter: Timepoint (hr) Value: 6
  misc_feature: MA Experiment 20000173 PARAMETER Experiment Name: At_42deg_Heat_P Parameter: Tissue Value: Aerial
  misc_feature: MA Experiment ID: 20000180 Result: Up-regulated in Transcription
  misc_feature: MA Experiment 20000180 PARAMETER Experiment Name: At_Germinating_Seeds_P Parameter: Age (hr) Value: 24 vs. 0
  misc_feature: MA Experiment 20000180 PARAMETER Experiment Name: At_Germinating_Seeds_P Parameter: Tissue Value: Germinating Seeds
  misc_feature: MA Experiment ID: 20000213 Result: Up-regulated in Transcription
  misc_feature: MA Experiment 20000213 PARAMETER Experiment Name: At_4deg_Cold_P Parameter: Timepoint (hr) Value: 2
  misc_feature: MA Experiment ID: 20000214 Result: Up-regulated in Transcription
  misc_feature: MA Experiment 20000214 PARAMETER Experiment Name: At_4deg_Cold_P Parameter: Timepoint (hr) Value: 6
  misc_feature: MA Experiment ID: 20000234 Result: Down-regulated in Transcription
  misc_feature: MA Experiment 20000234 PARAMETER Experiment Name: At_Siliques_P Parameter: Age (day) Value: 21
  misc_feature: MA Experiment 20000234 PARAMETER Experiment Name: At_Siliques_P Parameter: Organism Value: A. thaliana
  misc_feature: MA Experiment 20000234 PARAMETER Experiment Name: At_Siliques_P Parameter: Plant Line Value: WS
  misc_feature: MA Experiment 20000234 PARAMETER Experiment Name: At_Siliques_P Parameter: Tissue Value: Less Than 5mm Siliques vs. Whole Plant
  misc_feature: MA Experiment ID: 20000264 Result: Down-regulated in Transcription
  misc_feature: MA Experiment 20000264 PARAMETER Experiment Name: At_Open_Flower_P Parameter: Age (day) Value: 21
  misc_feature: MA Experiment 20000264 PARAMETER Experiment Name: At_Open_Flower_P Parameter: Plant Line Value: WS
  misc_feature: MA Experiment 20000264 PARAMETER Experiment Name: At_Open_Flower_P Parameter: Tissue Value: Open Flower vs. Whole Plant
  misc_feature: MA Experiment ID: 20000265 Result: Down-regulated in Transcription
  misc_feature: MA Experiment 20000265 PARAMETER Experiment Name: At_Open_Flower_P Parameter: Age (day) Value: 21
  misc_feature: MA Experiment 20000265 PARAMETER Experiment Name: At_Open_Flower_P Parameter: Plant Line Value: WS
  misc_feature: MA Experiment 20000265 PARAMETER Experiment Name: At_Open_Flower_P Parameter: Tissue Value: Closed Flower vs. Whole Plant
  misc_feature: MA Experiment ID: 20000286 Result: Down-regulated in Transcription
  misc_feature: MA Experiment 20000286 PARAMETER Experiment Name: At_Open_Flower_P Parameter: Age (day) Value: 21
  misc_feature: MA Experiment 20000286 PARAMETER Experiment Name: At_Open_Flower_P Parameter: Plant Line Value: WS
  misc_feature: MA Experiment 20000286 PARAMETER Experiment Name: At_Open_Flower_P Parameter: Tissue Value: Half Open vs. Whole Plant
  misc_feature: MA Experiment ID: 20000436 Result: Up-regulated in Transcription
  misc_feature: MA Experiment 20000436 PARAMETER Experiment Name: At_Drought_P Parameter: Age (day) Value: 7
  misc_feature: MA Experiment 20000436 PARAMETER Experiment Name: At_Drought_P Parameter: Organism Value: A. thaliana
  misc_feature: MA Experiment 20000436 PARAMETER Experiment Name: At_Drought_P Parameter: Plant Line Value: WS
  misc_feature: MA Experiment 20000436 PARAMETER Experiment Name: At_Drought_P Parameter: Timepoint (hr) Value: 12
  misc_feature: MA Experiment 20000436 PARAMETER Experiment Name: At_Drought_P Parameter: Tissue Value: Whole Plant
  misc_feature: MA Experiment 20000436 PARAMETER Experiment Name: At_Drought_P Parameter: Treatment Value: Drought vs. No Drought
  misc_feature: MA Experiment ID: 20000437 Result: Up-regulated in Transcription
  misc_feature: MA Experiment 20000437 PARAMETER Experiment Name: At_Drought_P Parameter: Age (day) Value: 8
  misc_feature: MA Experiment 20000437 PARAMETER Experiment Name: At_Drought_P Parameter: Organism Value: A. thaliana
  misc_feature: MA Experiment 20000437 PARAMETER Experiment Name: At_Drought_P Parameter: Plant Line Value: WS
  misc_feature: MA Experiment 20000437 PARAMETER Experiment Name: At_Drought_P Parameter: Timepoint (hr) Value: 24
  misc_feature: MA Experiment 20000437 PARAMETER Experiment Name: At_Drought_P Parameter: Tissue Value: Whole Plant
  misc_feature: MA Experiment 20000437 PARAMETER Experiment Name: At_Drought_P Parameter: Treatment Value: Drought vs. No Drought
  misc_feature: MA Experiment ID: 20000438 Result: Down-regulated in Transcription
  misc_feature: MA Experiment 20000438 PARAMETER Experiment Name: At_Shoots__P Parameter: Age (day) Value: 14
  misc_feature: MA Experiment 20000438 PARAMETER Experiment Name: At_Shoots__P Parameter: Tissue Value: Shoots vs. Whole Plant
  misc_feature: MA Experiment ID: 20001248 Result: Up-regulated in Transcription
  misc_feature: MA Experiment 20001248 PARAMETER Experiment Name: At_Far-red-induction_P Parameter: Age (day) Value: 7
  misc_feature: MA Experiment 20001248 PARAMETER Experiment Name: At_Far-red-induction_P Parameter: Light Value: Far-red vs. White
  misc_feature: MA Experiment 20001248 PARAMETER Experiment Name: At_Far-red-induction_P Parameter: Organism Value: A. thaliana
  misc_feature: MA Experiment 20001248 PARAMETER Experiment Name: At_Far-red-induction_P Parameter: Plant Line Value: Columbia
  misc_feature: MA Experiment 20001248 PARAMETER Experiment Name: At_Far-red-induction_P Parameter: Timepoint (hr) Value: 4
  misc_feature: MA Experiment 20001248 PARAMETER Experiment Name: At_Far-red-induction_P Parameter: Tissue Value: Whole Plant
  misc_feature: MA Experiment ID: 20001450 Result: Up-regulated in Transcription
  misc_feature: MA Experiment 20001450 PARAMETER Experiment Name: At_Far-red-induction_P Parameter: Age (day) Value: 7
  misc_feature: MA Experiment 20001450 PARAMETER Experiment Name: At_Far-red-induction_P Parameter: Light Value: Far-red vs. White
  misc_feature: MA Experiment 20001450 PARAMETER Experiment Name: At_Far-red-induction_P Parameter: Organism Value: A. thaliana
  misc_feature: MA Experiment 20001450 PARAMETER Experiment Name: At_Far-red-induction_P Parameter: Plant Line Value: Columbia
  misc_feature: MA Experiment 20001450 PARAMETER Experiment Name: At_Far-red-induction_P Parameter: Timepoint (hr) Value: 8
  misc_feature: MA Experiment 20001450 PARAMETER Experiment Name: At_Far-red-induction_P Parameter: Tissue Value: Whole Plant
  misc_feature: MA Experiment ID: 20001451 Result: Up-regulated in Transcription
  misc_feature: MA Experiment 20001451 PARAMETER Experiment Name: At_Far-red-induction_P Parameter: Age (day) Value: 7
  misc_feature: MA Experiment 20001451 PARAMETER Experiment Name: At_Far-red-induction_P Parameter: Light Value: Far-red vs. White
  misc_feature: MA Experiment 20001451 PARAMETER Experiment Name: At_Far-red-induction_P Parameter: Organism Value: A. thaliana
  misc_feature: MA Experiment 20001451 PARAMETER Experiment Name: At_Far-red-induction_P Parameter: Plant Line Value: Columbia
  misc_feature: MA Experiment 20001451 PARAMETER Experiment Name: At_Far-red-induction_P Parameter: Timepoint (hr) Value: 24
  misc_feature: MA Experiment 20001451 PARAMETER Experiment Name: At_Far-red-induction_P Parameter: Tissue Value: Whole Plant
  misc_feature: MA Experiment ID: 20001555 Result: Up-regulated in Transcription
  misc_feature: MA Experiment 20001555 PARAMETER Experiment Name: At_Drought_Soil_Dry_P Parameter: Age (day) Value: 24
  misc_feature: MA Experiment 20001555 PARAMETER Experiment Name: At_Drought_Soil_Dry_P Parameter: Organism Value: A. thaliana
  misc_feature: MA Experiment 20001555 PARAMETER Experiment Name: At_Drought_Soil_Dry_P Parameter: Plant Line Value: WS
  misc_feature: MA Experiment 20001555 PARAMETER Experiment Name: At_Drought_Soil_Dry_P Parameter: Post Timepoint (hr) Value: None
  misc_feature: MA Experiment 20001555 PARAMETER Experiment Name: At_Drought_Soil_Dry_P Parameter: Post-Treatment Value: None
  misc_feature: MA Experiment 20001555 PARAMETER Experiment Name: At_Drought_Soil_Dry_P Parameter: Timepoint (day) Value: 10
  misc_feature: MA Experiment 20001555 PARAMETER Experiment Name: At_Drought_Soil_Dry_P Parameter: Treatment Value: Drought vs. No Drought
  misc_feature: MA Experiment ID: 20001558 Result: Down-regulated in Transcription
  misc_feature: MA Experiment 20001558 PARAMETER Experiment Name: At_Drought_Soil_Dry_P Parameter: Age (day) Value: 27
  misc_feature: MA Experiment 20001558 PARAMETER Experiment Name: At_Drought_Soil_Dry_P Parameter: Organism Value: A. thaliana
  misc_feature: MA Experiment 20001558 PARAMETER Experiment Name: At_Drought_Soil_Dry_P Parameter: Plant Line Value: WS
  misc_feature: MA Experiment 20001558 PARAMETER Experiment Name: At_Drought_Soil_Dry_P Parameter: Post Timepoint (hr) Value: 6
  misc_feature: MA Experiment 20001558 PARAMETER Experiment Name: At_Drought_Soil_Dry_P Parameter: Post-Treatment Value: Re-Water vs. No Drought
  misc_feature: MA Experiment 20001558 PARAMETER Experiment Name: At_Drought_Soil_Dry_P Parameter: Timepoint (day) Value: 13
  misc_feature: MA Experiment 20001558 PARAMETER Experiment Name: At_Drought_Soil_Dry_P Parameter: Treatment Value: Drought vs. No Drought
  misc_feature: MA Experiment ID: 20001559 Result: Up-regulated in Transcription
  misc_feature: MA Experiment 20001559 PARAMETER Experiment Name: At_Drought_Soil_Dry_P Parameter: Age (day) Value: 28
  misc_feature: MA Experiment 20001559 PARAMETER Experiment Name: At_Drought_Soil_Dry_P Parameter: Organism Value: A. thaliana
  misc_feature: MA Experiment 20001559 PARAMETER Experiment Name: At_Drought_Soil_Dry_P Parameter: Plant Line Value: WS
  misc_feature: MA Experiment 20001559 PARAMETER Experiment Name: At_Drought_Soil_Dry_P Parameter: Post Timepoint (hr) Value: 29
  misc_feature: MA Experiment 20001559 PARAMETER Experiment Name: At_Drought_Soil_Dry_P Parameter: Post-Treatment Value: Re-Water vs. No Drought
  misc_feature: MA Experiment 20001559 PARAMETER Experiment Name: At_Drought_Soil_Dry_P Parameter: Timepoint (day) Value: 14
  misc_feature: MA Experiment 20001559 PARAMETER Experiment Name: At_Drought_Soil_Dry_P Parameter: Treatment Value: Drought vs. No Drought
  misc_feature: MA Experiment ID: 20001560 Result: Down-regulated in Transcription
  misc_feature: MA Experiment 20001560 PARAMETER Experiment Name: At_Drought_Soil_Dry_P Parameter: Age (day) Value: 28
  misc_feature: MA Experiment 20001560 PARAMETER Experiment Name: At_Drought_Soil_Dry_P Parameter: Organism Value: A. thaliana
  misc_feature: MA Experiment 20001560 PARAMETER Experiment Name: At_Drought_Soil_Dry_P Parameter: Plant Line Value: WS
  misc_feature: MA Experiment 20001560 PARAMETER Experiment Name: At_Drought_Soil_Dry_P Parameter: Post Timepoint (hr) Value: None
  misc_feature: MA Experiment 20001560 PARAMETER Experiment Name: At_Drought_Soil_Dry_P Parameter: Post-Treatment Value: None
  misc_feature: MA Experiment 20001560 PARAMETER Experiment Name: At_Drought_Soil_Dry_P Parameter: Timepoint (day) Value: 14
  misc_feature: MA Experiment 20001560 PARAMETER Experiment Name: At_Drought_Soil_Dry_P Parameter: Treatment Value: Drought vs. No Drought
tcttctccattgttaaaagctctcacacaaccaccgttctccgtcacggtggcgctttattctctcatcggagcgcctcaccggtggcagacggtgtcgttgttcctctcctaaaacctccatcaatcaccatctctttacacagagctctaaccaaaatcttcgagagatggggcagagtatgagctgtggaagtcgaccggagcacggaatattcgcctctgtacagtgcggcgatatcatcactatccgtcgtgtgatggcgacggagcctagtctgttgaatcaaactactccttatgatcgtcactctgttcttcatgtcgctgctgctaatggtcagatcgagattttgtcattgcttttggaacgatttacgaatccagatttgttgaatcgtcacaagcagactccgttaatgttggctgcgatgtatggaagaatctcttgtgtgaagaagctagctgaagttggagctaatattttgatgtttgattctgtgaatcgaagaacatgtttgcattacgctgcttattatggacatgctaattgtgttcaagctattctctctgctgctcaatcaagtcctgttgctgtccattggggatatgcgagatttgtgaacataagagatgataaaggagcgactccgttgcatttagctgctcgacagagacgacctgaatgtgtgaatgttttgttggatagtggttctcttgtttgtgcatctactagtgtatatggttctccaggaagcacacctcttcatttagcagctagaagtggatctatagattgtgtcagaaagttgcttgcttggggtgctgatcgtcttcaacgagacgcttctgggagaataccttatgtggttgcgatgaagcataagcatggagcatgtggagccttacttaatccgtcctctgcagagccacttgtttggccatcaccattaaagttcatcagtgagcttaatgacgaggcgaaacttctcttagagcaggctttaatggaggctaacagggagagagagaaaaccatcctcaaaggaacagcttattccttaccatcaccctctttctctgacacggatgataacatgtccgaggtgagtgatacggaactgtgctgcatttgctttgagcaagtatgtacaattgaagttaaagactgtggtcaccaaatgtgtgcacaatgcacacttgcactgtgctgtcacaacaaaccaaacccaacgacctcaaccgtgactccaccggtctgtccgttctgtagaagcaccattgcatgtttagtcgtcgcccagaacaacaacaacaacaacgaaaagagcaaaagcctagatgatgttgttgttgttgatcgtgaggcaggtgatgttagctcctccaaattcagaaaacatagaagatcaataaaccttggcgaagaaagcagcagcttcatgggactatcaactattggatcattcggtaggataaccggccgtggctcgggaaggatcgcagccgaaaacgagctgatggacaaaccaatattgtgagggatcgattccgttttaagggacattttggggcatgggggagcaataaaaaagatgaggggatgaaattgtgagaatgtataaaatatagatgaatttatgttagatcttttgttgaagggaggaagattgaaataaggaaaaagatgtggggaggtgtgtaatgcaaggatttgttgtttctttgattaagtttggccaaaattgtttgttgttgttattatttggttacttgatatgaaagggaaacccataatctttttgtcaaat

SEQ ID NO: 77635 - protein, 456 aa, Arabidopsis thaliana; identical to SEQ ID NO: 21329
  peptide (1)..(456): Ceres Seq. ID no. 12577051
  misc_feature (112)..(145): Pfam Name: Ankyrin repeat Pfam Description: Ankyrin repeat
  misc_feature (1)..(456): Homolog of NCBI NO: 30684032 NR Description: RING zinc finger ankyrin protein -related thaliana] >gi|14596109|gb|AAK68782.1| putative RING zinc finger protein [Arabidopsis thaliana] >gi|20148259|gb|AAM10020.1|
  misc_feature (31)..(456): Homolog of NCBI NO: 25408016 NR Description: probable RING zinc finger ankyrin protein - Arabidopsis thaliana >gi|3927831|gb|AAC79588.1| putative RING finger ankyrin protein [Arabidopsis thaliana]
  misc_feature (1)..(454): Homolog of NCBI NO: 14279688 NR Description: receptor-like kinase Xa21-binding protein 3
  misc_feature (1)..(389): Homolog of NCBI NO: 34906062 NR Description: putative receptor-like kinase Xa21-binding
  misc_feature (1)..(216): Homolog of NCBI NO: 16226319 NR Description: At2g28840/F8N16.13 [Arabidopsis thaliana]
  misc_feature (279)..(454): Homolog of NCBI NO: 25044835 NR Description: RING zinc finger protein [Ananas comosus]
  misc_feature (125)..(429): Homolog of NCBI NO: 37573164 NR Description: receptor-like kinase Xa21-binding protein 3-like
  misc_feature (1)..(134): Homolog of NCBI NO: 37573164 NR Description: receptor-like kinase Xa21-binding protein 3-like
  misc_feature (1)..(207): Homolog of NCBI NO: 15240746 NR Description: putative protein; protein id: At5g07270.1
  misc_feature (315)..(371): Homolog of NCBI NO: 15240746 NR Description: putative protein; protein id: At5g07270.1

SEQ ID NO: 77636 - protein, 452 aa, Arabidopsis thaliana; identical to SEQ ID NO: 21330
  peptide (1)..(452): Ceres Seq. ID no. 12577052
  misc_feature (108)..(141): Pfam Name: Ankyrin repeat Pfam Description: Ankyrin repeat
  misc_feature (1)..(452): Homolog of NCBI NO: 30684032 NR Description: RING zinc finger ankyrin protein -related thaliana] >gi|14596109|gb|AAK68782.1| putative RING zinc finger protein [Arabidopsis thaliana] >gi|20148259|gb|AAM10020.1|
  misc_feature (27)..(452): Homolog of NCBI NO: 25408016 NR Description: probable RING zinc finger ankyrin protein - Arabidopsis thaliana >gi|3927831|gb|AAC79588.1| putative RING finger ankyrin protein [Arabidopsis thaliana]
  misc_feature (1)..(450): Homolog of NCBI NO: 14279688 NR Description: receptor-like kinase Xa21-binding protein 3
  misc_feature (1)..(385): Homolog of NCBI NO: 34906062 NR Description: putative receptor-like kinase Xa21-binding
  misc_feature (1)..(212): Homolog of NCBI NO: 16226319 NR Description: At2g28840/F8N16.13 [Arabidopsis thaliana]
  misc_feature (275)..(450): Homolog of NCBI NO: 25044835 NR Description: RING zinc finger protein [Ananas comosus]
  misc_feature (121)..(425): Homolog of NCBI NO: 37573164 NR Description: receptor-like kinase Xa21-binding protein 3-like
  misc_feature (1)..(130): Homolog of NCBI NO: 37573164 NR Description: receptor-like kinase Xa21-binding protein 3-like
  misc_feature (1)..(203): Homolog of NCBI NO: 15240746 NR Description: putative protein; protein id: At5g07270.1
  misc_feature (311)..(367): Homolog of NCBI NO: 15240746 NR Description: putative protein; protein id: At5g07270.1

SEQ ID NO: 77637 - protein, 426 aa, Arabidopsis thaliana; identical to SEQ ID NO: 21331
  peptide (1)..(426): Ceres Seq. ID no. 12577053
  misc_feature (82)..(115): Pfam Name: Ankyrin repeat Pfam Description: Ankyrin repeat
  misc_feature (1)..(426): Homolog of NCBI NO: 30684032 NR Description: RING zinc finger ankyrin protein -related thaliana] >gi|14596109|gb|AAK68782.1| putative RING zinc finger protein [Arabidopsis thaliana] >gi|20148259|gb|AAM10020.1|
  misc_feature (1)..(426): Homolog of NCBI NO: 25408016 NR Description: probable RING zinc finger ankyrin protein - Arabidopsis thaliana >gi|3927831|gb|AAC79588.1| putative RING finger ankyrin protein [Arabidopsis thaliana]
  misc_feature (1)..(424): Homolog of NCBI NO: 14279688 NR Description: receptor-like kinase Xa21-binding protein 3
  misc_feature (1)..(359): Homolog of NCBI NO: 34906062 NR Description: putative receptor-like kinase Xa21-binding
  misc_feature (1)..(186): Homolog of NCBI NO: 16226319 NR Description: At2g28840/F8N16.13 [Arabidopsis thaliana]
  misc_feature (249)..(424): Homolog of NCBI NO: 25044835 NR Description: RING zinc finger protein [Ananas comosus]
  misc_feature (95)..(399): Homolog of NCBI NO: 37573164 NR Description: receptor-like kinase Xa21-binding protein 3-like
  misc_feature (1)..(104): Homolog of NCBI NO: 37573164 NR Description: receptor-like kinase Xa21-binding protein 3-like
  misc_feature (1)..(177): Homolog of NCBI NO: 15240746 NR Description: putative protein; protein id: At5g07270.1
  misc_feature (285)..(341): Homolog of NCBI NO: 15240746 NR Description: putative protein; protein id: At5g07270.1

SEQ ID NO: 77638 - DNA, 727 bp, Arabidopsis thaliana
  misc_feature (1)..(727): Ceres Seq. ID no. 12577054
  misc_feature: MA Experiment ID: 108434 Result: Up-regulated in Transcription
  misc_feature: MA Experiment 108434 PARAMETER Experiment Name: At_Root_Tips_cDNA_P Parameter: Tissue Value: Root Tips
  misc_feature: MA Experiment ID: 108462 Result: Down-regulated in Transcription
  misc_feature: MA Experiment 108462 PARAMETER Experiment Name: At_Germinating_Seeds_cDNA_P Parameter: Age (day) Value: 2 vs. 0
  misc_feature: MA Experiment 108462 PARAMETER Experiment Name: At_Germinating_Seeds_cDNA_P Parameter: Tissue Value: Germinating Seeds
  misc_feature: MA Experiment ID: 108463 Result: Down-regulated in Transcription
  misc_feature: MA Experiment 108463 PARAMETER Experiment Name: At_Germinating_Seeds_cDNA_P Parameter: Age (day) Value: 3 vs. 0
  misc_feature: MA Experiment 108463 PARAMETER Experiment Name: At_Germinating_Seeds_cDNA_P Parameter: Tissue Value: Germinating Seeds
  misc_feature: MA Experiment ID: 108464 Result: Down-regulated in Transcription
  misc_feature: MA Experiment 108464 PARAMETER Experiment Name: At_Germinating_Seeds_cDNA_P Parameter: Age (day) Value: 4 vs. 0
  misc_feature: MA Experiment 108464 PARAMETER Experiment Name: At_Germinating_Seeds_cDNA_P Parameter: Tissue Value: Germinating Seeds
  misc_feature: MA Experiment ID: 108573 Result: Down-regulated in Transcription
  misc_feature: MA Experiment 108573 PARAMETER Experiment Name: At_Drought_cDNA_P Parameter: Timepoint (hr) Value: 6
  misc_feature: MA Experiment 108573 PARAMETER Experiment Name: At_Drought_cDNA_P Parameter: Tissue Value: Aerial
  misc_feature: MA Experiment 108573 PARAMETER Experiment Name: At_Drought_cDNA_P Parameter: Treatment Value: Drought vs. No Drought
  misc_feature: MA Experiment ID: 20000227 Result: Up-regulated in Transcription
  misc_feature: MA Experiment 20000227 PARAMETER Experiment Name: At_Root-Tips-vs-Tops_P Parameter: Tissue Value: Root Tips vs. Root Tops
  misc_feature: MA Experiment ID: 20000234 Result: Up-regulated in Transcription
  misc_feature: MA Experiment 20000234 PARAMETER Experiment Name: At_Siliques_P Parameter: Age (day) Value: 21
  misc_feature: MA Experiment 20000234 PARAMETER Experiment Name: At_Siliques_P Parameter: Organism Value: A. thaliana
  misc_feature: MA Experiment 20000234 PARAMETER Experiment Name: At_Siliques_P Parameter: Plant Line Value: WS
  misc_feature: MA Experiment 20000234 PARAMETER Experiment Name: At_Siliques_P Parameter: Tissue Value: Less Than 5mm Siliques vs. Whole Plant
  misc_feature: MA Experiment ID: 20000264 Result: Up-regulated in Transcription
  misc_feature: MA Experiment 20000264 PARAMETER Experiment Name: At_Open_Flower_P Parameter: Age (day) Value: 21
  misc_feature: MA Experiment 20000264 PARAMETER Experiment Name: At_Open_Flower_P Parameter: Plant Line Value: WS
  misc_feature: MA Experiment 20000264 PARAMETER Experiment Name: At_Open_Flower_P Parameter: Tissue Value: Open Flower vs. Whole Plant
  misc_feature: MA Experiment ID: 20001451 Result: Up-regulated in Transcription
  misc_feature: MA Experiment 20001451 PARAMETER Experiment Name: At_Far-red-induction_P Parameter: Age (day) Value: 7
  misc_feature: MA Experiment 20001451 PARAMETER Experiment Name: At_Far-red-induction_P Parameter: Light Value: Far-red vs. White
  misc_feature: MA Experiment 20001451 PARAMETER Experiment Name: At_Far-red-induction_P Parameter: Organism Value: A. thaliana
  misc_feature: MA Experiment 20001451 PARAMETER Experiment Name: At_Far-red-induction_P Parameter: Plant Line Value: Columbia
  misc_feature: MA Experiment 20001451 PARAMETER Experiment Name: At_Far-red-induction_P Parameter: Timepoint (hr) Value: 24
  misc_feature: MA Experiment 20001451 PARAMETER Experiment Name: At_Far-red-induction_P Parameter: Tissue Value: Whole Plant
  misc_feature: MA Experiment ID: 20001558 Result: Up-regulated in Transcription
  misc_feature: MA Experiment 20001558 PARAMETER Experiment Name: At_Drought_Soil_Dry_P Parameter: Age (day) Value: 27
  misc_feature: MA Experiment 20001558 PARAMETER Experiment Name: At_Drought_Soil_Dry_P Parameter: Organism Value: A. thaliana
  misc_feature: MA Experiment 20001558 PARAMETER Experiment Name: At_Drought_Soil_Dry_P Parameter: Plant Line Value: WS
  misc_feature: MA Experiment 20001558 PARAMETER Experiment Name: At_Drought_Soil_Dry_P Parameter: Post Timepoint (hr) Value: 6
  misc_feature: MA Experiment 20001558 PARAMETER Experiment Name: At_Drought_Soil_Dry_P Parameter: Post-Treatment Value: Re-Water vs. No Drought
  misc_feature: MA Experiment 20001558 PARAMETER Experiment Name: At_Drought_Soil_Dry_P Parameter: Timepoint (day) Value: 13
  misc_feature: MA Experiment 20001558 PARAMETER Experiment Name: At_Drought_Soil_Dry_P Parameter: Treatment Value: Drought vs. No Drought
  misc_feature: MA Experiment ID: 20001560 Result: Up-regulated in Transcription
  misc_feature: MA Experiment 20001560 PARAMETER Experiment Name: At_Drought_Soil_Dry_P Parameter: Age (day) Value: 28
  misc_feature: MA Experiment 20001560 PARAMETER Experiment Name: At_Drought_Soil_Dry_P Parameter: Organism Value: A. thaliana
  misc_feature: MA Experiment 20001560 PARAMETER Experiment Name: At_Drought_Soil_Dry_P Parameter: Plant Line Value: WS
  misc_feature: MA Experiment 20001560 PARAMETER Experiment Name: At_Drought_Soil_Dry_P Parameter: Post Timepoint (hr) Value: None
  misc_feature: MA Experiment 20001560 PARAMETER Experiment Name: At_Drought_Soil_Dry_P Parameter: Post-Treatment Value: None
  misc_feature: MA Experiment 20001560 PARAMETER Experiment Name: At_Drought_Soil_Dry_P Parameter: Timepoint (day) Value: 14
  misc_feature: MA Experiment 20001560 PARAMETER Experiment Name: At_Drought_Soil_Dry_P Parameter: Treatment Value: Drought vs. No Drought
  misc_feature: MA Experiment ID: 20001757 Result: Up-regulated in Transcription
  misc_feature: MA Experiment 20001757 PARAMETER Experiment Name: At_50mM_NH4NO3_L-to-H_P Parameter: Timepoint (hr) Value: 6
  misc_feature: MA Experiment 20001757 PARAMETER Experiment Name: At_50mM_NH4NO3_L-to-H_P Parameter: Tissue Value: Leaf
  misc_feature: MA Experiment 20001757 PARAMETER Experiment Name: At_50mM_NH4NO3_L-to-H_P Parameter: Treatment Value: 50mM NH4NO3 vs 100mM Mannitol
gcgtctctcctctctctgtttcttttctttttgtttcattttcttatctcctcacactcttcgaacaaggaagaaccctaatctcaagatgaatagggagaagttgatgaagatggctaataccgtccgcactggcggaaagggtactgtcagaagaaagaagaaggctgtgcacaagaccaatacaactgatgacaagaggcttcaaagcactcttaagagaattggagttaactccattcccgctattgaagaagttaacatctttaaggatgatgttgttattcagttcatcaaccctaaggttcaagcttcaattgctgcaaacacatgggttgttagcggttctcctcagaccaaaaaattgcaagatatccttcctcagatcatcagccaacttggaccagacaacatggacaacctgaagaagctagcagaacagttccagaaacaggcttctggtgaaggtaatgccgcctcagcaaccatacaagaagaggatgatgacgatgtcccagagcttgttggagagacattcgaaactgctgctgaagagaaagcaccagctgctgctgcttcttcttagagagaaaagagcgagaccacatccaaaaaaaaaccgcactttgatttttacatatctttataatatgtttgttcgctcgatcctttttgtagtttccgaccagaatcttgttttccatctaatgacttaaggtttttatcc

SEQ ID NO: 77639 - protein, 194 aa, Arabidopsis thaliana
  peptide (1)..(194): Ceres Seq. ID no. 12577055
  misc_feature (63)..(121): Pfam Name: NAC domain Pfam Description: NAC domain
  misc_feature (30)..(194): Homolog of NCBI NO: 15220876 NR Description: transcription factor, putative; protein id: supported by cDNA: 1105., supported by cDNA: gi_12083221, by cDNA: gi_15027872, supported by cDNA: gi_16323126, supported
  misc_feature (30)..(194): Homolog of NCBI NO: 16323127 NR Description: At1g17880/F2H15_10 [Arabidopsis thaliana]
  misc_feature (30)..(193): Homolog of NCBI NO: 15219413 NR Description: putative transcription factor BTF3 (RNA B transcription factor 3); protein id: At1g73230.1, supported by
  misc_feature (30)..(193): Homolog of NCBI NO: 21537065 NR Description: putative transcription factor BTF3 (RNA
  misc_feature (30)..(191): Homolog of NCBI NO: 33945882 NR Description: transcription factor homolog BTF3-like protein
  misc_feature (30)..(186): Homolog of NCBI NO: 37535464 NR Description: putative transcription factor [Oryza sativa
  misc_feature (30)..(194): Homolog of NCBI NO: 24431603 NR Description: Putative transcription factor [Oryza sativa
  misc_feature (30)..(194): Homolog of NCBI NO: 29367567 NR Description: putative transcription factor BTF3 [Oryza sativa
  misc_feature (30)..(185): Homolog of NCBI NO: 27573340 NR Description: putative transcription factor [Oryza sativa
  misc_feature (38)..(191): Homolog of NCBI NO: 25956272 NR Description: unnamed protein product [Lotus japonicus]
RLSSLCFFSFCFIFLSPHTLRTRKNPNLKMNREKLMKMANTVRTGGKGTVRRKKKAVHKTNTTDDKRLQSTLKRIGVNSIPAIEEVNIFKDDVVIQFINPKVQASIAANTWVVSGSPQTKKLQDILPQIISQLGPDNMDNLKKLAEQFQKQASGEGNAASATIQEEDDDDVPELVGETFETAAEEKAPAAAASS

SEQ ID NO: 77640 - protein, 165 aa, Arabidopsis thaliana; identical to SEQ ID NO: 25920
  peptide (1)..(165): Ceres Seq. ID no. 12577056
  misc_feature (34)..(92): Pfam Name: NAC domain Pfam Description: NAC domain
  misc_feature (1)..(165): Homolog of NCBI NO: 15220876 NR Description: transcription factor, putative; protein id: supported by cDNA: 1105., supported by cDNA: gi_12083221, by cDNA: gi_15027872, supported by cDNA: gi_16323126, supported
  misc_feature (1)..(165): Homolog of NCBI NO: 16323127 NR Description: At1g17880/F2H15_10 [Arabidopsis thaliana]
  misc_feature (1)..(164): Homolog of NCBI NO: 15219413 NR Description: putative transcription factor BTF3 (RNA B transcription factor 3); protein id: At1g73230.1, supported by
  misc_feature (1)..(164): Homolog of NCBI NO: 21537065 NR Description: putative transcription factor BTF3 (RNA
  misc_feature (1)..(162): Homolog of NCBI NO: 33945882 NR Description: transcription factor homolog BTF3-like protein
  misc_feature (1)..(157): Homolog of NCBI NO: 37535464 NR Description: putative transcription factor [Oryza sativa
  misc_feature (1)..(165): Homolog of NCBI NO: 24431603 NR Description: Putative transcription factor [Oryza sativa
  misc_feature (1)..(165): Homolog of NCBI NO: 29367567 NR Description: putative transcription factor BTF3 [Oryza sativa
  misc_feature (1)..(156): Homolog of NCBI NO: 27573340 NR Description: putative transcription factor [Oryza sativa
  misc_feature (9)..(162): Homolog of NCBI NO: 25956272 NR Description: unnamed protein product [Lotus japonicus]

SEQ ID NO: 77641 - protein, 159 aa, Arabidopsis thaliana; identical to SEQ ID NO: 25921
  peptide (1)..(159): Ceres Seq. ID no. 12577057
  misc_feature (28)..(86): Pfam Name: NAC domain Pfam Description: NAC domain
  misc_feature (1)..(159): Homolog of NCBI NO: 15220876 NR Description: transcription factor, putative; protein id: supported by cDNA: 1105., supported by cDNA: gi_12083221, by cDNA: gi_15027872, supported by cDNA: gi_16323126, supported
  misc_feature (1)..(159): Homolog of NCBI NO: 16323127 NR Description: At1g17880/F2H15_10 [Arabidopsis thaliana]
  misc_feature (1)..(158): Homolog of NCBI NO: 15219413 NR Description: putative transcription factor BTF3 (RNA B transcription factor 3); protein id: At1g73230.1, supported by
  misc_feature (1)..(158): Homolog of NCBI NO: 21537065 NR Description: putative transcription factor BTF3 (RNA
  misc_feature (1)..(156): Homolog of NCBI NO: 33945882 NR Description: transcription factor homolog BTF3-like protein
  misc_feature (1)..(151): Homolog of NCBI NO: 37535464 NR Description: putative transcription factor [Oryza sativa
  misc_feature (1)..(159): Homolog of NCBI NO: 24431603 NR Description: Putative transcription factor [Oryza sativa
  misc_feature (1)..(159): Homolog of NCBI NO: 29367567 NR Description: putative transcription factor BTF3 [Oryza sativa
  misc_feature (1)..(150): Homolog of NCBI NO: 27573340 NR Description: putative transcription factor [Oryza sativa
  misc_feature (3)..(156): Homolog of NCBI NO: 25956272 NR Description: unnamed protein product [Lotus japonicus]

SEQ ID NO: 77642 - DNA, 1831 bp, Arabidopsis thaliana
  misc_feature (1)..(1831): Ceres Seq. ID no. 12577062
  misc_feature: MA Experiment ID: 20000307 Result: Up-regulated in Transcription
  misc_feature: MA Experiment 20000307 PARAMETER Experiment Name: At_Germinating_Seeds_Sub_P Parameter: Age (hr) Value: 24 vs. 0
  misc_feature: MA Experiment 20000307 PARAMETER Experiment Name: At_Germinating_Seeds_Sub_P Parameter: Organism Value: A. thaliana
  misc_feature: MA Experiment 20000307 PARAMETER Experiment Name: At_Germinating_Seeds_Sub_P Parameter: Plant Line Value: WS
  misc_feature: MA Experiment 20000307 PARAMETER Experiment Name: At_Germinating_Seeds_Sub_P Parameter: Tissue Value: Germinating Seeds
atcttcgttttgaatttgttgttaggttttatgctctgaggatctaaaatgggtgctgctgaaaacaaccttgaaatggagggtaccctggagatcggcatggagtatagaactgtttctggtgttgcgggacctctcgtcatccttgaaaaagtcaaggggcctaaataccaagaaattgtcaatatccgtcttggggatggaactacccgacgtggtcaagttctcgaagttgatggagagaaagctgttgttcaggtatttgagggaacatctggaatcgacaacaagtacacaactgtgcaatttacaggagaggttttgaaaactcctgtttctttggatatgcttggtcgcatcttcaatggttcagggaagcccattgacaacggtccacctatattgcctgaggcgtacttggatatttctggaagttctatcaatcccagtgagagaacctatcctgaagagatgattcagacgggtatatccaccattgatgtcatgaactctatcgccagaggacagaagattcccctcttttctgccgcaggtcttccccacaatgaaattgctgctcagatttgccgtcaggctggtttggttaagcgtttagagaagtcagataatcttctcgagcatcaggaggatgataacttcgccattgtgttcgcagcaatgggtgtgaacatggagactgcacaattttttaaacgtgatttcgaggagaatggatcgatggagagagtgactcttttccttaacttggcaaacgaccccactattgagcgtatcatcactcctcgtatcgcacttacaactgctgagtacttggcatatgaatgtggcaagcatgtccttgtcattctcacagacatgagttcctacgccgatgctcttcgtgaggtctctgctgcccgtgaagaagtgcctggaaggcgtggttacccaggttacatgtacaccgacttggctaccatatacgagagagcagggcgaattgaagggaggaaaggttccatcactcaaattcccattttaaccatgccaaacgatgatatcacgcatcccacaccagatctgacaggatacattacagaggggcaaatctatattgaccgacaacttcacaatagacagatctaccctccgatcaatgtcttgccatctctgtctcgtctcatgaagagtgccattggtgagggtatgactcgcagggaccactctgatgtttctaatcaattgtatgccaattacgctattggaaaggacgtgcaggccatgaaagccgtggttggagaagaagctctttcttccgaggatctgctatatcttgagttcttggataagttcgagaggaagtttgtggctcagggagcttatgatacccgaaacatcttccagtcactcgacctggcatggactctcctcagaatcttcccccgtgagttacttcaccgtatacccgcgaaaacccttgatcagttttacagtcgcgataccaccaactgaagaacatagtttctactgccttggtgtgatgatatgtccaaatgcatctttattttttacttctgcggttggatcacacctctgagtcgtccgtcccaataaatggtgtttgttcccaatcgctagaccctttattattgtcttcgaaactgagcaagccaggttgattattctttttgtaagagaaattgaaattcttgtataatttatgagattttgcatcttttttttggggtaccaaattactggttcagaacaacatacatttgtttgtcttattactgtcacgaatgtcaatgcagcttcttcttcttttttt

SEQ ID NO: 77643 - protein, 487 aa, Arabidopsis thaliana; identical to SEQ ID NO: 46610
  peptide (1)..(487): Ceres Seq. ID no. 12577063
  misc_feature (203)..(382): Pfam Name: ATP synthase alpha/beta family, Pfam Description: ATP synthase alpha/beta family,
  misc_feature (1)..(487): Homolog of NCBI NO: 15233891 NR Description: probable H+-transporting ATPase; protein id: supported by cDNA: gi_14517367, supported by cDNA: gi_15010615,
  misc_feature (1)..(487): Homolog of NCBI NO: 26986106 NR Description: vacuolar ATPase subunit B [Mesembryanthemum
  misc_feature (1)..(487): Homolog of NCBI NO: 2493129 NR Description: Vacuolar ATP synthase subunit B isoform 1 B subunit 1) (Vacuolar proton pump B subunit 1)
  misc_feature (1)..(487): Homolog of NCBI NO: 11266665 NR Description: H+-transporting two-sector ATPase (EC 3.6.3.14)
  misc_feature (9)..(487): Homolog of NCBI NO: 2493132 NR Description: Vacuolar ATP synthase subunit B isoform 2 B subunit 2) (Vacuolar proton pump B subunit 2)
  misc_feature (1)..(487): Homolog of NCBI NO: 81637 NR Description: H+-exporting ATPase (EC 3.6.3.6) 57K chain -
  misc_feature (1)..(487): Homolog of NCBI NO: 15222929 NR Description: vacuolar ATP synthase subunit B; protein id: supported by cDNA: gi_166626, supported by cDNA: gi_20453109 thaliana] >gi|27735259|sp|P11574|VATB_ARATH Vacuolar
  misc_feature (5)..(487): Homolog of NCBI NO: 17065080 NR Description: Unknown protein [Arabidopsis thaliana]
  misc_feature (1)..(487): Homolog of NCBI NO: 2493131 NR Description: Vacuolar ATP synthase subunit B isoform 1 B subunit 1) (Vacuolar proton pump B subunit 1)
  misc_feature (1)..(487): Homolog of NCBI NO: 14150751 NR Description: vacuolar ATPase B subunit [Oryza sativa]

SEQ ID NO: 77644 - protein, 478 aa, Arabidopsis thaliana; identical to SEQ ID NO: 46611
  peptide (1)..(478): Ceres Seq. ID no. 12577064
  misc_feature (194)..(373): Pfam Name: ATP synthase alpha/beta family, Pfam Description: ATP synthase alpha/beta family,
  misc_feature (1)..(478): Homolog of NCBI NO: 15233891 NR Description: probable H+-transporting ATPase; protein id: supported by cDNA: gi_14517367, supported by cDNA: gi_15010615,
  misc_feature (1)..(478): Homolog of NCBI NO: 26986106 NR Description: vacuolar ATPase subunit B [Mesembryanthemum
  misc_feature (1)..(478): Homolog of NCBI NO: 2493129 NR Description: Vacuolar ATP synthase subunit B isoform 1 B subunit 1) (Vacuolar proton pump B subunit 1)
  misc_feature (1)..(478): Homolog of NCBI NO: 11266665 NR Description: H+-transporting two-sector ATPase (EC 3.6.3.14)
  misc_feature (1)..(478): Homolog of NCBI NO: 2493132 NR Description: Vacuolar ATP synthase subunit B isoform 2 B subunit 2) (Vacuolar proton pump B subunit 2)
  misc_feature (1)..(478): Homolog of NCBI NO: 81637 NR Description: H+-exporting ATPase (EC 3.6.3.6) 57K chain -
  misc_feature (1)..(478): Homolog of NCBI NO: 15222929 NR Description: vacuolar ATP synthase subunit B; protein id: supported by cDNA: gi_166626, supported by cDNA: gi_20453109 thaliana] >gi|27735259|sp|P11574|VATB_ARATH Vacuolar
  misc_feature (1)..(478): Homolog of NCBI NO: 17065080 NR Description: Unknown protein [Arabidopsis thaliana]
  misc_feature (1)..(478): Homolog of NCBI NO: 2493131 NR Description: Vacuolar ATP synthase subunit B isoform 1 B subunit 1) (Vacuolar proton pump B subunit 1)
  misc_feature (1)..(478): Homolog of NCBI NO: 14150751 NR Description: vacuolar ATPase B subunit [Oryza sativa]

SEQ ID NO: 77645 - protein, 470 aa, Arabidopsis thaliana; identical to SEQ ID NO: 46612
  peptide (1)..(470): Ceres Seq. ID no. 12577065
  misc_feature (186)..(365): Pfam Name: ATP synthase alpha/beta family, Pfam Description: ATP synthase alpha/beta family,
  misc_feature (1)..(470): Homolog of NCBI NO: 15233891 NR Description: probable H+-transporting ATPase; protein id: supported by cDNA: gi_14517367, supported by cDNA: gi_15010615,
  misc_feature (1)..(470): Homolog of NCBI NO: 26986106 NR Description: vacuolar ATPase subunit B [Mesembryanthemum
  misc_feature (1)..(470): Homolog of NCBI NO: 2493129 NR Description: Vacuolar ATP synthase subunit B isoform 1 B subunit 1) (Vacuolar proton pump B subunit 1)
  misc_feature (1)..(470): Homolog of NCBI NO: 11266665 NR Description: H+-transporting two-sector ATPase (EC 3.6.3.14)
  misc_feature (1)..(470): Homolog of NCBI NO: 2493132 NR Description: Vacuolar ATP synthase subunit B isoform 2 B subunit 2) (Vacuolar proton pump B subunit 2)
  misc_feature (1)..(470): Homolog of NCBI NO: 81637 NR Description: H+-exporting ATPase (EC 3.6.3.6) 57K chain -
  misc_feature (1)..(470): Homolog of NCBI NO: 15222929 NR Description: vacuolar ATP synthase subunit B; protein id: supported by cDNA: gi_166626, supported by cDNA: gi_20453109 thaliana] >gi|27735259|sp|P11574|VATB_ARATH Vacuolar
  misc_feature (1)..(470): Homolog of NCBI NO: 17065080 NR Description: Unknown protein [Arabidopsis thaliana]
  misc_feature (1)..(470): Homolog of NCBI NO: 2493131 NR Description: Vacuolar ATP synthase subunit B isoform 1 B subunit 1) (Vacuolar proton pump B subunit 1)
  misc_feature (1)..(470): Homolog of NCBI NO: 14150751 NR Description: vacuolar ATPase B subunit [Oryza sativa]

SEQ ID NO: 77646 - DNA, 1124 bp, Arabidopsis thaliana
  misc_feature (1)..(1124): Ceres Seq. ID no. 12577066
  misc_feature: MA Experiment ID: 108434 Result: Up-regulated in Transcription
  misc_feature: MA Experiment 108434 PARAMETER Experiment Name: At_Root_Tips_cDNA_P Parameter: Tissue Value: Root Tips
  misc_feature: MA Experiment ID: 108573 Result: Up-regulated in Transcription
  misc_feature: MA Experiment 108573 PARAMETER Experiment Name: At_Drought_cDNA_P Parameter: Timepoint (hr) Value: 6
  misc_feature: MA Experiment 108573 PARAMETER Experiment Name: At_Drought_cDNA_P Parameter: Tissue Value: Aerial
  misc_feature: MA Experiment 108573 PARAMETER Experiment Name: At_Drought_cDNA_P Parameter: Treatment Value: Drought vs. No Drought
  misc_feature: MA Experiment ID: 108577 Result: Down-regulated in Transcription
  misc_feature: MA Experiment 108577 PARAMETER Experiment Name: At_42deg_Heat_cDNA_P Parameter: Temperature (deg C) Value: 42 vs. 22
  misc_feature: MA Experiment 108577 PARAMETER Experiment Name: At_42deg_Heat_cDNA_P Parameter: Timepoint (hr) Value: 6
  misc_feature: MA Experiment 108577 PARAMETER Experiment Name: At_42deg_Heat_cDNA_P Parameter: Tissue Value: Aerial
  misc_feature: MA Experiment ID: 108579 Result: Down-regulated in Transcription
  misc_feature: MA Experiment 108579 PARAMETER Experiment Name: At_4deg_Cold_cDNA_P Parameter: Temperature (deg C) Value: 4 vs. 22
  misc_feature: MA Experiment 108579 PARAMETER Experiment Name: At_4deg_Cold_cDNA_P Parameter: Timepoint (hr) Value: 6
  misc_feature: MA Experiment 108579 PARAMETER Experiment Name: At_4deg_Cold_cDNA_P Parameter: Tissue Value: Aerial
  misc_feature: MA Experiment ID: 20001247 Result: Up-regulated in Transcription
  misc_feature: MA Experiment 20001247 PARAMETER Experiment Name: At_Far-red-induction_P Parameter: Age (day) Value: 7
  misc_feature: MA Experiment 20001247 PARAMETER Experiment Name: At_Far-red-induction_P Parameter: Light Value: Far-red vs. White
  misc_feature: MA Experiment 20001247 PARAMETER Experiment Name: At_Far-red-induction_P Parameter: Organism Value: A. thaliana
  misc_feature: MA Experiment 20001247 PARAMETER Experiment Name: At_Far-red-induction_P Parameter: Plant Line Value: Columbia
  misc_feature: MA Experiment 20001247 PARAMETER Experiment Name: At_Far-red-induction_P Parameter: Timepoint (hr) Value: 1
  misc_feature: MA Experiment 20001247 PARAMETER Experiment Name: At_Far-red-induction_P Parameter: Tissue Value: Whole Plant
  misc_feature: MA Experiment ID: 20001248 Result: Up-regulated in Transcription
  misc_feature: MA Experiment 20001248 PARAMETER Experiment Name: At_Far-red-induction_P Parameter: Age (day) Value: 7
  misc_feature: MA Experiment 20001248 PARAMETER Experiment Name: At_Far-red-induction_P Parameter: Light Value: Far-red vs. White
  misc_feature: MA Experiment 20001248 PARAMETER Experiment Name: At_Far-red-induction_P Parameter: Organism Value: A. thaliana
  misc_feature: MA Experiment 20001248 PARAMETER Experiment Name: At_Far-red-induction_P Parameter: Plant Line Value: Columbia
  misc_feature: MA Experiment 20001248 PARAMETER Experiment Name: At_Far-red-induction_P Parameter: Timepoint (hr) Value: 4
  misc_feature: MA Experiment 20001248 PARAMETER Experiment Name: At_Far-red-induction_P Parameter: Tissue Value: Whole Plant
  misc_feature: MA Experiment ID: 20001450 Result: Up-regulated in Transcription
  misc_feature: MA Experiment 20001450 PARAMETER Experiment Name: At_Far-red-induction_P Parameter: Age (day) Value: 7
  misc_feature: MA Experiment 20001450 PARAMETER Experiment Name: At_Far-red-induction_P Parameter: Light Value: Far-red vs. White
  misc_feature: MA Experiment 20001450 PARAMETER Experiment Name: At_Far-red-induction_P Parameter: Organism Value: A. thaliana
  misc_feature: MA Experiment 20001450 PARAMETER Experiment Name: At_Far-red-induction_P Parameter: Plant Line Value: Columbia
  misc_feature: MA Experiment 20001450 PARAMETER Experiment Name: At_Far-red-induction_P Parameter: Timepoint (hr) Value: 8
  misc_feature: MA Experiment 20001450 PARAMETER Experiment Name: At_Far-red-induction_P Parameter: Tissue Value: Whole Plant
  misc_feature: MA Experiment ID: 20001451 Result: Up-regulated in Transcription
  misc_feature: MA Experiment 20001451 PARAMETER Experiment Name: At_Far-red-induction_P Parameter: Age (day) Value: 7
  misc_feature: MA Experiment 20001451 PARAMETER Experiment Name: At_Far-red-induction_P Parameter: Light Value: Far-red vs. White
  misc_feature: MA Experiment 20001451 PARAMETER Experiment Name: At_Far-red-induction_P Parameter: Organism Value: A. thaliana
  misc_feature: MA Experiment 20001451 PARAMETER Experiment Name: At_Far-red-induction_P Parameter: Plant Line Value: Columbia
  misc_feature: MA Experiment 20001451 PARAMETER Experiment Name: At_Far-red-induction_P Parameter: Timepoint (hr) Value: 24
  misc_feature: MA Experiment 20001451 PARAMETER Experiment Name: At_Far-red-induction_P Parameter: Tissue Value: Whole Plant
gttaaaataaaataaaataaaaataaaaggaagaagaagaagaagaaaggattcgtcttccttcttccacaccctttctgacacctcatctcccctcccaccttctccgtcccgttccgtttctccatcaggtaattattaatctcctcttaatcatccctctaatctctttcccgtttcttcatctcccgattctcaattccatctacacagatcctcgattccgatccaacagttcgaattcagtttccgattctgatctgatcgaaccaatactcactgagatttgatcggcgattatggagtctatatctccggtatcgaatcagcttcttcagccgacgacgacgagctctaattccgatcgctctcgtcgtaagcgtaagaagaaatcatcgccatcatcggttgagaaatctccatctccgtcaatatcgttggagaaatggagatcggagaagcagcaacagatctactcaacgaagctagttcatgctttaagagagctacgaatcagccaacaaccatcttcatcatcatcttcttcgattccacgtggaggtagagccgtacgtgaagtcgccgatagagctttagcagttgcggcgagaggtaaaacgttatggagtcgagcgatactttcaaaagctgtaaaactcaaattcaggaaacacaaacgccagagaatctctaatccgacgacgacgacgttaaccaccgggagtatcaggtcaaagaaacagagagcgacggttttgaggcttaaggctaaaggtttgccagctgtacagaggaaagtgaaagtactgagccggttagttcccggttgccgtaaacaatcattaccggtggttttagaagaaaccactgattatatagctgcgatggagatgcagattcgtactatgactgcgattctctccgccgttagttcttctcctccgccgccaacgccaggtcacgaagggggacaaacacacatgcttggttagttggccaaactgtccttttatttttttccaattttaaaaaccaaaaaaaaaactgtttttttttatcatattattattcttctcactgtattgtttgttgtttgaatattttactattcaactttatttacc

SEQ ID NO: 77647 - protein, 230 aa, Arabidopsis thaliana; identical to SEQ ID NO: 39916
  peptide (1)..(230): Ceres Seq. ID no. 12577067
  misc_feature (1)..(230): Homolog of NCBI NO: 18401374 NR Description: bHLH protein; protein id: At3g17100.1, supported cDNA: gi_15010765, supported by cDNA: gi_16323263 [Arabidopsis >gi|7670034|dbj|BAA94988.1|
  misc_feature (12)..(217): Homolog of NCBI NO: 21618012 NR Description: unknown [Arabidopsis thaliana]
  misc_feature (12)..(217): Homolog of NCBI NO: 18397627 NR Description: bHLH protein; protein id: At3g06590.1, supported cDNA: 9391., supported by cDNA: gi_19698882, supported by cDNA: [Arabidopsis thaliana] >gi|12322686|gb|AAG51338.1|AC020580_18
  misc_feature (18)..(218): Homolog of NCBI NO: 18390998 NR Description: bHLH protein; protein id: At1g09250.1, supported cDNA: 9228. [Arabidopsis thaliana] >gi|25402527|pir||D86225
  misc_feature (78)..(219): Homolog of NCBI NO: 34898122 NR Description: bHLH protein-like [Oryza sativa (japonica
  misc_feature (49)..(213): Homolog of NCBI NO: 34904544 NR Description: B1066G12.17 [Oryza sativa (japonica
  misc_feature (32)..(218): Homolog of NCBI NO: 18397368 NR Description: bHLH protein; protein id: At3g05800.1, supported cDNA: 21672. [Arabidopsis thaliana] hypothetical protein [Arabidopsis thaliana]
  misc_feature (88)..(217): Homolog of NCBI NO: 34912942 NR Description: OSJNBb0035I14.10 [Oryza sativa (japonica

SEQ ID NO: 77648 - DNA, 1216 bp, Arabidopsis thaliana
  misc_feature (1)..(1216): Ceres Seq. ID no. 12577078
  misc_feature: MA Experiment ID: 108461 Result: Down-regulated in Transcription
  misc_feature: MA Experiment 108461 PARAMETER Experiment Name: At_Germinating_Seeds_cDNA_P Parameter: Age (day) Value: 1 vs. 0
  misc_feature: MA Experiment 108461 PARAMETER Experiment Name: At_Germinating_Seeds_cDNA_P Parameter: Tissue Value: Germinating Seeds
  misc_feature: MA Experiment ID: 108462 Result: Down-regulated in Transcription
  misc_feature: MA Experiment 108462 PARAMETER Experiment Name: At_Germinating_Seeds_cDNA_P Parameter: Age (day) Value: 2 vs. 0
  misc_feature: MA Experiment 108462 PARAMETER Experiment Name: At_Germinating_Seeds_cDNA_P Parameter: Tissue Value: Germinating Seeds
  misc_feature: MA Experiment ID: 108463 Result: Down-regulated in Transcription
  misc_feature: MA Experiment 108463 PARAMETER Experiment Name: At_Germinating_Seeds_cDNA_P Parameter: Age (day) Value: 3 vs. 0
  misc_feature: MA Experiment 108463 PARAMETER Experiment Name: At_Germinating_Seeds_cDNA_P Parameter: Tissue Value: Germinating Seeds
  misc_feature: MA Experiment ID: 108464 Result: Down-regulated in Transcription
  misc_feature: MA Experiment 108464 PARAMETER Experiment Name: At_Germinating_Seeds_cDNA_P Parameter: Age (day) Value: 4 vs. 0
  misc_feature: MA Experiment 108464 PARAMETER Experiment Name: At_Germinating_Seeds_cDNA_P Parameter: Tissue Value: Germinating Seeds
  misc_feature: MA Experiment ID: 108576 Result: Up-regulated in Transcription
  misc_feature: MA Experiment 108576 PARAMETER Experiment Name: At_42deg_Heat_cDNA_P Parameter: Temperature (deg C) Value: 42 vs. 22
  misc_feature: MA Experiment 108576 PARAMETER Experiment Name: At_42deg_Heat_cDNA_P Parameter: Timepoint (hr) Value: 1
  misc_feature: MA Experiment 108576 PARAMETER Experiment Name: At_42deg_Heat_cDNA_P Parameter: Tissue Value: Aerial
  misc_feature: MA Experiment ID: 108577 Result: Up-regulated in Transcription
  misc_feature: MA Experiment 108577 PARAMETER Experiment Name: At_42deg_Heat_cDNA_P Parameter: Temperature (deg C) Value: 42 vs. 22
  misc_feature: MA Experiment 108577 PARAMETER Experiment Name: At_42deg_Heat_cDNA_P Parameter: Timepoint (hr) Value: 6
  misc_feature: MA Experiment 108577 PARAMETER Experiment Name: At_42deg_Heat_cDNA_P Parameter: Tissue Value: Aerial
  misc_feature: MA Experiment ID: 20000112 Result: Up-regulated in Transcription
  misc_feature: MA Experiment 20000112 PARAMETER Experiment Name: At_42deg_Heat_cDNA_P Parameter: Temperature (deg C) Value: 42 vs. 22
  misc_feature: MA Experiment 20000112 PARAMETER Experiment Name: At_42deg_Heat_cDNA_P Parameter: Timepoint (hr) Value: 2
  misc_feature: MA Experiment 20000112 PARAMETER Experiment Name: At_42deg_Heat_cDNA_P Parameter: Tissue Value: Aerial
ataacaaatgggagaagtttcagtggtggagaacaagaaagtgatactaaagaattatgtagatggtattcctacagaaacagacatggaagtgaaactcggagaaacaattgagctaaaagcaccaaaaggatcttcttgtttcctcgtcaaaaatctatacttgtcttgtgatccttacatgagaggtcgtatgcgtgattttcacggttcctatctcccgccttttgttcctggccaacgtatcgaagggtttggtttagcaagagtgatagattctgatgatactaattataagcccggcgatatagtctctggtatcattggttgggaagaatacagtttgctacgtagttcagataacctacagttgagaaatattcagttagacgacgacattccgctttcttatcatctcggacttctcgggatggctggatttacagcatatgcagggtttaatgagatatgttgtcctaagaaaggggacagtgtttttgtctctgcagcatgtggagcagttggacaacttgttggtcagctagctaagttgcacggctgctatgttgttggtagcgccggtagtaagcaaaaggttgagatccttaaaaacgagcttggatatgatgaagcctttaactacaaggaagaggctgatcttgatactgctttgaagaggtacttcccggaggggatagatatctacttcgataacgtgggtggatccatgcttgatgcagcgctcctcaacatgaaggtacgtggaagaatcgcgctctgtggaatggtgtctttgcaaagcctctcaacttcatcacaaggaatcaagaacctatacagcgctatctacaaacgtttaaggttagaagggttcttgcagagcgattaccttcatatcttcccacagtttcttgaaaatgtcaagagatattacaaagaaggcaagattgtctacgtcgaagatatatctgaaggcctcgacctcgctcccgctgcacttgttgggctgttttccgggaaaaatatcggtaaacaggttgttcgggttgctaaagagtgattgtttctgaaagtatattgcaagtgatttaagaacatacattggatgaaataaagccacgttatgtataacatcttcttgtcgaagtcaatgtatgtataagtctcttatggaaaaacgttagttaagcaacaatgttttaaaagtcttcataac

SEQ ID NO: 77649 - protein, 350 aa, Arabidopsis thaliana
  peptide (1)..(350): Ceres Seq. ID no. 12577079
  misc_feature (81)..(347): Pfam Name: Zinc-binding dehydrogenase Pfam Description: Zinc-binding dehydrogenase
  misc_feature (1)..(350): Homolog of NCBI NO: 15218717 NR Description: allyl alcohol dehydrogenase, putative; protein At1g65560.1, supported by cDNA: gi_14335113 [Arabidopsis
  misc_feature (78)..(350): Homolog of NCBI NO: 25404554 NR Description: hypothetical protein F5I14.9 [imported] -
  misc_feature (1)..(79): Homolog of NCBI NO: 25404554 NR Description: hypothetical protein F5I14.9 [imported] -
  misc_feature (1)..(350): Homolog of NCBI NO: 34907532 NR Description: putative allyl alcohol dehydrogenase [Oryza
  misc_feature (7)..(350): Homolog of NCBI NO: 6692816 NR Description: allyl alcohol dehydrogenase [Nicotiana tabacum]
  misc_feature (142)..(350): Homolog of NCBI NO: 14335114 NR Description: At1g65560/F5I14_32 [Arabidopsis thaliana]
  misc_feature (9)..(350): Homolog of NCBI NO: 38345384 NR Description: OSJNBa0067K08.13 [Oryza sativa (japonica
  misc_feature (5)..(350): Homolog of NCBI NO: 15228456 NR Description: putative NADP-dependent oxidoreductase; protein At3g03080.1 [Arabidopsis thaliana]
  misc_feature (9)..(350): Homolog of NCBI NO: 15237888 NR Description: quinone oxidoreductase -like protein; protein id:
  misc_feature (9)..(350): Homolog of NCBI NO: 15237890 NR Description: quinone oxidoreductase - like protein; protein At5g16990.1, supported by cDNA: gi_17529037, supported by cDNA:
MGEVSVVENKKVILKNYVDGIPTETDMEVKLGETIELKAPKGSSCFLVKNLYLSCDPYMRGRMRDFHGSYLPPFVPGQRIEGFGLARVIDSDDTNYKPGDIVSGIIGWEEYSLLRSSDNLQLRNIQLDDDIPLSYHLGLLGMAGFTAYAGFNEICCPKKGDSVFVSAACGAVGQLVGQLAKLHGCYVVGSAGSKQKVEILKNELGYDEAFNYKEEADLDTALKRYFPEGIDIYFDNVGGSMLDAALLNMKVRGRIALCGMVSLQSLSTSSQGIKNLYSAIYKRLRLEGFLQSDYLHIFPQFLENVKRYYKEGKIVYVEDISEGLDLAPAALVGLFSGKNIGKQVVRVAKE

SEQ ID NO: 77650 - protein, 324 aa, Arabidopsis thaliana
  peptide (1)..(324): Ceres Seq. ID no. 12577080
  misc_feature (55)..(321): Pfam Name: Zinc-binding dehydrogenase Pfam Description: Zinc-binding dehydrogenase
  misc_feature (1)..(324): Homolog of NCBI NO: 15218717 NR Description: allyl alcohol dehydrogenase, putative; protein At1g65560.1, supported by cDNA: gi_14335113 [Arabidopsis
  misc_feature (52)..(324): Homolog of NCBI NO: 25404554 NR Description: hypothetical protein F5I14.9 [imported] -
  misc_feature (1)..(53): Homolog of NCBI NO: 25404554 NR Description: hypothetical protein F5I14.9 [imported] -
  misc_feature (1)..(324): Homolog of NCBI NO: 34907532 NR Description: putative allyl alcohol dehydrogenase [Oryza
  misc_feature (1)..(324): Homolog of NCBI NO: 6692816 NR Description: allyl alcohol dehydrogenase [Nicotiana tabacum]
  misc_feature (116)..(324): Homolog of NCBI NO: 14335114 NR Description: At1g65560/F5I14_32 [Arabidopsis thaliana]
  misc_feature (1)..(324): Homolog of NCBI NO: 38345384 NR Description: OSJNBa0067K08.13 [Oryza sativa (japonica
  misc_feature (1)..(324): Homolog of NCBI NO: 15228456 NR Description: putative NADP-dependent oxidoreductase; protein At3g03080.1 [Arabidopsis thaliana]
  misc_feature (1)..(324): Homolog of NCBI NO: 15237888 NR Description: quinone oxidoreductase -like protein; protein id:
  misc_feature (1)..(324): Homolog of NCBI NO: 15237890 NR Description: quinone oxidoreductase - like protein; protein At5g16990.1, supported by cDNA: gi_17529037, supported by cDNA:
MEVKLGETIELKAPKGSSCFLVKNLYLSCDPYMRGRMRDFHGSYLPPFVPGQRIEGFGLARVIDSDDTNYKPGDIVSGIIGWEEYSLLRSSDNLQLRNIQLDDDIPLSYHLGLLGMAGFTAYAGFNEICCPKKGDSVFVSAACGAVGQLVGQLAKLHGCYVVGSAGSKQKVEILKNELGYDEAFNYKEEADLDTALKRYFPEGIDIYFDNVGGSMLDAALLNMKVRGRIALCGMVSLQSLSTSSQGIKNLYSAIYKRLRLEGFLQSDYLHIFPQFLENVKRYYKEGKIVYVEDISEGLDLAPAALVGLFSGKNIGKQVVRVAKE

SEQ ID NO: 77651 - protein, 292 aa, Arabidopsis thaliana
  peptide (1)..(292): Ceres Seq. ID no. 12577081
  misc_feature (23)..(289): Pfam Name: Zinc-binding dehydrogenase Pfam Description: Zinc-binding dehydrogenase
  misc_feature (1)..(292): Homolog of NCBI NO: 15218717 NR Description: allyl alcohol dehydrogenase, putative; protein At1g65560.1, supported by cDNA: gi_14335113 [Arabidopsis
  misc_feature (20)..(292): Homolog of NCBI NO: 25404554 NR Description: hypothetical protein F5I14.9 [imported] -
  misc_feature (1)..(21): Homolog of NCBI NO: 25404554 NR Description: hypothetical protein F5I14.9 [imported] -
  misc_feature (1)..(292): Homolog of NCBI NO: 34907532 NR Description: putative allyl alcohol dehydrogenase [Oryza
  misc_feature (1)..(292): Homolog of NCBI NO: 6692816 NR Description: allyl alcohol dehydrogenase [Nicotiana tabacum]
  misc_feature (84)..(292): Homolog of NCBI NO: 14335114 NR Description: At1g65560/F5I14_32 [Arabidopsis thaliana]
  misc_feature (1)..(292): Homolog of NCBI NO: 38345384 NR Description: OSJNBa0067K08.13 [Oryza sativa (japonica
  misc_feature (1)..(292): Homolog of NCBI NO: 15228456 NR Description: putative NADP-dependent oxidoreductase; protein At3g03080.1 [Arabidopsis thaliana]
  misc_feature (1)..(292): Homolog of NCBI NO: 15237888 NR Description: quinone oxidoreductase -like protein; protein id:
  misc_feature (1)..(292): Homolog of NCBI NO: 15237890 NR Description: quinone oxidoreductase - like protein; protein At5g16990.1, supported by cDNA: gi_17529037, supported by cDNA:
MRGRMRDFHGSYLPPFVPGQRIEGFGLARVIDSDDTNYKPGDIVSGIIGWEEYSLLRSSDNLQLRNIQLDDDIPLSYHLGLLGMAGFTAYAGFNEICCPKKGDSVFVSAACGAVGQLVGQLAKLHGCYVVGSAGSKQKVEILKNELGYDEAFNYKEEADLDTALKRYFPEGIDIYFDNVGGSMLDAALLNMKVRGRIALCGMVSLQSLSTSSQGIKNLYSAIYKRLRLEGFLQSDYLHIFPQFLENVKRYYKEGKIVYVEDISEGLDLAPAALVGLFSGKNIGKQVVRVAKE

SEQ ID NO: 77652 - DNA, 1006 bp, Arabidopsis thaliana
  misc_feature (1)..(1006): Ceres Seq. ID no. 12577082
  misc_feature: MA Experiment ID: 108435 Result: Down-regulated in Transcription
  misc_feature: MA Experiment 108435 PARAMETER Experiment Name: At_stm_Mutants_cDNA_P Parameter: Plant Line Value: wt Landsburg vs stm
  misc_feature: MA Experiment 108435 PARAMETER Experiment Name: At_stm_Mutants_cDNA_P Parameter: Tissue Value: Shoot Apical Meristem Region
  misc_feature: MA Experiment ID: 108461 Result: Up-regulated in Transcription
  misc_feature: MA Experiment 108461 PARAMETER Experiment Name: At_Germinating_Seeds_cDNA_P Parameter: Age (day) Value: 1 vs. 0
  misc_feature: MA Experiment 108461 PARAMETER Experiment Name: At_Germinating_Seeds_cDNA_P Parameter: Tissue Value: Germinating Seeds
  misc_feature: MA Experiment ID: 108462 Result: Up-regulated in Transcription
  misc_feature: MA Experiment 108462 PARAMETER Experiment Name: At_Germinating_Seeds_cDNA_P Parameter: Age (day) Value: 2 vs. 0
  misc_feature: MA Experiment 108462 PARAMETER Experiment Name: At_Germinating_Seeds_cDNA_P Parameter: Tissue Value: Germinating Seeds
  misc_feature: MA Experiment ID: 108464 Result: Up-regulated in Transcription
  misc_feature: MA Experiment 108464 PARAMETER Experiment Name: At_Germinating_Seeds_cDNA_P Parameter: Age (day) Value: 4 vs. 0
  misc_feature: MA Experiment 108464 PARAMETER Experiment Name: At_Germinating_Seeds_cDNA_P Parameter: Tissue Value: Germinating Seeds
  misc_feature: MA Experiment ID: 108595 Result: Down-regulated in Transcription
  misc_feature: MA Experiment 108595 PARAMETER Experiment Name: At_Ler-pi_Ovule_cDNA_P Parameter: Plant Line Value: null
  misc_feature: MA Experiment ID: 20000069 Result: Down-regulated in Transcription
  misc_feature: MA Experiment 20000069 PARAMETER Experiment Name: At_100uM_ABA_Mutants_cDNA_P Parameter: Plant Line Value: CS23
  misc_feature: MA Experiment 20000069 PARAMETER Experiment Name: At_100uM_ABA_Mutants_cDNA_P Parameter: Timepoint (hr) Value: 6
  misc_feature: MA Experiment 20000069 PARAMETER Experiment Name: At_100uM_ABA_Mutants_cDNA_P Parameter: Tissue Value: Aerial
  misc_feature: MA Experiment 20000069 PARAMETER Experiment Name: At_100uM_ABA_Mutants_cDNA_P Parameter: Treatment Value: 100uM ABA vs. No Treatment
  misc_feature: MA Experiment ID: 20000070 Result: Down-regulated in Transcription
  misc_feature: MA Experiment 20000070 PARAMETER Experiment Name: At_100uM_ABA_Mutants_cDNA_P Parameter: Plant Line Value: CS24
  misc_feature: MA Experiment 20000070 PARAMETER Experiment Name: At_100uM_ABA_Mutants_cDNA_P Parameter: Timepoint (hr) Value: 6
  misc_feature: MA Experiment 20000070 PARAMETER Experiment Name: At_100uM_ABA_Mutants_cDNA_P Parameter: Tissue Value: Aerial
  misc_feature: MA Experiment 20000070 PARAMETER Experiment Name: At_100uM_ABA_Mutants_cDNA_P Parameter: Treatment Value: 100uM ABA vs. No Treatment
  misc_feature: MA Experiment ID: 20000071 Result: Down-regulated in Transcription
  misc_feature: MA Experiment 20000071 PARAMETER Experiment Name: At_100uM_ABA_Mutants_cDNA_P Parameter: Plant Line Value: CS8104
  misc_feature: MA Experiment 20000071 PARAMETER Experiment Name: At_100uM_ABA_Mutants_cDNA_P Parameter: Timepoint (hr) Value: 6
  misc_feature: MA Experiment 20000071 PARAMETER Experiment Name: At_100uM_ABA_Mutants_cDNA_P Parameter: Tissue Value: Aerial
  misc_feature: MA Experiment 20000071 PARAMETER Experiment Name: At_100uM_ABA_Mutants_cDNA_P Parameter: Treatment Value: 100uM ABA vs. No Treatment
  misc_feature: MA Experiment ID: 20000086 Result: Down-regulated in Transcription
  misc_feature: MA Experiment 20000086 PARAMETER Experiment Name: At_100uM_ABA_Mutants_cDNA_P Parameter: Plant Line Value: CS22
  misc_feature: MA Experiment 20000086 PARAMETER Experiment Name: At_100uM_ABA_Mutants_cDNA_P Parameter: Timepoint (hr) Value: 6
  misc_feature: MA Experiment 20000086 PARAMETER Experiment Name: At_100uM_ABA_Mutants_cDNA_P Parameter: Tissue Value: Aerial
  misc_feature: MA Experiment 20000086 PARAMETER Experiment Name: At_100uM_ABA_Mutants_cDNA_P Parameter: Treatment Value: 100uM ABA vs. No Treatment
  misc_feature: MA Experiment ID: 20000087 Result: Down-regulated in Transcription
  misc_feature: MA Experiment 20000087 PARAMETER Experiment Name: At_100uM_ABA_Mutants_cDNA_P Parameter: Plant Line Value: WS
  misc_feature: MA Experiment 20000087 PARAMETER Experiment Name: At_100uM_ABA_Mutants_cDNA_P Parameter: Timepoint (hr) Value: 6
  misc_feature: MA Experiment 20000087 PARAMETER Experiment Name: At_100uM_ABA_Mutants_cDNA_P Parameter: Tissue Value: Aerial
  misc_feature: MA Experiment 20000087 PARAMETER Experiment Name: At_100uM_ABA_Mutants_cDNA_P Parameter: Treatment Value: 100uM ABA vs. No Treatment
  misc_feature: MA Experiment ID: 20000088 Result: Down-regulated in Transcription
  misc_feature: MA Experiment 20000088 PARAMETER Experiment Name: At_100uM_ABA_Mutants_cDNA_P Parameter: Plant Line Value: Landsberg
  misc_feature: MA Experiment 20000088 PARAMETER Experiment Name: At_100uM_ABA_Mutants_cDNA_P Parameter: Timepoint (hr) Value: 6
  misc_feature: MA Experiment 20000088 PARAMETER Experiment Name: At_100uM_ABA_Mutants_cDNA_P Parameter: Tissue Value: Aerial
  misc_feature: MA Experiment 20000088 PARAMETER Experiment Name: At_100uM_ABA_Mutants_cDNA_P Parameter: Treatment Value: 100uM ABA vs. No Treatment
aatctaatcactttctgcttcttcgcctacttcattcacatcttctttcctcttcctcctttgggttacttcttcgaatctcctgtaaatggagactggtgctggtataggtttgtaccctttgcatcgctgcaaaaccatttacctagtgagacatgctcaggggattcacaatgtggatggggagaagaattataaggcttacatgtctcatgactactttgatgctgagttgacccagcttggctggaaacaggtagatagtttgcgtaagcatgttcattccagtggacttcacaagaagatcgaactggtcatttcgtctccactgatgagaaccttgcaaactgctgttggtgtttttggtggagagggctacacggatatgagtgatgtactacctctaatggtagcaaatgcaggaaatagcagccgtgcagctatatcgagtttaaactgcccaccagttattacagaggagtcctgcagagagcatttgggagtgcatccatgtgatcagaggagaagtatcagcgactatcagtttcttttccctgcagttgacttttcactgatagaaagcgaggaagacaagttatggaaggctgatgttagagaaacgattgaagaacttgcagctagaggaaaaaagttcctgaactggctatggacacggaaagaaaaagagatagctattgtgacacacagtggtttcttgtttcacacattgaatgcactacaaaacgagtgtcatccagatgttaagaaggaaatttgcggccactttgctaattgtgagctacgttcaatggtcatcgtcgatagaagtatgttgggatcggacagttcggtgactgattatccaggaaagattccaaaggggattgatcttccaagtgatgctgttgtagatgataacaacatcaaagttgagtgattctttatgatggacactgcattgtcttcaacttttctatttatctatacacaaacaccttctttgctg

SEQ ID NO: 77653 - protein, 282 aa, Arabidopsis thaliana; identical to SEQ ID NO: 34767
  peptide (1)..(282): Ceres Seq. ID no. 12577083
  misc_feature (16)..(254): Pfam Name: Phosphoglycerate mutase family Pfam Description: Phosphoglycerate mutase family
  misc_feature (1)..(282): Homolog of NCBI NO: 15237708 NR Description: ZW10-like protein; protein id: At5g64460.1,

SEQ ID NO: 77654 - protein, 243 aa, Arabidopsis thaliana; identical to SEQ ID NO: 34768
  peptide (1)..(243): Ceres Seq. ID no. 12577084
  misc_feature (1)..(215): Pfam Name: Phosphoglycerate mutase family Pfam Description: Phosphoglycerate mutase family
  misc_feature (1)..(243): Homolog of NCBI NO: 15237708 NR Description: ZW10-like protein; protein id: At5g64460.1,

SEQ ID NO: 77655 - protein, 201 aa, Arabidopsis thaliana; identical to SEQ ID NO: 34769
  peptide (1)..(201): Ceres Seq. ID no. 12577085
  misc_feature (1)..(173): Pfam Name: Phosphoglycerate mutase family Pfam Description: Phosphoglycerate mutase family
  misc_feature (1)..(201): Homolog of NCBI NO: 15237708 NR Description: ZW10-like protein; protein id: At5g64460.1,

SEQ ID NO: 77656 - DNA, 2912 bp, Arabidopsis thaliana
  misc_feature (1)..(2912): Ceres Seq. ID no. 12577091
  misc_feature: MA Experiment ID: 108434 Result: Down-regulated in Transcription
  misc_feature: MA Experiment 108434 PARAMETER Experiment Name: At_Root_Tips_cDNA_P Parameter: Tissue Value: Root Tips
  misc_feature: MA Experiment ID: 108462 Result: Up-regulated in Transcription
  misc_feature: MA Experiment 108462 PARAMETER Experiment Name: At_Germinating_Seeds_cDNA_P Parameter: Age (day) Value: 2 vs. 0
  misc_feature: MA Experiment 108462 PARAMETER Experiment Name: At_Germinating_Seeds_cDNA_P Parameter: Tissue Value: Germinating Seeds
  misc_feature: MA Experiment ID: 108463 Result: Up-regulated in Transcription
  misc_feature: MA Experiment 108463 PARAMETER Experiment Name: At_Germinating_Seeds_cDNA_P Parameter: Age (day) Value: 3 vs. 0
  misc_feature: MA Experiment 108463 PARAMETER Experiment Name: At_Germinating_Seeds_cDNA_P Parameter: Tissue Value: Germinating Seeds
  misc_feature: MA Experiment ID: 108464 Result: Up-regulated in Transcription
  misc_feature: MA Experiment 108464 PARAMETER Experiment Name: At_Germinating_Seeds_cDNA_P Parameter: Age (day) Value: 4 vs. 0
  misc_feature: MA Experiment 108464 PARAMETER Experiment Name: At_Germinating_Seeds_cDNA_P Parameter: Tissue Value: Germinating Seeds
  misc_feature: MA Experiment ID: 108469 Result: Up-regulated in Transcription
  misc_feature: MA Experiment ID: 108585 Result: Up-regulated in Transcription
  misc_feature: MA Experiment 108585 PARAMETER Experiment Name: At_5mM_NaNP_cDNA_P Parameter: Timepoint (hr) Value: 6
  misc_feature: MA Experiment 108585 PARAMETER Experiment Name: At_5mM_NaNP_cDNA_P Parameter: Tissue Value: Aerial
  misc_feature: MA Experiment 108585 PARAMETER Experiment Name: At_5mM_NaNP_cDNA_P Parameter: Treatment Value: null
  misc_feature: MA Experiment ID: 108607 Result: Up-regulated in Transcription
  misc_feature: MA Experiment 108607 PARAMETER Experiment Name: At_100uM_ABA_cDNA_P Parameter: Timepoint (hr) Value: 4
  misc_feature: MA Experiment 108607 PARAMETER Experiment Name: At_100uM_ABA_cDNA_P Parameter: Tissue Value: Aerial
  misc_feature: MA Experiment 108607 PARAMETER Experiment Name: At_100uM_ABA_cDNA_P Parameter: Treatment Value: 100uM ABA vs. No Treatment
  misc_feature: MA Experiment ID: 108667 Result: Up-regulated in Transcription
  misc_feature: MA Experiment 108667 PARAMETER Experiment Name: At_2mM_SA_cDNA_P Parameter: Plant Line Value: WS
  misc_feature: MA Experiment 108667 PARAMETER Experiment Name: At_2mM_SA_cDNA_P Parameter: Timepoint (hr) Value: 1
  misc_feature: MA Experiment 108667 PARAMETER Experiment Name: At_2mM_SA_cDNA_P Parameter: Treatment Value: 2mM SA vs. No Treatment
  misc_feature: MA Experiment ID: 108668 Result: Up-regulated in Transcription
  misc_feature: MA Experiment 108668 PARAMETER Experiment Name: At_2mM_SA_cDNA_P Parameter: Plant Line Value: WS
  misc_feature: MA Experiment 108668 PARAMETER Experiment Name: At_2mM_SA_cDNA_P Parameter: Timepoint (hr) Value: 6
  misc_feature: MA Experiment 108668 PARAMETER Experiment Name: At_2mM_SA_cDNA_P Parameter: Treatment Value: 2mM SA vs. No Treatment
  misc_feature: MA Experiment ID: 20000087 Result: Down-regulated in Transcription
  misc_feature: MA Experiment 20000087 PARAMETER Experiment Name: At_100uM_ABA_Mutants_cDNA_P Parameter: Plant Line Value: WS
  misc_feature: MA Experiment 20000087 PARAMETER Experiment Name: At_100uM_ABA_Mutants_cDNA_P Parameter: Timepoint (hr) Value: 6
  misc_feature: MA Experiment 20000087 PARAMETER Experiment Name: At_100uM_ABA_Mutants_cDNA_P Parameter: Tissue Value: Aerial
  misc_feature: MA Experiment 20000087 PARAMETER Experiment Name: At_100uM_ABA_Mutants_cDNA_P Parameter: Treatment Value: 100uM ABA vs. No Treatment
  misc_feature: MA Experiment ID: 20000180 Result: Up-regulated in Transcription
  misc_feature: MA Experiment 20000180 PARAMETER Experiment Name: At_Germinating_Seeds_P Parameter: Age (hr) Value: 24 vs. 0
  misc_feature: MA Experiment 20000180 PARAMETER Experiment Name: At_Germinating_Seeds_P Parameter: Tissue Value: Germinating Seeds
  misc_feature: MA Experiment ID: 20000184 Result: Up-regulated in Transcription
  misc_feature: MA Experiment 20000184 PARAMETER Experiment Name: At_Shoots__P Parameter: Age (day) Value: 7
  misc_feature: MA Experiment 20000184 PARAMETER Experiment Name: At_Shoots__P Parameter: Tissue Value: Shoots vs. Whole Plant
  misc_feature: MA Experiment ID: 20000185 Result: Down-regulated in Transcription
  misc_feature: MA Experiment 20000185 PARAMETER Experiment Name: At_Roots__P Parameter: Age (day) Value: 7 vs. 21
  misc_feature: MA Experiment 20000185 PARAMETER Experiment Name: At_Roots__P Parameter: Organism Value: A. thaliana
  misc_feature: MA Experiment 20000185 PARAMETER Experiment Name: At_Roots__P Parameter: Tissue Value: Roots vs. Whole Plant
  misc_feature: MA Experiment ID: 20000214 Result: Up-regulated in Transcription
  misc_feature: MA Experiment 20000214 PARAMETER Experiment Name: At_4deg_Cold_P Parameter: Timepoint (hr) Value: 6
  misc_feature: MA Experiment ID: 20000227 Result: Down-regulated in Transcription
  misc_feature: MA Experiment 20000227 PARAMETER Experiment Name: At_Root-Tips-vs-Tops_P Parameter: Tissue Value: Root Tips vs. Root Tops
  misc_feature: MA Experiment ID: 20000438 Result: Up-regulated in Transcription
  misc_feature: MA Experiment 20000438 PARAMETER Experiment Name: At_Shoots__P Parameter: Age (day) Value: 14
  misc_feature: MA Experiment 20000438 PARAMETER Experiment Name: At_Shoots__P Parameter: Tissue Value: Shoots vs. Whole Plant
  misc_feature: MA Experiment ID: 20000439 Result: Down-regulated in Transcription
  misc_feature: MA Experiment 20000439 PARAMETER Experiment Name: At_Roots__P Parameter: Age (day) Value: 14 vs. 21
  misc_feature: MA Experiment 20000439 PARAMETER Experiment Name: At_Roots__P Parameter: Organism Value: A. thaliana
  misc_feature: MA Experiment 20000439 PARAMETER Experiment Name: At_Roots__P Parameter: Tissue Value: Roots vs. Whole Plant
  misc_feature: MA Experiment ID: 20000794 Result: Down-regulated in Transcription
  misc_feature: MA Experiment 20000794 PARAMETER Experiment Name: At_Petals_P Parameter: Age (day) Value: 23-25 days
  misc_feature: MA Experiment 20000794 PARAMETER Experiment Name: At_Petals_P Parameter: Plant Line Value: WS
  misc_feature: MA Experiment 20000794 PARAMETER Experiment Name: At_Petals_P Parameter: Tissue Value: Petals vs. Whole plant
  misc_feature: MA Experiment ID: 20001450 Result: Down-regulated in Transcription
  misc_feature: MA Experiment 20001450 PARAMETER Experiment Name: At_Far-red-induction_P Parameter: Age (day) Value: 7
  misc_feature: MA Experiment 20001450 PARAMETER Experiment Name: At_Far-red-induction_P Parameter: Light Value: Far-red vs. White
  misc_feature: MA Experiment 20001450 PARAMETER Experiment Name: At_Far-red-induction_P Parameter: Organism Value: A. thaliana
  misc_feature: MA Experiment 20001450 PARAMETER Experiment Name: At_Far-red-induction_P Parameter: Plant Line Value: Columbia
  misc_feature: MA Experiment 20001450 PARAMETER Experiment Name: At_Far-red-induction_P Parameter: Timepoint (hr) Value: 8
  misc_feature: MA Experiment 20001450 PARAMETER Experiment Name: At_Far-red-induction_P Parameter: Tissue Value: Whole Plant
  misc_feature: MA Experiment ID: 20001904 Result: Down-regulated in Transcription
  misc_feature: MA Experiment 20001904 PARAMETER Experiment Name: At_Drought_Reproduction_P Parameter: Age (day) Value: 37
  misc_feature: MA Experiment 20001904 PARAMETER Experiment Name: At_Drought_Reproduction_P Parameter: Organism Value: A. thaliana
  misc_feature: MA Experiment 20001904 PARAMETER Experiment Name: At_Drought_Reproduction_P Parameter: Plant Line Value: WS
  misc_feature: MA Experiment 20001904 PARAMETER Experiment Name: At_Drought_Reproduction_P Parameter: Timepoint (day) Value: 7
  misc_feature: MA Experiment 20001904 PARAMETER Experiment Name: At_Drought_Reproduction_P Parameter: Tissue Value: Rosettes
  misc_feature: MA Experiment 20001904 PARAMETER Experiment Name: At_Drought_Reproduction_P Parameter: Treatment Value: Drought vs. No Drought
  misc_feature: MA Experiment ID: 20001905 Result: Down-regulated in Transcription
  misc_feature: MA Experiment 20001905 PARAMETER Experiment Name: At_Drought_Reproduction_P Parameter: Age (day) Value: 40
  misc_feature: MA Experiment 20001905 PARAMETER Experiment Name: At_Drought_Reproduction_P Parameter: Organism Value: A. thaliana
  misc_feature: MA Experiment 20001905 PARAMETER Experiment Name: At_Drought_Reproduction_P Parameter: Plant Line Value: WS
  misc_feature: MA Experiment 20001905 PARAMETER Experiment Name: At_Drought_Reproduction_P Parameter: Timepoint (day) Value: 10
  misc_feature: MA Experiment 20001905 PARAMETER Experiment Name: At_Drought_Reproduction_P Parameter: Tissue Value: Rosettes
  misc_feature: MA Experiment 20001905 PARAMETER Experiment Name: At_Drought_Reproduction_P Parameter: Treatment Value: Drought vs. No Drought
  misc_feature: MA Experiment ID: 20001908 Result: Down-regulated in Transcription
  misc_feature: MA Experiment 20001908 PARAMETER Experiment Name: At_Drought_Reproduction_P Parameter: Age (day) Value: 40
  misc_feature: MA Experiment 20001908 PARAMETER Experiment Name: At_Drought_Reproduction_P Parameter: Organism Value: A. thaliana
  misc_feature: MA Experiment 20001908 PARAMETER Experiment Name: At_Drought_Reproduction_P Parameter: Plant Line Value: WS
  misc_feature: MA Experiment 20001908 PARAMETER Experiment Name: At_Drought_Reproduction_P Parameter: Timepoint (day) Value: 10
  misc_feature: MA Experiment 20001908 PARAMETER Experiment Name: At_Drought_Reproduction_P Parameter: Tissue Value: Siliques
  misc_feature: MA Experiment 20001908 PARAMETER Experiment Name: At_Drought_Reproduction_P Parameter: Treatment Value: Drought vs. No Drought
aaaatgaggattttttaaacccatttttcccttcactaaaaaagaatcgacacacaaaaagagagagtttataaaatacacgataatatcaaagttaaacacacaccaaccaagtaaaaagatacaacacaattggaatctttcttctttgacaaaaaaaaaaggaatctctctctttctctgattctctcatgtccatgcaacaagaaacgtctcacatgacggcggctccacagaccaacggccatcaaatcttccctgagattgacatgtccgccggcgattcctcctccatcgtacgagctacagtcgtccaagcctctacagtcttctacgatactcccaccacgctagataaggcagagagactgctttctgaggcagcggagaatggatctcagctagtggtgttcccggaggctttcatcggtggatatccacgtggctctacctttgaattggctattggttctcgtaccgctaaaggacgagatgactttcgcaagtaccatgcttctgccattgatgttcctggccctgaagtggaacgattagcgttaatggccaagaagtacaaagtatacttggttatgggtgtgatagagagggaaggctacacgctatactgcaccgttcttttcttcgattcacaaggtctgttcttaggtaagcaccgcaaactcatgcctacagctcttgaacgttgcatttggggatttggagatggatcaaccatccctgtgttcgatactcctattgggaaaatcggtgctgctatttgttgggaaaataggatgccttctttgagaaccgcaatgtatgccaaaggcattgagatttattgtgcacctactgctgattcaagagaaacttggctagcatcaatgactcatattgcacttgagggtggatgttttgttttgtcagctaaccagttttgtcgtcggaaagactatccttctccgccggaatacatgttttccggttcagaagagagcctaacaccggactctgttgtctgcgctggtggaagctctatcatttcacctttgggaattgttttagctggaccaaactatagaggagaagctcttatcacagctgatctagatcttggggacatagcacgagccaagtttgattttgatgtggtcggacattactcgaggcctgaagtgtttagcttgaacataagggagcatccgagaaaagcggtcagcttcaagacgtcaaaggtaatggaagatgaatccgtctaacaaatgatcatttgttagtcgagttaattaaattaatccccccccccccccccgatattctaacgctcaaaactgatcactagcattcctagatttttccttcttgtgatcacttgcagctatggccacacatgcagctctcgccgtctcaagaatcccggtcacacagcgactgcagtctaagagtgccattcactctttccctgctcaatgctcctccaagaggctagaagtcgctgaattctccggtctgcgtatgagtagtatcggtggggaagcatctttcttcgatgctgtagctgcacaaatcatccctaaggctgtgacaacatcaactcctgttagaggagagacagtggcgaaactgaaagttgcgattaacggttttggaaggattggtaggaactttcttaggtgttggcatggtcgtaaagactctcctctcgaagttgttgtacttaacgacagtggtggtgtcaagaatgcatcccacttgcttaagtatgactccatgcttggaaccttcaaggctgaagtgaaaattgtggacaatgaaactattagtgttgatggtaagctcatcaaagttgtctccaacagagaccctcttaagcttccatgggctgagctcggcattgacattgttatcgagggaacaggagtgtttgttgatgggccaggagcagggaagcatatccaagccggagcctcgaaagttatcatcactgcaccagccaaaggtgctgatatccctacctatgttatgggagtcaatgagcaagactatggtcacgatgtcgctaacattattagcaatgcatcttgcaccaccaactgtttggcaccttttgctaaagtcttggatgaagaatttggaattgtcaaggggacaatgacaaccacacactcctacaccggagaccaaaggcttctagatgcatcacacagggacctaaggcgtgcaagagccgcagcactgaacatagtgcctaccagcacaggagcagccaaggcggtgtcattagtgttgccgcagctgaagggtaaacttaacggcattgcactccgtgtgccaacaccaaacgtctcagtggttgaccttgttataaacgttgagaagaaaggtttgacagcagaggatgtgaacgaggcctttagaaaagccgctaatggaccgatgaaaggcattttagacgtttgcgatgcgcctcttgtctctgttgacttcaggtgctctgatgtctctaccaccattgactcgtccctcactatggttatgggtgatgatatggtcaaggtggttgcttggtatgataacgagtggggttacagccaaagagtggtggatttggctcacctagtggctagcaagtggccgggagcggaagctgttggaagtggagatcctttggaggatttctgcaagacaaacccggctgatgaggaatgcaaagtctatgactgaacaactttgatcatttctttctttatttttcaccaaaacaatactttgtatcatgagttacttattcgaaatcgtactatgcatacttgtttttctcataagattttcttgtctgatgaacaactatatgttaagactgagagaattgtatttgagaaataaccattttatgctacatgttaaaacgt

SEQ ID NO: 77657 - protein, 447 aa, Arabidopsis thaliana; identical to SEQ ID NO: 49987
  peptide (1)..(447): Ceres Seq. ID no. 12577092
  misc_feature (236)..(397): Pfam Name: Glyceraldehyde 3-phosphate dehydrogenase, Pfam Description: Glyceraldehyde 3-phosphate dehydrogenase,
  misc_feature (1)..(447): Homolog of NCBI NO: 15217555 NR Description: glyceraldehyde-3-phosphate dehydrogenase; protein At1g42970.1, supported by cDNA: gi_14517407, supported by cDNA: supported by cDNA: gi_19310804, supported by cDNA: gi_20465255
  misc_feature (46)..(447): Homolog of NCBI NO: 81621 NR Description: glyceraldehyde-3-phosphate dehydrogenase (NADP)
  misc_feature (1)..(447): Homolog of NCBI NO: 120663 NR Description: Glyceraldehyde 3-phosphate dehydrogenase B,
  misc_feature (5)..(447): Homolog of NCBI NO: 20733 NR Description: precursor C-terminal fragment (AA -80 to 367)
  misc_feature (1)..(447): Homolog of NCBI NO: 66028 NR Description: glyceraldehyde-3-phosphate dehydrogenase (NADP)
  misc_feature (1)..(447): Homolog of NCBI NO: 120664 NR Description: Glyceraldehyde 3-phosphate dehydrogenase B,
  misc_feature (1)..(447): Homolog of NCBI NO: 6063542 NR Description: EST C74302(E30840) corresponds to a region of the
  misc_feature (31)..(421): Homolog of NCBI NO: 120665 NR Description: Glyceraldehyde 3-phosphate dehydrogenase B,
  misc_feature (40)..(418): Homolog of NCBI NO: 30688425 NR Description: glyceraldehyde 3-phosphate dehydrogenase A
  misc_feature (80)..(418): Homolog of NCBI NO: 16415719 NR Description: glyceraldehyde-3-phosphate dehydrogenase (NADP+)

SEQ ID NO: 77658 - protein, 402 aa, Arabidopsis thaliana; identical to SEQ ID NO: 49988
  peptide (1)..(402): Ceres Seq. ID no. 12577093
  misc_feature (191)..(352): Pfam Name: Glyceraldehyde 3-phosphate dehydrogenase, Pfam Description: Glyceraldehyde 3-phosphate dehydrogenase,
  misc_feature (1)..(402): Homolog of NCBI NO: 15217555 NR Description: glyceraldehyde-3-phosphate dehydrogenase; protein At1g42970.1, supported by cDNA: gi_14517407, supported by cDNA: supported by cDNA: gi_19310804, supported by cDNA: gi_20465255
  misc_feature (1)..(402): Homolog of NCBI NO: 81621 NR Description: glyceraldehyde-3-phosphate dehydrogenase (NADP)
  misc_feature (1)..(402): Homolog of NCBI NO: 120663 NR Description: Glyceraldehyde 3-phosphate dehydrogenase B,
  misc_feature (1)..(402): Homolog of NCBI NO: 20733 NR Description: precursor C-terminal fragment (AA -80 to 367)
  misc_feature (1)..(402): Homolog of NCBI NO: 66028 NR Description: glyceraldehyde-3-phosphate dehydrogenase (NADP)
  misc_feature (1)..(402): Homolog of NCBI NO: 120664 NR Description: Glyceraldehyde 3-phosphate dehydrogenase B,
  misc_feature (1)..(402): Homolog of NCBI NO: 6063542 NR Description: EST C74302(E30840) corresponds to a region of the
  misc_feature (1)..(376): Homolog of NCBI NO: 120665 NR Description: Glyceraldehyde 3-phosphate dehydrogenase B,
  misc_feature (1)..(373): Homolog of NCBI NO: 30688425 NR Description: glyceraldehyde 3-phosphate dehydrogenase A
  misc_feature (35)..(373): Homolog of NCBI NO: 16415719 NR Description: glyceraldehyde-3-phosphate dehydrogenase (NADP+)

SEQ ID NO: 77659 - protein, 355 aa, Arabidopsis thaliana
  peptide (1)..(355): Ceres Seq. ID no. 12577094
  misc_feature (1)..(355): Homolog of NCBI NO: 15242205 NR Description: Nitrilase 4 (sp P46011); protein id: At5g22300.1, by cDNA: 6220., supported by cDNA: gi_13937219, supported by gi_508736 [Arabidopsis thaliana] >gi|1171771|sp|P46011|NRL4_ARATH
  misc_feature (10)..(355): Homolog of NCBI NO: 21593970 NR Description: Nitrilase 4 (sp P46011) [Arabidopsis thaliana]
  misc_feature (10)..(355): Homolog of NCBI NO: 37654216 NR Description: nitrilase 1 [Zea mays]
  misc_feature (20)..(347): Homolog of NCBI NO: 37654214 NR Description: nitrilase 2 [Zea mays]
  misc_feature (33)..(354): Homolog of NCBI NO: 30692067 NR Description: nitrilase 1 [Arabidopsis thaliana]
  misc_feature (134)..(354): Homolog of NCBI NO: 30692072 NR Description: nitrilase 1 [Arabidopsis thaliana]
  misc_feature (28)..(329): Homolog of NCBI NO: 32403820 NR Description: hypothetical protein [Neurospora crassa]
  misc_feature (33)..(225): Homolog of NCBI NO: 29828492 NR Description: putative hydratase [Streptomyces avermitilis
  misc_feature (60)..(332): Homolog of NCBI NO: 30683525 NR Description: nitrilase -related [Arabidopsis thaliana] putative nitrilase [Arabidopsis thaliana]
  misc_feature (35)..(248): Homolog of NCBI NO: 29828495 NR Description: putative hydrolase [Streptomyces avermitilis
MSMQQETSHMTAAPQTNGHQIFPEIDMSAGDSSSIVRATVVQASTVFYDTPTTLDKAERLLSEAAENGSQLVVFPEAFIGGYPRGSTFELAIGSRTAKGRDDFRKYHASAIDVPGPEVERLALMAKKYKVYLVMGVIEREGYTLYCTVLFFDSQGLFLGKHRKLMPTALERCIWGFGDGSTIPVFDTPIGKIGAAICWENRMPSLRTAMYAKGIEIYCAPTADSRETWLASMTHIALEGGCFVLSANQFCRRKDYPSPPEYMFSGSEESLTPDSVVCAGGSSIISPLGIVLAGPNYRGEALITADLDLGDIARAKFDFDVVGHYSRPEVFSLNIREHPRKAVSFKTSKVMEDESV

SEQ ID NO: 77660 - DNA, 1479 bp, Arabidopsis thaliana
  misc_feature (1)..(1479): Ceres Seq. ID no. 12577103
  misc_feature: MA Experiment ID: 108461 Result: Up-regulated in Transcription
  misc_feature: MA Experiment 108461 PARAMETER Experiment Name: At_Germinating_Seeds_cDNA_P Parameter: Age (day) Value: 1 vs. 0
  misc_feature: MA Experiment 108461 PARAMETER Experiment Name: At_Germinating_Seeds_cDNA_P Parameter: Tissue Value: Germinating Seeds
  misc_feature: MA Experiment ID: 20000113 Result: Down-regulated in Transcription
  misc_feature: MA Experiment 20000113 PARAMETER Experiment Name: At_42deg_Heat_cDNA_P Parameter: Temperature (deg C) Value: 42 vs. 22
  misc_feature: MA Experiment 20000113 PARAMETER Experiment Name: At_42deg_Heat_cDNA_P Parameter: Timepoint (hr) Value: 8
  misc_feature: MA Experiment 20000113 PARAMETER Experiment Name: At_42deg_Heat_cDNA_P Parameter: Tissue Value: Aerial
  misc_feature: MA Experiment ID: 20000173 Result: Down-regulated in Transcription
  misc_feature: MA Experiment 20000173 PARAMETER Experiment Name: At_42deg_Heat_P Parameter: Age (day) Value: 14
  misc_feature: MA Experiment 20000173 PARAMETER Experiment Name: At_42deg_Heat_P Parameter: Organism Value: A. thaliana
  misc_feature: MA Experiment 20000173 PARAMETER Experiment Name: At_42deg_Heat_P Parameter: Plant Line Value: WS
  misc_feature: MA Experiment 20000173 PARAMETER Experiment Name: At_42deg_Heat_P Parameter: Temperature (deg C) Value: 42 vs. 22
  misc_feature: MA Experiment 20000173 PARAMETER Experiment Name: At_42deg_Heat_P Parameter: Timepoint (hr) Value: 6
  misc_feature: MA Experiment 20000173 PARAMETER Experiment Name: At_42deg_Heat_P Parameter: Tissue Value: Aerial
  misc_feature: MA Experiment ID: 20000180 Result: Up-regulated in Transcription
  misc_feature: MA Experiment 20000180 PARAMETER Experiment Name: At_Germinating_Seeds_P Parameter: Age (hr) Value: 24 vs. 0
  misc_feature: MA Experiment 20000180 PARAMETER Experiment Name: At_Germinating_Seeds_P Parameter: Tissue Value: Germinating Seeds
  misc_feature: MA Experiment ID: 20000184 Result: Down-regulated in Transcription
  misc_feature: MA Experiment 20000184 PARAMETER Experiment Name: At_Shoots__P Parameter: Age (day) Value: 7
  misc_feature: MA Experiment 20000184 PARAMETER Experiment Name: At_Shoots__P Parameter: Tissue Value: Shoots vs. Whole Plant
  misc_feature: MA Experiment ID: 20000227 Result: Up-regulated in Transcription
  misc_feature: MA Experiment 20000227 PARAMETER Experiment Name: At_Root-Tips-vs-Tops_P Parameter: Tissue Value: Root Tips vs. Root Tops
  misc_feature: MA Experiment ID: 20000234 Result: Up-regulated in Transcription
  misc_feature: MA Experiment 20000234 PARAMETER Experiment Name: At_Siliques_P Parameter: Age (day) Value: 21
  misc_feature: MA Experiment 20000234 PARAMETER Experiment Name: At_Siliques_P Parameter: Organism Value: A. thaliana
  misc_feature: MA Experiment 20000234 PARAMETER Experiment Name: At_Siliques_P Parameter: Plant Line Value: WS
  misc_feature: MA Experiment 20000234 PARAMETER Experiment Name: At_Siliques_P Parameter: Tissue Value: Less Than 5mm Siliques vs. Whole Plant
  misc_feature: MA Experiment ID: 20000235 Result: Up-regulated in Transcription
  misc_feature: MA Experiment 20000235 PARAMETER Experiment Name: At_Siliques_P Parameter: Age (day) Value: 21
  misc_feature: MA Experiment 20000235 PARAMETER Experiment Name: At_Siliques_P Parameter: Organism Value: A. thaliana
  misc_feature: MA Experiment 20000235 PARAMETER Experiment Name: At_Siliques_P Parameter: Plant Line Value: WS
  misc_feature: MA Experiment 20000235 PARAMETER Experiment Name: At_Siliques_P Parameter: Tissue Value: 5-10mm Siliques vs. Whole Plant
  misc_feature: MA Experiment ID: 20000264 Result: Up-regulated in Transcription
  misc_feature: MA Experiment 20000264 PARAMETER Experiment Name: At_Open_Flower_P Parameter: Age (day) Value: 21
  misc_feature: MA Experiment 20000264 PARAMETER Experiment Name: At_Open_Flower_P Parameter: Plant Line Value: WS
  misc_feature: MA Experiment 20000264 PARAMETER Experiment Name: At_Open_Flower_P Parameter: Tissue Value: Open Flower vs. Whole Plant
  misc_feature: MA Experiment ID: 20000265 Result: Up-regulated in Transcription
  misc_feature: MA Experiment 20000265 PARAMETER Experiment Name: At_Open_Flower_P Parameter: Age (day) Value: 21
  misc_feature: MA Experiment 20000265 PARAMETER Experiment Name: At_Open_Flower_P Parameter: Plant Line Value: WS
  misc_feature: MA Experiment 20000265 PARAMETER Experiment Name: At_Open_Flower_P Parameter: Tissue Value: Closed Flower vs. Whole Plant
  misc_feature: MA Experiment ID: 20000286 Result: Up-regulated in Transcription
  misc_feature: MA Experiment 20000286 PARAMETER Experiment Name: At_Open_Flower_P Parameter: Age (day) Value: 21
  misc_feature: MA Experiment 20000286 PARAMETER Experiment Name: At_Open_Flower_P Parameter: Plant Line Value: WS
  misc_feature: MA Experiment 20000286 PARAMETER Experiment Name: At_Open_Flower_P Parameter: Tissue Value: Half Open vs. Whole Plant
  misc_feature: MA Experiment ID: 20000794 Result: Up-regulated in Transcription
  misc_feature: MA Experiment 20000794 PARAMETER Experiment Name: At_Petals_P Parameter: Age (day) Value: 23-25 days
  misc_feature: MA Experiment 20000794 PARAMETER Experiment Name: At_Petals_P Parameter: Plant Line Value: WS
  misc_feature: MA Experiment 20000794 PARAMETER Experiment Name: At_Petals_P Parameter: Tissue Value: Petals vs. Whole plant
aacggcactctcttctcttgtctctccttatttctcaatccagattccaatttttctcagcgaagtgagtgatctcgccgtttgtgttccgctggtgaatcatcaccggagaattgcagatccaatgatacattcctaatcggttttattttgagtgacgacgaatcattggatccagaaaatccgatttctggagatttgaattagtgaaatttgatcgaatttcgacagtgaagaggcatttgcgtctgattgctttgactaagagatctgattttggatctatttcaatggcgaggaaagggtcgagtataagattatcgagctcgagaatatcaacccttttgctctttatgtttgcaacttttgcttccttctatgtagcaggccgtttatggcaagaatctcaaactagggttcatctaatcaatgagctcgatagagtaaccggacaggggaaatctgctatatcagtggatgatactttgaagatcatagcttgcagggaacagaagaagacactagcagctcttgagatggaattaagttcagctaggcaagaaggctttgtttcaaaaagtcccaaacttgctgatggaactgaaaccaagaaaagaccgttagtggttatcgggataatgacaagtttgggtaacaagaagaagagggatgcagttcgtcaagcatggatggggactggtgcatcacttaaaaaacttgaaagtgaaaagggtgtgattgcaagatttgttattggaagaagtgcaaataaaggggacagcatggacaagagcattgatactgaaaatagtcaaaccgatgacttcattattctcgatgatgtagttgaggcacccgaggaagcttctaagaaggtaaaactgttctttgcctacgctgcagataggtgggatgcacagttttatgcaaaagccatcgacaatatctacgtaaatatagatgctctgggaactacgcttgcagcacatctggaaaacccacgggcttacatcggttgcatgaaatcaggcgaagtcttctcagaaccgaaccacaaatggtatgaaccagagtggtggaaattcggtgacaagaaagcatacttccggcatgcttatggggagatgtatgttataacgcacgcattggctagatttgtatcgatcaatagagacattcttcattcgtatgctcatgatgacgtcagcacgggttcatggtttgtgggtcttgatgttaagcatgtagatgaaggaaagttttgctgttctgcgtggtcctcagaagccatatgcgcaggagtgtagtagaaccaaagacgaatccaaagtgtgaggctcttggctctttggtgcttatagagaaagaagaacaaatgacatttgtctgaagaaagctaattacaccatttcatctatgtattctaaacttgccattttattggcattgcattatacgaagtctaggatttggatgtgg

SEQ ID NO: 77661 - protein, 338 aa, Arabidopsis thaliana; identical to SEQ ID NO: 26027
  peptide (1)..(338): Ceres Seq. ID no. 12577104
  misc_feature (124)..(322): Pfam Name: Galactosyltransferase Pfam Description: Galactosyltransferase
  misc_feature (1)..(328): Homolog of NCBI NO: 9759181 NR Description: Avr9 elicitor response protein-like [Arabidopsis
  misc_feature (1)..(338): Homolog of NCBI NO: 18423501 NR Description: Avr9 elicitor response protein-like; protein id: supported by cDNA: gi_14423409, supported by cDNA: gi_20148408 thaliana] >gi|14423410|gb|AAK62387.1|AF386942_1 Avr9 [Arabidopsis
  misc_feature (1)..(336): Homolog of NCBI NO: 20372915 NR Description: beta 1,3-glycosyltransferase-like protein I
  misc_feature (3)..(338): Homolog of NCBI NO: 40253477 NR Description: putative Avr9 elicitor response protein [Oryza
  misc_feature (15)..(331): Homolog of NCBI NO: 22553068 NR Description: beta 1,3-glycosyltransferase-like protein I
  misc_feature (1)..(336): Homolog of NCBI NO: 34898462 NR Description: ESTs D47620(S13223),AU029621(E31157) correspond a region of the predicted gene.~Similar to Arabidopsis thaliana
  misc_feature (3)..(336): Homolog of NCBI NO: 15236681 NR Description: putative protein; protein id: At4g32120.1, by cDNA: gi_15292682, supported by cDNA: gi_21281128 [Arabidopsis >gi|15292683|gb|AAK92710.1| unknown protein [Arabidopsis
  misc_feature (4)..(328): Homolog of NCBI NO: 15224704 NR Description: unknown protein; protein id: At2g25300.1
  misc_feature (55)..(336): Homolog of NCBI NO: 26451702 NR Description: unknown protein [Arabidopsis thaliana]
  misc_feature (10)..(326): Homolog of NCBI NO: 15223337 NR Description: Avr9 elicitor response protein, putative; protein At1g32930.1 [Arabidopsis thaliana] >gi|25370618|pir||H86453 avr9

SEQ ID NO: 77662 - protein, 317 aa, Arabidopsis thaliana; identical to SEQ ID NO: 26028
  peptide (1)..(317): Ceres Seq. ID no. 12577105
  misc_feature (103)..(301): Pfam Name: Galactosyltransferase Pfam Description: Galactosyltransferase
  misc_feature (1)..(307): Homolog of NCBI NO: 9759181 NR Description: Avr9 elicitor response protein-like [Arabidopsis
  misc_feature (1)..(317): Homolog of NCBI NO: 18423501 NR Description: Avr9 elicitor response protein-like; protein id: supported by cDNA: gi_14423409, supported by cDNA: gi_20148408 thaliana] >gi|14423410|gb|AAK62387.1|AF386942_1 Avr9 [Arabidopsis
  misc_feature (1)..(315): Homolog of NCBI NO: 20372915 NR Description: beta 1,3-glycosyltransferase-like protein I
  misc_feature (1)..(317): Homolog of NCBI NO: 40253477 NR Description: putative Avr9 elicitor response protein [Oryza
  misc_feature (1)..(310): Homolog of NCBI NO: 22553068 NR Description: beta 1,3-glycosyltransferase-like protein I
  misc_feature (1)..(315): Homolog of NCBI NO: 34898462 NR Description: ESTs D47620(S13223),AU029621(E31157) correspond a region of the predicted gene.~Similar to Arabidopsis thaliana
  misc_feature (1)..(315): Homolog of NCBI NO: 15236681 NR Description: putative protein; protein id: At4g32120.1, by cDNA: gi_15292682, supported by cDNA: gi_21281128 [Arabidopsis >gi|15292683|gb|AAK92710.1| unknown protein [Arabidopsis
  misc_feature (1)..(307): Homolog of NCBI NO: 15224704 NR Description: unknown protein; protein id: At2g25300.1
  misc_feature (34)..(315): Homolog of NCBI NO: 26451702 NR Description: unknown protein [Arabidopsis thaliana]
  misc_feature (1)..(305): Homolog of NCBI NO: 15223337 NR Description: Avr9 elicitor response protein, putative; protein At1g32930.1 [Arabidopsis thaliana] >gi|25370618|pir||H86453 avr9

SEQ ID NO: 77663 - protein, 256 aa, Arabidopsis thaliana
  peptide (1)..(256): Ceres Seq. ID no. 12577106
  misc_feature (42)..(240): Pfam Name: Galactosyltransferase Pfam Description: Galactosyltransferase
  misc_feature (1)..(246): Homolog of NCBI NO: 9759181 NR Description: Avr9 elicitor response protein-like [Arabidopsis
  misc_feature (1)..(256): Homolog of NCBI NO: 18423501 NR Description: Avr9 elicitor response protein-like; protein id: supported by cDNA: gi_14423409, supported by cDNA: gi_20148408 thaliana] >gi|14423410|gb|AAK62387.1|AF386942_1 Avr9 [Arabidopsis
  misc_feature (1)..(254): Homolog of NCBI NO: 20372915 NR Description: beta 1,3-glycosyltransferase-like protein I
  misc_feature (1)..(256): Homolog of NCBI NO: 40253477 NR Description: putative Avr9 elicitor response protein [Oryza
  misc_feature (1)..(249): Homolog of NCBI NO: 22553068 NR Description: beta 1,3-glycosyltransferase-like protein I
  misc_feature (1)..(254): Homolog of NCBI NO: 34898462 NR Description: ESTs D47620(S13223),AU029621(E31157) correspond a region of the predicted gene.~Similar to Arabidopsis thaliana
  misc_feature (1)..(254): Homolog of NCBI NO: 15236681 NR Description: putative protein; protein id: At4g32120.1, by cDNA: gi_15292682, supported by cDNA: gi_21281128 [Arabidopsis >gi|15292683|gb|AAK92710.1| unknown protein [Arabidopsis
  misc_feature (1)..(246): Homolog of NCBI NO: 15224704 NR Description: unknown protein; protein id: At2g25300.1
  misc_feature (1)..(254): Homolog of NCBI NO: 26451702 NR Description: unknown protein [Arabidopsis thaliana]
  misc_feature (1)..(244): Homolog of NCBI NO: 15223337 NR Description: Avr9 elicitor response protein, putative; protein At1g32930.1 [Arabidopsis thaliana] >gi|25370618|pir||H86453 avr9
MELSSARQEGFVSKSPKLADGTETKKRPLVVIGIMTSLGNKKKRDAVRQAWMGTGASLKKLESEKGVIARFVIGRSANKGDSMDKSIDTENSQTDDFIILDDVVEAPEEASKKVKLFFAYAADRWDAQFYAKAIDNIYVNIDALGTTLAAHLENPRAYIGCMKSGEVFSEPNHKWYEPEWWKFGDKKAYFRHAYGEMYVITHALARFVSINRDILHSYAHDDVSTGSWFVGLDVKHVDEGKFCCSAWSSEAICAGV

SEQ ID NO: 77664 - DNA, 2062 bp, Arabidopsis thaliana
  misc_feature (1)..(2062): Ceres Seq. ID no. 12577111
  misc_feature: MA Experiment ID: 20000315 Result: Down-regulated in Transcription
  misc_feature: MA Experiment 20000315 PARAMETER Experiment Name: At_14day_Shoots-Roots_Sub_P Parameter: Age (day) Value: 14
  misc_feature: MA Experiment 20000315 PARAMETER Experiment Name: At_14day_Shoots-Roots_Sub_P Parameter: Organism Value: A. thaliana
  misc_feature: MA Experiment 20000315 PARAMETER Experiment Name: At_14day_Shoots-Roots_Sub_P Parameter: Plant Line Value: WS
  misc_feature: MA Experiment 20000315 PARAMETER Experiment Name: At_14day_Shoots-Roots_Sub_P Parameter: Tissue Value: Shoots vs. Whole Plant
  misc_feature: MA Experiment ID: 20000328 Result: Down-regulated in Transcription
  misc_feature: MA Experiment 20000328 PARAMETER Experiment Name: At_42deg_Heat_Sub_P Parameter: Age (day) Value: 14
  misc_feature: MA Experiment 20000328 PARAMETER Experiment Name: At_42deg_Heat_Sub_P Parameter: Organism Value: A. thaliana
  misc_feature: MA Experiment 20000328 PARAMETER Experiment Name: At_42deg_Heat_Sub_P Parameter: Plant Line Value: WS
  misc_feature: MA Experiment 20000328 PARAMETER Experiment Name: At_42deg_Heat_Sub_P Parameter: Temperature (deg C) Value: 42 vs. 22
  misc_feature: MA Experiment 20000328 PARAMETER Experiment Name: At_42deg_Heat_Sub_P Parameter: Timepoint (hr) Value: 6
  misc_feature: MA Experiment 20000328 PARAMETER Experiment Name: At_42deg_Heat_Sub_P Parameter: Tissue Value: Aerial
aagatcctctacgacccgagtccattttagatcctaacccggtgacccgtttacctggtttcctctcaccaccaagttttgcttctaaaattttctggtagatctgagtccacaatcatcagaaatcaactttgtgaattgaaggccgatcactcctttgactttgttcttagggttcatcctcaaaggtgtttaatgagctcttagaagctatgggaatggcgtccatgagctctggtactgaaagccttcgtctttgcgtgtttgacttaagaagaggccaacacgaaggacaggaactggacaagatcttgttcttctatcctcctgatctaaccttctccactcagctatcggttataggtctcagtgaagggcttatcacgttcacgagcttttcctgtattgttgggtgttcctgagacgtggtttatggaatataaacacagacttttctccccggaggcagcttgtgaggtaattgaagcagagagacattcccatgttttctatgaggccgagcccgatatctggatggtcatgattgtagagaaaaataaggagattgaagctgtatggaggattgatgcattgcggagagtgcttaaggaagtgcactctctctttgttatgtttcaagggtcaattagggcattgcttgagaaagaaccaactggaggacttgtaagatcgcacttgtatccattcatcacagactatttaaatgatcttttcgttgggaaaaaacaacagttaccttccttccgtgacactttgaaagagcgtggaacagttcagatgctaactttagctagagatgcggcacttgaagttcagatgtacagtctctcgtcggagtgctagattcatgtgctgggaccgttcgatgccactctgtgattctatttcatgatctactggtgtcaacaactctctcacctgatgataccgtcgacttgtttgcattttctgtcatgagattaaccacaaacgcgctatcatctggcacaagttcctggtcatatctacgcaaaggatccggttcacctcaaatatcttctagatctactacggtgccccctcttggttcaggtggtacattgccttcgggaaatggtagtagcacaggtcgtgttattagacctttgcagcacgataagtggtcgaaggggaaagatgggtttcttgtaactgatatttggggtttagatgccaccccgacaattttgatacagaagacacaggaaagtttttaccttttgacttatcagtacaagagtctcaccttggttcttctcgtgcctatcgctgcaattgttaatggagagctagacatctcattcgtgaagcagcaagttattgaaaacgcatcgaccaaaatcttgaaagtcgaagagaagctatcgaaagggtggggcggtgagaatgcttaccatgtaagcggttaccgttacttactagttgataatgacatggaagtttccagagcttctccaccaggaaaggtagcaacactagcaaaggagtctttgcttgcactaaacaagctaagggaagaagtggatacagaaaaaaaccgctcgaagcaagagaaagacatggaaatatgcattcgagcgaagaacaacacatgggtcatcgcgcgtctaaacagaggtaaagagctttacatggctttagagaaagcaagtgaaactcttcttgatgctacagactctgtccaaagattcagcaacaggtaaaactttttagttactactactactaaagtactaacccatgaattagggtttccaaacaaaaaaaatgaaatgatgttgccaatttcttcaggtactgcagcggggcattccccatggattagattctgcaattgtttgttttgatagaagttgcaaaggaaagtgtttttgaagtgttttgagatatgttttagattttcaattataagatataaaagaaaccgttacaaagaatgagaatttggtgacttttgtatccacaactaaaagtaaacgtggaacttgacccttgacggtttgaataaaaccttcgcttaatc

SEQ ID NO: 77665 - protein, 255 aa, Arabidopsis thaliana
  peptide (1)..(255): Ceres Seq. ID no. 12577112
  misc_feature (1)..(255): Homolog of NCBI NO: 25372816 NR Description: F23A5.27 [imported] - Arabidopsis thaliana
  misc_feature (1)..(255): Homolog of NCBI NO: 15220866 NR Description: myrosinase precursor, putative; protein id:
  misc_feature (1)..(255): Homolog of NCBI NO: 30684673 NR Description: expressed protein [Arabidopsis thaliana]
  misc_feature (1)..(255): Homolog of NCBI NO: 18394314 NR Description: expressed protein; protein id: At1g16020.1,
  misc_feature (1)..(255): Homolog of NCBI NO: 21618002 NR Description: unknown [Arabidopsis thaliana]
  misc_feature (1)..(255): Homolog of NCBI NO: 38175489 NR Description: putative myrosinase precursor [Oryza sativa
  misc_feature (1)..(255): Homolog of NCBI NO: 14517360 NR Description: At1g80910/F23A5_21 [Arabidopsis thaliana]
  misc_feature (1)..(255): Homolog of NCBI NO: 18266049 NR Description: myrosinase precursor [Brassica oleracea]
MRLTTNALSSGTSSWSYLRKGSGSPQISSRSTTVPPLGSGGTLPSGNGSSTGRVIRPLQHDKWSKGKDGFLVTDIWGLDATPTILIQKTQESFYLLTYQYKSLTLVLLVPIAAIVNGELDISFVKQQVIENASTKILKVEEKLSKGWGGENAYHVSGYRYLLVDNDMEVSRASPPGKVATLAKESLLALNKLREEVDTEKNRSKQEKDMEICIRAKNNTWVIARLNRGKELYMALEKASETLLDATDSVQRFSNR

SEQ ID NO: 77666 - protein, 143 aa, Arabidopsis thaliana
  peptide (1)..(143): Ceres Seq. ID no. 12577113
  misc_feature (6)..(135): Homolog of NCBI NO: 25372816 NR Description: F23A5.27 [imported] - Arabidopsis thaliana
  misc_feature (6)..(135): Homolog of NCBI NO: 15220866 NR Description: myrosinase precursor, putative; protein id:
  misc_feature (6)..(135): Homolog of NCBI NO: 30684673 NR Description: expressed protein [Arabidopsis thaliana]
  misc_feature (6)..(135): Homolog of NCBI NO: 18394314 NR Description: expressed protein; protein id: At1g16020.1,
  misc_feature (6)..(135): Homolog of NCBI NO: 21618002 NR Description: unknown [Arabidopsis thaliana]
  misc_feature (6)..(135): Homolog of NCBI NO: 38175489 NR Description: putative myrosinase precursor [Oryza sativa
MEYKHRLFSPEAACEVIEAERHSHVFYEAEPDIWMVMIVEKNKEIEAVWRIDALRRVLKEVHSLFVMFQGSIRALLEKEPTGGLVRSHLYPFITDYLNDLFVGKKQQLPSFRDTLKERGTVQMLTLARDAALEVQMYSLSSEC

SEQ ID NO: 77667 - DNA, 1193 bp, Arabidopsis thaliana
  misc_feature (1)..(1193): Ceres Seq. ID no. 12577114
  misc_feature: MA Experiment ID: 20000173 Result: Down-regulated in Transcription
  misc_feature: MA Experiment 20000173 PARAMETER Experiment Name: At_42deg_Heat_P Parameter: Age (day) Value: 14
  misc_feature: MA Experiment 20000173 PARAMETER Experiment Name: At_42deg_Heat_P Parameter: Organism Value: A. thaliana
  misc_feature: MA Experiment 20000173 PARAMETER Experiment Name: At_42deg_Heat_P Parameter: Plant Line Value: WS
  misc_feature: MA Experiment 20000173 PARAMETER Experiment Name: At_42deg_Heat_P Parameter: Temperature (deg C) Value: 42 vs. 22
  misc_feature: MA Experiment 20000173 PARAMETER Experiment Name: At_42deg_Heat_P Parameter: Timepoint (hr) Value: 6
  misc_feature: MA Experiment 20000173 PARAMETER Experiment Name: At_42deg_Heat_P Parameter: Tissue Value: Aerial
  misc_feature: MA Experiment ID: 20000179 Result: Up-regulated in Transcription
  misc_feature: MA Experiment 20000179 PARAMETER Experiment Name: At_Germinating_Seeds_P Parameter: Age (hr) Value: 6 vs. 0
  misc_feature: MA Experiment 20000179 PARAMETER Experiment Name: At_Germinating_Seeds_P Parameter: Tissue Value: Germinating Seeds
  misc_feature: MA Experiment ID: 20000184 Result: Down-regulated in Transcription
  misc_feature: MA Experiment 20000184 PARAMETER Experiment Name: At_Shoots__P Parameter: Age (day) Value: 7
  misc_feature: MA Experiment 20000184 PARAMETER Experiment Name: At_Shoots__P Parameter: Tissue Value: Shoots vs. Whole Plant
  misc_feature: MA Experiment ID: 20000185 Result: Down-regulated in Transcription
  misc_feature: MA Experiment 20000185 PARAMETER Experiment Name: At_Roots__P Parameter: Age (day) Value: 7 vs. 21
  misc_feature: MA Experiment 20000185 PARAMETER Experiment Name: At_Roots__P Parameter: Organism Value: A. thaliana
  misc_feature: MA Experiment 20000185 PARAMETER Experiment Name: At_Roots__P Parameter: Tissue Value: Roots vs. Whole Plant
  misc_feature: MA Experiment ID: 20000227 Result: Down-regulated in Transcription
  misc_feature: MA Experiment 20000227 PARAMETER Experiment Name: At_Root-Tips-vs-Tops_P Parameter: Tissue Value: Root Tips vs. Root Tops
  misc_feature: MA Experiment ID: 20000234 Result: Down-regulated in Transcription
  misc_feature: MA Experiment 20000234 PARAMETER Experiment Name: At_Siliques_P Parameter: Age (day) Value: 21
  misc_feature: MA Experiment 20000234 PARAMETER Experiment Name: At_Siliques_P Parameter: Organism Value: A. thaliana
  misc_feature: MA Experiment 20000234 PARAMETER Experiment Name: At_Siliques_P Parameter: Plant Line Value: WS
  misc_feature: MA Experiment 20000234 PARAMETER Experiment Name: At_Siliques_P Parameter: Tissue Value: Less Than 5mm Siliques vs. Whole Plant
  misc_feature: MA Experiment ID: 20000264 Result: Down-regulated in Transcription
  misc_feature: MA Experiment 20000264 PARAMETER Experiment Name: At_Open_Flower_P Parameter: Age (day) Value: 21
  misc_feature: MA Experiment 20000264 PARAMETER Experiment Name: At_Open_Flower_P Parameter: Plant Line Value: WS
  misc_feature: MA Experiment 20000264 PARAMETER Experiment Name: At_Open_Flower_P Parameter: Tissue Value: Open Flower vs. Whole Plant
  misc_feature: MA Experiment ID: 20000439 Result: Down-regulated in Transcription
  misc_feature: MA Experiment 20000439 PARAMETER Experiment Name: At_Roots__P Parameter: Age (day) Value: 14 vs. 21
  misc_feature: MA Experiment 20000439 PARAMETER Experiment Name: At_Roots__P Parameter: Organism Value: A. thaliana
  misc_feature: MA Experiment 20000439 PARAMETER Experiment Name: At_Roots__P Parameter: Tissue Value: Roots vs. Whole Plant
  misc_feature: MA Experiment ID: 20000495 Result: Down-regulated in Transcription
  misc_feature: MA Experiment 20000495 PARAMETER Experiment Name: At_Guard_Cells_P Parameter: Harvest Date Value: 8/2/2002
  misc_feature: MA Experiment 20000495 PARAMETER Experiment Name: At_Guard_Cells_P Parameter: Organism Value: A. thaliana
  misc_feature: MA Experiment 20000495 PARAMETER Experiment Name: At_Guard_Cells_P Parameter: Tissue Value: Guard Cells vs. Leaves
aaacaagccctatctccgattacacacacaatcaaaagaagatcaagccaaaaacagaggcattgcgaattttaattgatcactctctctctctatctctgttcacacatctctcccaaaggtagaagaagatggggacgacgttagatgtatcaagagcagagctagcacttgtggtaatgtatttgaacaaagcagaggcaagagataagttatgcagagctatacagtatggttccaagttcttgagtggtggacaacctggtactgctcaaaatgttgacaaatctactagcttagcaagaaaagtcttccgtcttttcaaggttaatccttttgattttgattagagtgtgtttttacctctttgtttaattaactaaatattatcattgttgcagtttgtgaatgacttgcatggtcttatcagtcctgtgcctaaaggaactcctcttcctcttgttttacttggaaaggtaggtgctttagagatcaaagctcagagttcgtttcggttttatatctttgttctgtatcaatctttgttgttattttcagtcgaagaacgcacttttatctacattcttgttcctggatcaaattgtctggcttgggagatcaggaatatataagaacaaagaacgagctgagttacttggacgtatatctctcttctgctggatgggatcttctgtctgcacaactttagtcgaggttggtgagatgggaaggctttcttcatcaatgaagaagatcgaaaagggactcaagaatggaaacaagtatcaggatgaggattatcgtgctaagctaaaaaaatcaaacgagaggtcacttgctttgatcaaatcagctatggacattgttgtagcagctggtcttcttcagttagctccaacgaagatcactcctcgtgtcaccggagcttttggattcatcacctccatcatttcttgttaccagttgcttccgacacgccccaagatcaaaacaccctgaagtcaatcgaggaagctggtgttaaggagaaagtcatttcagaaagtttctgttcttcttattattaaggaaattcactgctgttataaaacatcgtataaaatacttatttgcaggaattacggttattataaatttatgcctcagattcttgatacacaagtttcaatactcaatagtattgcattattatg

SEQ ID NO: 77668 - protein, 105 aa, Arabidopsis thaliana
  peptide (1)..(105): Ceres Seq. ID no. 12577115
  misc_feature (1)..(96): Pfam Name: Peroxisomal biogenesis factor 11 (PEX11) Pfam Description: Peroxisomal biogenesis factor 11 (PEX11)
  misc_feature (1)..(105): Homolog of NCBI NO: 18406877 NR Description: expressed protein; protein id: At2g45740.1, by cDNA: 12250., supported by cDNA: gi_15450879 [Arabidopsis >gi|15450880|gb|AAK96711.1| Unknown protein [Arabidopsis
  misc_feature (1)..(105): Homolog of NCBI NO: 11358250 NR Description: hypothetical protein T27I15_160 - Arabidopsis >gi|8388623|emb|CAB94143.1| putative protein [Arabidopsis
  misc_feature (1)..(100): Homolog of NCBI NO: 7486466 NR Description: hypothetical protein At2g45740 [imported] -
  misc_feature (1)..(103): Homolog of NCBI NO: 8489788 NR Description: unknown [Lycopersicon esculentum]
  misc_feature (1)..(105): Homolog of NCBI NO: 30695340 NR Description: expressed protein [Arabidopsis thaliana] unknown protein [Arabidopsis thaliana]
  misc_feature (1)..(103): Homolog of NCBI NO: 18378887 NR Description: expressed protein; protein id: At1g01820.1, by cDNA: 28475., supported by cDNA: gi_12083289, supported by gi_17381254, supported by cDNA: gi_20453366 [Arabidopsis
  misc_feature (1)..(103): Homolog of NCBI NO: 25553559 NR Description: OSJNBa0038F22.7 [Oryza sativa (japonica
  misc_feature (1)..(94): Homolog of NCBI NO: 34898026 NR Description: ESTs AU064537(E31904),AU082147(E31904) correspond a region of the predicted gene.~Similar to Arabidopsis thaliana
  misc_feature (1)..(105): Homolog of NCBI NO: 14335058 NR Description: At2g45740/F4I18.28 [Arabidopsis thaliana]
MGSSVCTTLVEVGEMGRLSSSMKKIEKGLKNGNKYQDEDYRAKLKKSNERSLALIKSAMDIVVAAGLLQLAPTKITPRVTGAFGFITSIISCYQLLPTRPKIKTP

SEQ ID NO: 77669 - protein, 91 aa, Arabidopsis thaliana
  peptide (1)..(91): Ceres Seq. ID no. 12577116
  misc_feature (1)..(82): Pfam Name: Peroxisomal biogenesis factor 11 (PEX11) Pfam Description: Peroxisomal biogenesis factor 11 (PEX11)
  misc_feature (1)..(91): Homolog of NCBI NO: 18406877 NR Description: expressed protein; protein id: At2g45740.1, by cDNA: 12250., supported by cDNA: gi_15450879 [Arabidopsis >gi|15450880|gb|AAK96711.1| Unknown protein [Arabidopsis
  misc_feature (1)..(91): Homolog of NCBI NO: 11358250 NR Description: hypothetical protein T27I15_160 - Arabidopsis >gi|8388623|emb|CAB94143.1| putative protein [Arabidopsis
  misc_feature (1)..(86): Homolog of NCBI NO: 7486466 NR Description: hypothetical protein At2g45740 [imported] -
  misc_feature (1)..(89): Homolog of NCBI NO: 8489788 NR Description: unknown [Lycopersicon esculentum]
  misc_feature (1)..(91): Homolog of NCBI NO: 30695340 NR Description: expressed protein [Arabidopsis thaliana] unknown protein [Arabidopsis thaliana]
  misc_feature (1)..(89): Homolog of NCBI NO: 18378887 NR Description: expressed protein; protein id: At1g01820.1, by cDNA: 28475., supported by cDNA: gi_12083289, supported by gi_17381254, supported by cDNA: gi_20453366 [Arabidopsis
  misc_feature (1)..(89): Homolog of NCBI NO: 25553559 NR Description: OSJNBa0038F22.7 [Oryza sativa (japonica
  misc_feature (1)..(80): Homolog of NCBI NO: 34898026 NR Description: ESTs AU064537(E31904),AU082147(E31904) correspond a region of the predicted gene.~Similar to Arabidopsis thaliana
  misc_feature (1)..(91): Homolog of NCBI NO: 14335058 NR Description: At2g45740/F4I18.28 [Arabidopsis thaliana]
MGRLSSSMKKIEKGLKNGNKYQDEDYRAKLKKSNERSLALIKSAMDIVVAAGLLQLAPTKITPRVTGAFGFITSIISCYQLLPTRPKIKTP

SEQ ID NO: 77670 - protein, 84 aa, Arabidopsis thaliana
  peptide (1)..(84): Ceres Seq. ID no. 12577117
  misc_feature (1)..(75): Pfam Name: Peroxisomal biogenesis factor 11 (PEX11) Pfam Description: Peroxisomal biogenesis factor 11 (PEX11)
  misc_feature (1)..(84): Homolog of NCBI NO: 18406877 NR Description: expressed protein; protein id: At2g45740.1, by cDNA: 12250., supported by cDNA: gi_15450879 [Arabidopsis >gi|15450880|gb|AAK96711.1| Unknown protein [Arabidopsis
  misc_feature (1)..(84): Homolog of NCBI NO: 11358250 NR Description: hypothetical protein T27I15_160 - Arabidopsis >gi|8388623|emb|CAB94143.1| putative protein [Arabidopsis
  misc_feature (1)..(79): Homolog of NCBI NO: 7486466 NR Description: hypothetical protein At2g45740 [imported] -
  misc_feature (1)..(82): Homolog of NCBI NO: 8489788 NR Description: unknown [Lycopersicon esculentum]
  misc_feature (1)..(84): Homolog of NCBI NO: 30695340 NR Description: expressed protein [Arabidopsis thaliana] unknown protein [Arabidopsis thaliana]
  misc_feature (1)..(82): Homolog of NCBI NO: 18378887 NR Description: expressed protein; protein id: At1g01820.1, by cDNA: 28475., supported by cDNA: gi_12083289, supported by gi_17381254, supported by cDNA: gi_20453366 [Arabidopsis
  misc_feature (1)..(82): Homolog of NCBI NO: 25553559 NR Description: OSJNBa0038F22.7 [Oryza sativa (japonica
  misc_feature (1)..(73): Homolog of NCBI NO: 34898026 NR Description: ESTs AU064537(E31904),AU082147(E31904) correspond a region of the predicted gene.~Similar to Arabidopsis thaliana
  misc_feature (1)..(84): Homolog of NCBI NO: 14335058 NR Description: At2g45740/F4I18.28 [Arabidopsis thaliana]
MKKIEKGLKNGNKYQDEDYRAKLKKSNERSLALIKSAMDIVVAAGLLQLAPTKITPRVTGAFGFITSIISCYQLLPTRPKIKTP

SEQ ID NO: 77671 - DNA, 1652 bp, Arabidopsis thaliana
  misc_feature (1)..(1652): Ceres Seq. ID no. 12577130
  misc_feature: MA Experiment ID: 20000265 Result: Up-regulated in Transcription
  misc_feature: MA Experiment 20000265 PARAMETER Experiment Name: At_Open_Flower_P Parameter: Age (day) Value: 21
  misc_feature: MA Experiment 20000265 PARAMETER Experiment Name: At_Open_Flower_P Parameter: Plant Line Value: WS
  misc_feature: MA Experiment 20000265 PARAMETER Experiment Name: At_Open_Flower_P Parameter: Tissue Value: Closed Flower vs. Whole Plant
  misc_feature: MA Experiment ID: 20000495 Result: Up-regulated in Transcription
  misc_feature: MA Experiment 20000495 PARAMETER Experiment Name: At_Guard_Cells_P Parameter: Harvest Date Value: 8/2/2002
  misc_feature: MA Experiment 20000495 PARAMETER Experiment Name: At_Guard_Cells_P Parameter: Organism Value: A. thaliana
  misc_feature: MA Experiment 20000495 PARAMETER Experiment Name: At_Guard_Cells_P Parameter: Tissue Value: Guard Cells vs. Leaves
  misc_feature: MA Experiment ID: 20000496 Result: Up-regulated in Transcription
  misc_feature: MA Experiment 20000496 PARAMETER Experiment Name: At_Guard_Cells_P Parameter: Harvest Date Value: 7/19/2002
  misc_feature: MA Experiment 20000496 PARAMETER Experiment Name: At_Guard_Cells_P Parameter: Organism Value: Canola
  misc_feature: MA Experiment 20000496 PARAMETER Experiment Name: At_Guard_Cells_P Parameter: Tissue Value: Guard Cells vs. Leaves
  misc_feature: MA Experiment ID: 20001247 Result: Up-regulated in Transcription
  misc_feature: MA Experiment 20001247 PARAMETER Experiment Name: At_Far-red-induction_P Parameter: Age (day) Value: 7
  misc_feature: MA Experiment 20001247 PARAMETER Experiment Name: At_Far-red-induction_P Parameter: Light Value: Far-red vs. White
  misc_feature: MA Experiment 20001247 PARAMETER Experiment Name: At_Far-red-induction_P Parameter: Organism Value: A. thaliana
  misc_feature: MA Experiment 20001247 PARAMETER Experiment Name: At_Far-red-induction_P Parameter: Plant Line Value: Columbia
  misc_feature: MA Experiment 20001247 PARAMETER Experiment Name: At_Far-red-induction_P Parameter: Timepoint (hr) Value: 1
  misc_feature: MA Experiment 20001247 PARAMETER Experiment Name: At_Far-red-induction_P Parameter: Tissue Value: Whole Plant
ctgtactttcacaagcttccaagctctcttatcattcactgatttttggttctcgagaaaaaagtgaagatttttgagattctctttcgatggattacgaacgaatcggaaagacccaggttactagtagcggcggcggattttctccggggaagttaaggagtatgcttcttctaggtgttgatagaaagaagaatgaagaagaagaatcaactcctacaatgagatctgggtctaatcaaattgatgaccctagggtttatgttgctagtggattagatgattgcaaagatgttgatgttgtgagtgagattactgattgttctacttcagggatagctagatcgattagtttgggtcttcaagagtattctgattatgataatgtgaatgagatcaagagtgtttctgcatcatctgtctttgagtttcaaaagactgagaaggaaaaagttaatcaaagaatgcctattagatcattctctaaaccagctccatctaaatgggatgatgctcagaaatggattgctagtcctacggctaaccgaccgaagactggacaggttcaggttccgggttcgaagaaagggcctagctttggtcgtcagtcttctatgaagattgttgaagttgctgaacatagagtggttgaagagcctgatacaaagagaatagatgtaagccaagtgaaaaaggatatgggaaacaagtttggtagctgggaagttgattcgtacactaccgtggattcatatgtcaaaccggttcttatggttgagaactctattgtagaatcagcaactgaagttaatctcagccgtcatgactcgtcagtcgcaactgcgtttgctcaaccgccttcaacggcaaggtctgtgtcaatgagagacatgggaactgaaatgactcctatagcgagccaagaaccttctagaaacgggacaccgattagggcaacaacgccaatacgaagtcctatatcttctgaaccttcaagtccaggcagacaagcatcagcttctcctatgagtaacaaggaactgtcagagaaagagcttcaaatgaaaactaggagagagataatggtgttgggtactcaacttggtaaatttaacattgctgcttgggctagcaaggaggatgaagataaagacgcatccacatcattaaagaccaaagcttctctacaaacttctaaaagtgtttctgaagctcgtgctacagcgtgggaggaagcggaaaaagctaagcacatggctaggttcagacgcgaagagatgaagattcaagcatgggagaatcatcagaaggcgaaatctgaagccgagatgaagaaaaccgaggttaaagttgagaggattaagggacgagcacaagaccggttgatgaagaaactcgctacaatcgagcgcaaagcagaggaaaagcgagcagcggctgaagcaaagaaggatcatcaggcagctaaaacagagaaacaagctgaacaaatccgaagaacaggcaaagtaccttcattgttgttctcttgctttagcttttgttcttaaatccaatcctattgtgaatgtgatgttgttaattctcaagaacacatctttctatcatcatttgtataataaaagctttgaaaaacttatttcttgtgatct

SEQ ID NO: 77672 - protein, 486 aa, Arabidopsis thaliana; identical to SEQ ID NO: 38047
  peptide (1)..(486): Ceres Seq. ID no. 12577131
  misc_feature (368)..(479): Pfam Name: Remorin, C-terminal region Pfam Description: Remorin, C-terminal region
  misc_feature (1)..(486): Homolog of NCBI NO: 18395321 NR Description: expressed protein; protein id: At2g02170.1, by cDNA: gi_14326557 [Arabidopsis thaliana]
  misc_feature (228)..(485): Homolog of NCBI NO: 34902218 NR Description: Unknown protein [Oryza sativa (japonica
  misc_feature (185)..(485): Homolog of NCBI NO: 15220725 NR Description: hypothetical protein; protein id: At1g30320.1
  misc_feature (226)..(485): Homolog of NCBI NO: 38344336 NR Description: OSJNBa0058K23.18 [Oryza sativa (japonica
  misc_feature (355)..(486): Homolog of NCBI NO: 18408804 NR Description: expressed protein; protein id: At1g67590.1, by cDNA: 10212. [Arabidopsis thaliana] F12A21.28 [Arabidopsis thaliana]
  misc_feature (355)..(486): Homolog of NCBI NO: 21536537 NR Description: unknown [Arabidopsis thaliana]
  misc_feature (355)..(486): Homolog of NCBI NO: 28393368 NR Description: unknown protein [Arabidopsis thaliana]
  misc_feature (263)..(481): Homolog of NCBI NO: 15220963 NR Description: hypothetical protein; protein id: At1g53860.1
  misc_feature (275)..(482): Homolog of NCBI NO: 15233068 NR Description: putative DNA-binding protein; protein id: supported by cDNA: 40796., supported by cDNA: gi_17104524
  misc_feature (254)..(471): Homolog of NCBI NO: 23928441 NR Description: hypothetical protein [Zea mays]

SEQ ID NO: 77673 - protein, 461 aa, Arabidopsis thaliana; identical to SEQ ID NO: 38048
  peptide (1)..(461): Ceres Seq. ID no. 12577132
  misc_feature (343)..(454): Pfam Name: Remorin, C-terminal region Pfam Description: Remorin, C-terminal region
  misc_feature (1)..(461): Homolog of NCBI NO: 18395321 NR Description: expressed protein; protein id: At2g02170.1, by cDNA: gi_14326557 [Arabidopsis thaliana]
  misc_feature (203)..(460): Homolog of NCBI NO: 34902218 NR Description: Unknown protein [Oryza sativa (japonica
  misc_feature (160)..(460): Homolog of NCBI NO: 15220725 NR Description: hypothetical protein; protein id: At1g30320.1
  misc_feature (201)..(460): Homolog of NCBI NO: 38344336 NR Description: OSJNBa0058K23.18 [Oryza sativa (japonica
  misc_feature (330)..(461): Homolog of NCBI NO: 18408804 NR Description: expressed protein; protein id: At1g67590.1, by cDNA: 10212. [Arabidopsis thaliana] F12A21.28 [Arabidopsis thaliana]
  misc_feature (330)..(461): Homolog of NCBI NO: 28393368 NR Description: unknown protein [Arabidopsis thaliana]
  misc_feature (330)..(461): Homolog of NCBI NO: 21536537 NR Description: unknown [Arabidopsis thaliana]
  misc_feature (238)..(456): Homolog of NCBI NO: 15220963 NR Description: hypothetical protein; protein id: At1g53860.1
  misc_feature (250)..(457): Homolog of NCBI NO: 15233068 NR Description: putative DNA-binding protein; protein id: supported by cDNA: 40796., supported by cDNA: gi_17104524
  misc_feature (229)..(446): Homolog of NCBI NO: 23928441 NR Description: hypothetical protein [Zea mays]

SEQ ID NO: 77674 - protein, 442 aa, Arabidopsis thaliana; identical to SEQ ID NO: 38049
  peptide (1)..(442): Ceres Seq. ID no. 12577133
  misc_feature (324)..(435): Pfam Name: Remorin, C-terminal region Pfam Description: Remorin, C-terminal region
  misc_feature (1)..(442): Homolog of NCBI NO: 18395321 NR Description: expressed protein; protein id: At2g02170.1, by cDNA: gi_14326557 [Arabidopsis thaliana]
  misc_feature (184)..(441): Homolog of NCBI NO: 34902218 NR Description: Unknown protein [Oryza sativa (japonica
  misc_feature (141)..(441): Homolog of NCBI NO: 15220725 NR Description: hypothetical protein; protein id: At1g30320.1
  misc_feature (182)..(441): Homolog of NCBI NO: 38344336 NR Description: OSJNBa0058K23.18 [Oryza sativa (japonica
  misc_feature (311)..(442): Homolog of NCBI NO: 18408804 NR Description: expressed protein; protein id: At1g67590.1, by cDNA: 10212. [Arabidopsis thaliana] F12A21.28 [Arabidopsis thaliana]
  misc_feature (311)..(442): Homolog of NCBI NO: 28393368 NR Description: unknown protein [Arabidopsis thaliana]
  misc_feature (311)..(442): Homolog of NCBI NO: 21536537 NR Description: unknown [Arabidopsis thaliana]
  misc_feature (219)..(437): Homolog of NCBI NO: 15220963 NR Description: hypothetical protein; protein id: At1g53860.1
  misc_feature (231)..(438): Homolog of NCBI NO: 15233068 NR Description: putative DNA-binding protein; protein id: supported by cDNA: 40796., supported by cDNA: gi_17104524
  misc_feature (210)..(427): Homolog of NCBI NO: 23928441 NR Description: hypothetical protein [Zea mays]

SEQ ID NO: 77675 - DNA, 2060 bp, Arabidopsis thaliana
  misc_feature (1)..(2060): Ceres Seq. ID no. 12577134
  misc_feature: MA Experiment ID: 108434 Result: Up-regulated in Transcription
  misc_feature: MA Experiment 108434 PARAMETER Experiment Name: At_Root_Tips_cDNA_P Parameter: Tissue Value: Root Tips
  misc_feature: MA Experiment ID: 108462 Result: Down-regulated in Transcription
  misc_feature: MA Experiment 108462 PARAMETER Experiment Name: At_Germinating_Seeds_cDNA_P Parameter: Age (day) Value: 2 vs. 0
  misc_feature: MA Experiment 108462 PARAMETER Experiment Name: At_Germinating_Seeds_cDNA_P Parameter: Tissue Value: Germinating Seeds
  misc_feature: MA Experiment ID: 108463 Result: Down-regulated in Transcription
  misc_feature: MA Experiment 108463 PARAMETER Experiment Name: At_Germinating_Seeds_cDNA_P Parameter: Age (day) Value: 3 vs. 0
  misc_feature: MA Experiment 108463 PARAMETER Experiment Name: At_Germinating_Seeds_cDNA_P Parameter: Tissue Value: Germinating Seeds
  misc_feature: MA Experiment ID: 108464 Result: Down-regulated in Transcription
  misc_feature: MA Experiment 108464 PARAMETER Experiment Name: At_Germinating_Seeds_cDNA_P Parameter: Age (day) Value: 4 vs. 0
  misc_feature: MA Experiment 108464 PARAMETER Experiment Name: At_Germinating_Seeds_cDNA_P Parameter: Tissue Value: Germinating Seeds
  misc_feature: MA Experiment ID: 108489 Result: Up-regulated in Transcription
  misc_feature: MA Experiment ID: 108561 Result: Down-regulated in Transcription
  misc_feature: MA Experiment 108561 PARAMETER Experiment Name: At_100uM_ABA_cDNA_P Parameter: Timepoint (hr) Value: 6
  misc_feature: MA Experiment 108561 PARAMETER Experiment Name: At_100uM_ABA_cDNA_P Parameter: Tissue Value: Aerial
  misc_feature: MA Experiment 108561 PARAMETER Experiment Name: At_100uM_ABA_cDNA_P Parameter: Treatment Value: 100uM ABA vs. No Treatment
  misc_feature: MA Experiment ID: 108573 Result: Down-regulated in Transcription
  misc_feature: MA Experiment 108573 PARAMETER Experiment Name: At_Drought_cDNA_P Parameter: Timepoint (hr) Value: 6
  misc_feature: MA Experiment 108573 PARAMETER Experiment Name: At_Drought_cDNA_P Parameter: Tissue Value: Aerial
  misc_feature: MA Experiment 108573 PARAMETER Experiment Name: At_Drought_cDNA_P Parameter: Treatment Value: Drought vs. No Drought
  misc_feature: MA Experiment ID: 108595 Result: Down-regulated in Transcription
  misc_feature: MA Experiment 108595 PARAMETER Experiment Name: At_Ler-pi_Ovule_cDNA_P Parameter: Plant Line Value: null
  misc_feature: MA Experiment ID: 108605 Result: Down-regulated in Transcription
  misc_feature: MA Experiment 108605 PARAMETER Experiment Name: At_100uM_ABA_cDNA_P Parameter: Timepoint (hr) Value: 6
  misc_feature: MA Experiment 108605 PARAMETER Experiment Name: At_100uM_ABA_cDNA_P Parameter: Tissue Value: Aerial
  misc_feature: MA Experiment 108605 PARAMETER Experiment Name: At_100uM_ABA_cDNA_P Parameter: Treatment Value: 100uM ABA vs. No Treatment
  misc_feature: MA Experiment ID: 108609 Result: Down-regulated in Transcription
  misc_feature: MA Experiment 108609 PARAMETER Experiment Name: At_100uM_ABA_cDNA_P Parameter: Timepoint (hr) Value: 24
  misc_feature: MA Experiment 108609 PARAMETER Experiment Name: At_100uM_ABA_cDNA_P Parameter: Tissue Value: Aerial
  misc_feature: MA Experiment 108609 PARAMETER Experiment Name: At_100uM_ABA_cDNA_P Parameter: Treatment Value: 100uM ABA vs. No Treatment
  misc_feature: MA Experiment ID: 20000069 Result: Down-regulated in Transcription
  misc_feature: MA Experiment 20000069 PARAMETER Experiment Name: At_100uM_ABA_Mutants_cDNA_P Parameter: Plant Line Value: CS23
  misc_feature: MA Experiment 20000069 PARAMETER Experiment Name: At_100uM_ABA_Mutants_cDNA_P Parameter: Timepoint (hr) Value: 6
  misc_feature: MA Experiment 20000069 PARAMETER Experiment Name: At_100uM_ABA_Mutants_cDNA_P Parameter: Tissue Value: Aerial
  misc_feature: MA Experiment 20000069 PARAMETER Experiment Name: At_100uM_ABA_Mutants_cDNA_P Parameter: Treatment Value: 100uM ABA vs. No Treatment
  misc_feature: MA Experiment ID: 20000070 Result: Down-regulated in Transcription
  misc_feature: MA Experiment 20000070 PARAMETER Experiment Name: At_100uM_ABA_Mutants_cDNA_P Parameter: Plant Line Value: CS24
  misc_feature: MA Experiment 20000070 PARAMETER Experiment Name: At_100uM_ABA_Mutants_cDNA_P Parameter: Timepoint (hr) Value: 6
  misc_feature: MA Experiment 20000070 PARAMETER Experiment Name: At_100uM_ABA_Mutants_cDNA_P Parameter: Tissue Value: Aerial
  misc_feature: MA Experiment 20000070 PARAMETER Experiment Name: At_100uM_ABA_Mutants_cDNA_P Parameter: Treatment Value: 100uM ABA vs. No Treatment
  misc_feature: MA Experiment ID: 20000071 Result: Down-regulated in Transcription
  misc_feature: MA Experiment 20000071 PARAMETER Experiment Name: At_100uM_ABA_Mutants_cDNA_P Parameter: Plant Line Value: CS8104
  misc_feature: MA Experiment 20000071 PARAMETER Experiment Name: At_100uM_ABA_Mutants_cDNA_P Parameter: Timepoint (hr) Value: 6
  misc_feature: MA Experiment 20000071 PARAMETER Experiment Name: At_100uM_ABA_Mutants_cDNA_P Parameter: Tissue Value: Aerial
  misc_feature: MA Experiment 20000071 PARAMETER Experiment Name: At_100uM_ABA_Mutants_cDNA_P Parameter: Treatment Value: 100uM ABA vs. No Treatment
  misc_feature: MA Experiment ID: 20000087 Result: Down-regulated in Transcription
  misc_feature: MA Experiment 20000087 PARAMETER Experiment Name: At_100uM_ABA_Mutants_cDNA_P Parameter: Plant Line Value: WS
  misc_feature: MA Experiment 20000087 PARAMETER Experiment Name: At_100uM_ABA_Mutants_cDNA_P Parameter: Timepoint (hr) Value: 6
  misc_feature: MA Experiment 20000087 PARAMETER Experiment Name: At_100uM_ABA_Mutants_cDNA_P Parameter: Tissue Value: Aerial
  misc_feature: MA Experiment 20000087 PARAMETER Experiment Name: At_100uM_ABA_Mutants_cDNA_P Parameter: Treatment Value: 100uM ABA vs. No Treatment
  misc_feature: MA Experiment ID: 20000093 Result: Up-regulated in Transcription
  misc_feature: MA Experiment 20000093 PARAMETER Experiment Name: At_42deg_Heat_cDNA_P Parameter: Temperature (deg C) Value: 42 vs. 22
  misc_feature: MA Experiment 20000093 PARAMETER Experiment Name: At_42deg_Heat_cDNA_P Parameter: Timepoint (hr) Value: 0.5
  misc_feature: MA Experiment 20000093 PARAMETER Experiment Name: At_42deg_Heat_cDNA_P Parameter: Tissue Value: Aerial
  misc_feature: MA Experiment ID: 20000117 Result: Down-regulated in Transcription
  misc_feature: MA Experiment 20000117 PARAMETER Experiment Name: At_100uM_ABA_Mutants_cDNA_P Parameter: Plant Line Value: Columbia
  misc_feature: MA Experiment 20000117 PARAMETER Experiment Name: At_100uM_ABA_Mutants_cDNA_P Parameter: Timepoint (hr) Value: 6
  misc_feature: MA Experiment 20000117 PARAMETER Experiment Name: At_100uM_ABA_Mutants_cDNA_P Parameter: Tissue Value: Aerial
  misc_feature: MA Experiment 20000117 PARAMETER Experiment Name: At_100uM_ABA_Mutants_cDNA_P Parameter: Treatment Value: 100uM ABA vs. No Treatment
  misc_feature: MA Experiment ID: 20000169 Result: Down-regulated in Transcription
  misc_feature: MA Experiment 20000169 PARAMETER Experiment Name: At_100uM_ABA_P Parameter: Age (day) Value: 14
  misc_feature: MA Experiment 20000169 PARAMETER Experiment Name: At_100uM_ABA_P Parameter: Organism Value: A. thaliana
  misc_feature: MA Experiment 20000169 PARAMETER Experiment Name: At_100uM_ABA_P Parameter: Plant Line Value: WS
  misc_feature: MA Experiment 20000169 PARAMETER Experiment Name: At_100uM_ABA_P Parameter: Timepoint (hr) Value: 6
  misc_feature: MA Experiment 20000169 PARAMETER Experiment Name: At_100uM_ABA_P Parameter: Tissue Value: Aerial
  misc_feature: MA Experiment 20000169 PARAMETER Experiment Name: At_100uM_ABA_P Parameter: Treatment Value: 100uM ABA vs. No Treatment
  misc_feature: MA Experiment ID: 20000185 Result: Down-regulated in Transcription
  misc_feature: MA Experiment 20000185 PARAMETER Experiment Name: At_Roots__P Parameter: Age (day) Value: 7 vs. 21
  misc_feature: MA Experiment 20000185 PARAMETER Experiment Name: At_Roots__P Parameter: Organism Value: A. thaliana
  misc_feature: MA Experiment 20000185 PARAMETER Experiment Name: At_Roots__P Parameter: Tissue Value: Roots vs. Whole Plant
  misc_feature: MA Experiment ID: 20000224 Result: Up-regulated in Transcription
  misc_feature: MA Experiment ID: 20000234 Result: Up-regulated in Transcription
  misc_feature: MA Experiment 20000234 PARAMETER Experiment Name: At_Siliques_P Parameter: Age (day) Value: 21
  misc_feature: MA Experiment 20000234 PARAMETER Experiment Name: At_Siliques_P Parameter: Organism Value: A. thaliana
  misc_feature: MA Experiment 20000234 PARAMETER Experiment Name: At_Siliques_P Parameter: Plant Line Value: WS
  misc_feature: MA Experiment 20000234 PARAMETER Experiment Name: At_Siliques_P Parameter: Tissue Value: Less Than 5mm Siliques vs. Whole Plant
  misc_feature: MA Experiment ID: 20000436 Result: Down-regulated in Transcription
  misc_feature: MA Experiment 20000436 PARAMETER Experiment Name: At_Drought_P Parameter: Age (day) Value: 7
  misc_feature: MA Experiment 20000436 PARAMETER Experiment Name: At_Drought_P Parameter: Organism Value: A. thaliana
  misc_feature: MA Experiment 20000436 PARAMETER Experiment Name: At_Drought_P Parameter: Plant Line Value: WS
  misc_feature: MA Experiment 20000436 PARAMETER Experiment Name: At_Drought_P Parameter: Timepoint (hr) Value: 12
  misc_feature: MA Experiment 20000436 PARAMETER Experiment Name: At_Drought_P Parameter: Tissue Value: Whole Plant
  misc_feature: MA Experiment 20000436 PARAMETER Experiment Name: At_Drought_P Parameter: Treatment Value: Drought vs. No Drought
  misc_feature: MA Experiment ID: 20000437 Result: Down-regulated in Transcription
  misc_feature: MA Experiment 20000437 PARAMETER Experiment Name: At_Drought_P Parameter: Age (day) Value: 8
  misc_feature: MA Experiment 20000437 PARAMETER Experiment Name: At_Drought_P Parameter: Organism Value: A. thaliana
  misc_feature: MA Experiment 20000437 PARAMETER Experiment Name: At_Drought_P Parameter: Plant Line Value: WS
  misc_feature: MA Experiment 20000437 PARAMETER Experiment Name: At_Drought_P Parameter: Timepoint (hr) Value: 24
  misc_feature: MA Experiment 20000437 PARAMETER Experiment Name: At_Drought_P Parameter: Tissue Value: Whole Plant
  misc_feature: MA Experiment 20000437 PARAMETER Experiment Name: At_Drought_P Parameter: Treatment Value: Drought vs. No Drought
  misc_feature: MA Experiment ID: 20000439 Result: Down-regulated in Transcription
  misc_feature: MA Experiment 20000439 PARAMETER Experiment Name: At_Roots__P Parameter: Age (day) Value: 14 vs. 21
  misc_feature: MA Experiment 20000439 PARAMETER Experiment Name: At_Roots__P Parameter: Organism Value: A. thaliana
  misc_feature: MA Experiment 20000439 PARAMETER Experiment Name: At_Roots__P Parameter: Tissue Value: Roots vs. Whole Plant
  misc_feature: MA Experiment ID: 20000453 Result: Down-regulated in Transcription
  misc_feature: MA Experiment 20000453 PARAMETER Experiment Name: At_100uM_ABA_P Parameter: Age (day) Value: 15
  misc_feature: MA Experiment 20000453 PARAMETER Experiment Name: At_100uM_ABA_P Parameter: Organism Value: A. thaliana
  misc_feature: MA Experiment 20000453 PARAMETER Experiment Name: At_100uM_ABA_P Parameter: Plant Line Value: WS
  misc_feature: MA Experiment 20000453 PARAMETER Experiment Name: At_100uM_ABA_P Parameter: Timepoint (hr) Value: 24
  misc_feature: MA Experiment 20000453 PARAMETER Experiment Name: At_100uM_ABA_P Parameter: Tissue Value: Aerial
  misc_feature: MA Experiment 20000453 PARAMETER Experiment Name: At_100uM_ABA_P Parameter: Treatment Value: 100uM ABA vs. No Treatment
  misc_feature: MA Experiment ID: 20000794 Result: Down-regulated in Transcription
  misc_feature: MA Experiment 20000794 PARAMETER Experiment Name: At_Petals_P Parameter: Age (day) Value: 23-25 days
  misc_feature: MA Experiment 20000794 PARAMETER Experiment Name: At_Petals_P Parameter: Plant Line Value: WS
  misc_feature: MA Experiment 20000794 PARAMETER Experiment Name: At_Petals_P Parameter: Tissue Value: Petals vs. Whole plant
  misc_feature: MA Experiment ID: 20001450 Result: Down-regulated in Transcription
  misc_feature: MA Experiment 20001450 PARAMETER Experiment Name: At_Far-red-induction_P Parameter: Age (day) Value: 7
  misc_feature: MA Experiment 20001450 PARAMETER Experiment Name: At_Far-red-induction_P Parameter: Light Value: Far-red vs. White
  misc_feature: MA Experiment 20001450 PARAMETER Experiment Name: At_Far-red-induction_P Parameter: Organism Value: A. thaliana
  misc_feature: MA Experiment 20001450 PARAMETER Experiment Name: At_Far-red-induction_P Parameter: Plant Line Value: Columbia
  misc_feature: MA Experiment 20001450 PARAMETER Experiment Name: At_Far-red-induction_P Parameter: Timepoint (hr) Value: 8
  misc_feature: MA Experiment 20001450 PARAMETER Experiment Name: At_Far-red-induction_P Parameter: Tissue Value: Whole Plant
  misc_feature: MA Experiment ID: 20001451 Result: Down-regulated in Transcription
  misc_feature: MA Experiment 20001451 PARAMETER Experiment Name: At_Far-red-induction_P Parameter: Age (day) Value: 7
  misc_feature: MA Experiment 20001451 PARAMETER Experiment Name: At_Far-red-induction_P Parameter: Light Value: Far-red vs. White
  misc_feature: MA Experiment 20001451 PARAMETER Experiment Name: At_Far-red-induction_P Parameter: Organism Value: A. thaliana
  misc_feature: MA Experiment 20001451 PARAMETER Experiment Name: At_Far-red-induction_P Parameter: Plant Line Value: Columbia
  misc_feature: MA Experiment 20001451 PARAMETER Experiment Name: At_Far-red-induction_P Parameter: Timepoint (hr) Value: 24
  misc_feature: MA Experiment 20001451 PARAMETER Experiment Name: At_Far-red-induction_P Parameter: Tissue Value: Whole Plant
  misc_feature: MA Experiment ID: 20001458 Result: Up-regulated in Transcription
  misc_feature: MA Experiment 20001458 PARAMETER Experiment Name: At_50mM_NH4NO3_L-to-H_P Parameter: Age (day) Value: Undefined
  misc_feature: MA Experiment 20001458 PARAMETER Experiment Name: At_50mM_NH4NO3_L-to-H_P Parameter: Organism Value: Undefined
  misc_feature: MA Experiment 20001458 PARAMETER Experiment Name: At_50mM_NH4NO3_L-to-H_P Parameter: Plant Line Value: Undefined
  misc_feature: MA Experiment 20001458 PARAMETER Experiment Name: At_50mM_NH4NO3_L-to-H_P Parameter: Timepoint (hr) Value: 2
  misc_feature: MA Experiment 20001458 PARAMETER Experiment Name: At_50mM_NH4NO3_L-to-H_P Parameter: Tissue Value: Siliques
  misc_feature: MA Experiment 20001458 PARAMETER Experiment Name: At_50mM_NH4NO3_L-to-H_P Parameter: Treatment Value: 50mM NH4NO3 vs. 100mM Manitol
  misc_feature: MA Experiment ID: 20001556 Result: Up-regulated in Transcription
  misc_feature: MA Experiment 20001556 PARAMETER Experiment Name: At_Drought_Soil_Dry_P Parameter: Age (day) Value: 26
  misc_feature: MA Experiment 20001556 PARAMETER Experiment Name: At_Drought_Soil_Dry_P Parameter: Organism Value: A. thaliana
  misc_feature: MA Experiment 20001556 PARAMETER Experiment Name: At_Drought_Soil_Dry_P Parameter: Plant Line Value: WS
  misc_feature: MA Experiment 20001556 PARAMETER Experiment Name: At_Drought_Soil_Dry_P Parameter: Post Timepoint (hr) Value: None
  misc_feature: MA Experiment 20001556 PARAMETER Experiment Name: At_Drought_Soil_Dry_P Parameter: Post-Treatment Value: None
  misc_feature: MA Experiment 20001556 PARAMETER Experiment Name: At_Drought_Soil_Dry_P Parameter: Timepoint (day) Value: 12
  misc_feature: MA Experiment 20001556 PARAMETER Experiment Name: At_Drought_Soil_Dry_P Parameter: Treatment Value: Drought vs. No Drought
  misc_feature: MA Experiment ID: 20001558 Result: Up-regulated in Transcription
  misc_feature: MA Experiment 20001558 PARAMETER Experiment Name: At_Drought_Soil_Dry_P Parameter: Age (day) Value: 27
  misc_feature: MA Experiment 20001558 PARAMETER Experiment Name: At_Drought_Soil_Dry_P Parameter: Organism Value: A. thaliana
  misc_feature: MA Experiment 20001558 PARAMETER Experiment Name: At_Drought_Soil_Dry_P Parameter: Plant Line Value: WS
  misc_feature: MA Experiment 20001558 PARAMETER Experiment Name: At_Drought_Soil_Dry_P Parameter: Post Timepoint (hr) Value: 6
  misc_feature: MA Experiment 20001558 PARAMETER Experiment Name: At_Drought_Soil_Dry_P Parameter: Post-Treatment Value: Re-Water vs. No Drought
  misc_feature: MA Experiment 20001558 PARAMETER Experiment Name: At_Drought_Soil_Dry_P Parameter: Timepoint (day) Value: 13
  misc_feature: MA Experiment 20001558 PARAMETER Experiment Name: At_Drought_Soil_Dry_P Parameter: Treatment Value: Drought vs. No Drought
  misc_feature: MA Experiment ID: 20001757 Result: Up-regulated in Transcription
  misc_feature: MA Experiment 20001757 PARAMETER Experiment Name: At_50mM_NH4NO3_L-to-H_P Parameter: Timepoint (hr) Value: 6
  misc_feature: MA Experiment 20001757 PARAMETER Experiment Name: At_50mM_NH4NO3_L-to-H_P Parameter: Tissue Value: Leaf
  misc_feature: MA Experiment 20001757 PARAMETER Experiment Name: At_50mM_NH4NO3_L-to-H_P Parameter: Treatment Value: 50mM NH4NO3 vs 100mM Mannitol
  misc_feature: MA Experiment ID: 20001905 Result: Down-regulated in Transcription
  misc_feature: MA Experiment 20001905 PARAMETER Experiment Name: At_Drought_Reproduction_P Parameter: Age (day) Value: 40
  misc_feature: MA Experiment 20001905 PARAMETER Experiment Name: At_Drought_Reproduction_P Parameter: Organism Value: A. thaliana
  misc_feature: MA Experiment 20001905 PARAMETER Experiment Name: At_Drought_Reproduction_P Parameter: Plant Line Value: WS
  misc_feature: MA Experiment 20001905 PARAMETER Experiment Name: At_Drought_Reproduction_P Parameter: Timepoint (day) Value: 10
  misc_feature: MA Experiment 20001905 PARAMETER Experiment Name: At_Drought_Reproduction_P Parameter: Tissue Value: Rosettes
  misc_feature: MA Experiment 20001905 PARAMETER Experiment Name: At_Drought_Reproduction_P Parameter: Treatment Value: Drought vs. No Drought
  misc_feature: MA Experiment ID: 20001906 Result: Down-regulated in Transcription
  misc_feature: MA Experiment 20001906 PARAMETER Experiment Name: At_Drought_Reproduction_P Parameter: Age (day) Value: 35
  misc_feature: MA Experiment 20001906 PARAMETER Experiment Name: At_Drought_Reproduction_P Parameter: Organism Value: A. thaliana
  misc_feature: MA Experiment 20001906 PARAMETER Experiment Name: At_Drought_Reproduction_P Parameter: Plant Line Value: WS
  misc_feature: MA Experiment 20001906 PARAMETER Experiment Name: At_Drought_Reproduction_P Parameter: Timepoint (day) Value: 5
  misc_feature: MA Experiment 20001906 PARAMETER Experiment Name: At_Drought_Reproduction_P Parameter: Tissue Value: Siliques
  misc_feature: MA Experiment 20001906 PARAMETER Experiment Name: At_Drought_Reproduction_P Parameter: Treatment Value: Drought vs. No Drought
acttcctttccttgcttcagctccccttttcttatccggaaaccaaaaacttccggtgataaaacctccttcgtcatctctctacttcttgctgaattttgtctgtctttgaagtggataaaatggcgtcaactttcactgccacatcttctattggttcaatggttgctccgaatggtcacaaatctgataagaaacttatcagcaagttgtcttcaagctcatttggaaggagacaaagtgtgtgtcctagacccagaagatccagttctgcaattgtgtgcgcagcaaaggaattacatttcaacaaagatgggactaccattaggagacttcaagctggtgtcaacaagctcgcagatcttgttggtgttacacttggacccaaaggacgaaatgttgttcttgagagcaagtatggatcaccacgaattgttaatgatggtgtgactgttgcaagagaggttgagttggaagacccggttgagaacattggcgctaagcttgtgaggcaagcggctgccaaaaccaatgacttggctggtgacggtacaacaacatctgttgttcttgcacaaggttttatcgctgagggtgtcaaggtggtagctgctggtgcaaaccctgttttgatcaccagaggtattgagaagacagcaaaggctttggttaccgagctcaagaaaatgtctaaggaggttgaagacagtgaacttgcagatgttgcagctgttagtgcgggtaacaacgacgaaattggaaatatgattgctgaagcaatgagcaaagtgggcaggaaaggtgtggtgacccttgaggagggtaaaagtgccgagaacaacctctacgtcgtagaaggaatgcaatttgaccgtggttatatctctccttactttgtgacagacagcgagaaaatgtccgtcgagttcgacaattgcaagttacttctcgttgacaagaaaattaccaatgcaagggatcttgttggtgttttggaggatgcaattagaggcggatacccaatattaattattgctgaagacattgaacaagaagctttagcgactcttgttgtaaacaagcttagaggtacactgaagatagcagctctcagagctccagggtttggagagcgcaagagccaataccttgatgatattgccattctaactggagcaactgtgatccgtgaggaagttggtctttcacttgacaaagctggaaaagaggttcttggtaatgcttcaaaggttgtcctcacaaaggagacctcgaccatagtgggtgatggaagcacacaggatgcagtgaaaaagcgtgttacacagattaaaaatcttattgagcaagcggagcaagattacgagaaggagaaactcaatgagagaattgcaaagctctctggtggagttgctgtgattcaggttggagcacaaactgagacagaactcaaagagaagaagttgagagttgaagatgctcttaatgcaacaaaggccgctgtcgaggaaggtattgttgttggtggtggttgcactctgcttcgtcttgcttccaaggttgatgccattaaagccacgcttgataatgatgaagaaaaggttggagcggatatagttaaaagagcactaagttaccccctaaaactaatcgccaagaatgctggtgttaatggaagtgtagttagcgagaaggtgctttccaacgataacgtgaaattcggttacaatgctgcaaccggcaagtacgaggatttgatggctgcaggaatcatcgatccaacaaaggttgtgagatgttgcttggaacacgcagcttcggttgcaaagactttcttgatgtcggactgcgttgttgttgagatcaaggaacctgaaccagttcccgtcggcaacccaatggacaactcaggatatggatactaagaggagataggctaatattgaaacggattactttagcttgcgagtgtaatgattttgaacaagagaatgtgtaatgtgaaactgaaattttgaattaatcatcatatgaataaatcatgattccctcaatgcttc

SEQ ID NO: 77676 - protein, 600 aa, Arabidopsis thaliana; identical to SEQ ID NO: 44357
  peptide (1)..(600): Ceres Seq. ID no. 12577135
  misc_feature (1)..(600): Homolog of NCBI NO: 15222729 NR Description: Rubisco subunit binding-protein beta subunit; id: At1g55490.1, supported by cDNA: gi_14423415, supported by gi_20148344 [Arabidopsis thaliana]
  misc_feature (1)..(600): Homolog of NCBI NO: 81601 NR Description: chaperonin 60 beta precursor - Arabidopsis
  misc_feature (1)..(588): Homolog of NCBI NO: 134104 NR Description: RuBisCO subunit binding-protein beta subunit,
  misc_feature (1)..(600): Homolog of NCBI NO: 15231255 NR Description: chaperonin 60 beta, putative; protein id: [Arabidopsis thaliana] >gi|9280299|dbj|BAB01754.1| GloEL protein;
  misc_feature (1)..(600): Homolog of NCBI NO: 30696748 NR Description: chaperonin, putative [Arabidopsis thaliana]
  misc_feature (1)..(600): Homolog of NCBI NO: 7443855 NR Description: probable chaperonin 60 beta chain precursor,
  misc_feature (1)..(600): Homolog of NCBI NO: 34897924 NR Description: ESTs C99033(E4350),C99032(E4350),D46006(S10372), correspond to a region of the predicted gene.~Similar to thaliana chromosome I BAC T5A14 genomic sequence; 60 KD
  misc_feature (1)..(599): Homolog of NCBI NO: 2506277 NR Description: RuBisCO subunit binding-protein beta subunit,
  misc_feature (102)..(600): Homolog of NCBI NO: 2493650 NR Description: RUBISCO SUBUNIT BINDING-PROTEIN BETA SUBUNIT (60
  misc_feature (55)..(592): Homolog of NCBI NO: 15222666 NR Description: chaperonin precursor, putative; protein id: [Arabidopsis thaliana] >gi|25300350|pir||E86388 probable

SEQ ID NO: 77677 - protein, 587 aa, Arabidopsis thaliana; identical to SEQ ID NO: 44358
  peptide (1)..(587): Ceres Seq. ID no. 12577136
  misc_feature (1)..(587): Homolog of NCBI NO: 15222729 NR Description: Rubisco subunit binding-protein beta subunit; id: At1g55490.1, supported by cDNA: gi_14423415, supported by gi_20148344 [Arabidopsis thaliana]
  misc_feature (1)..(587): Homolog of NCBI NO: 81601 NR Description: chaperonin 60 beta precursor - Arabidopsis
  misc_feature (1)..(575): Homolog of NCBI NO: 134104 NR Description: RuBisCO subunit binding-protein beta subunit,
  misc_feature (1)..(587): Homolog of NCBI NO: 15231255 NR Description: chaperonin 60 beta, putative; protein id: [Arabidopsis thaliana] >gi|9280299|dbj|BAB01754.1| GloEL protein;
  misc_feature (1)..(587): Homolog of NCBI NO: 30696748 NR Description: chaperonin, putative [Arabidopsis thaliana]
  misc_feature (1)..(587): Homolog of NCBI NO: 7443855 NR Description: probable chaperonin 60 beta chain precursor,
  misc_feature (1)..(587): Homolog of NCBI NO: 34897924 NR Description: ESTs C99033(E4350),C99032(E4350),D46006(S10372), correspond to a region of the predicted gene.~Similar to thaliana chromosome I BAC T5A14 genomic sequence; 60 KD
  misc_feature (1)..(586): Homolog of NCBI NO: 2506277 NR Description: RuBisCO subunit binding-protein beta subunit,
  misc_feature (89)..(587): Homolog of NCBI NO: 2493650 NR Description: RUBISCO SUBUNIT BINDING-PROTEIN BETA SUBUNIT (60
  misc_feature (42)..(579): Homolog of NCBI NO: 15222666 NR Description: chaperonin precursor, putative; protein id: [Arabidopsis thaliana] >gi|25300350|pir||E86388 probable

SEQ ID NO: 77678 - protein, 412 aa, Arabidopsis thaliana
  peptide (1)..(412): Ceres Seq. ID no. 12577137
  misc_feature (1)..(412): Homolog of NCBI NO: 15222729 NR Description: Rubisco subunit binding-protein beta subunit; id: At1g55490.1, supported by cDNA: gi_14423415, supported by gi_20148344 [Arabidopsis thaliana]
  misc_feature (1)..(412): Homolog of NCBI NO: 81601 NR Description: chaperonin 60 beta precursor - Arabidopsis
  misc_feature (1)..(400): Homolog of NCBI NO: 134104 NR Description: RuBisCO subunit binding-protein beta subunit,
  misc_feature (1)..(412): Homolog of NCBI NO: 15231255 NR Description: chaperonin 60 beta, putative; protein id: [Arabidopsis thaliana] >gi|9280299|dbj|BAB01754.1| GloEL protein;
  misc_feature (1)..(412): Homolog of NCBI NO: 30696748 NR Description: chaperonin, putative [Arabidopsis thaliana]
  misc_feature (1)..(412): Homolog of NCBI NO: 7443855 NR Description: probable chaperonin 60 beta chain precursor,
  misc_feature (1)..(412): Homolog of NCBI NO: 34897924 NR Description: ESTs C99033(E4350),C99032(E4350),D46006(S10372), correspond to a region of the predicted gene.~Similar to thaliana chromosome I BAC T5A14 genomic sequence; 60 KD
  misc_feature (1)..(411): Homolog of NCBI NO: 2506277 NR Description: RuBisCO subunit binding-protein beta subunit,
  misc_feature (1)..(412): Homolog of NCBI NO: 2493650 NR Description: RUBISCO SUBUNIT BINDING-PROTEIN BETA SUBUNIT (60
  misc_feature (1)..(404): Homolog of NCBI NO: 15222666 NR Description: chaperonin precursor, putative; protein id: [Arabidopsis thaliana] >gi|25300350|pir||E86388 probable
MSKEVEDSELADVAAVSAGNNDEIGNMIAEAMSKVGRKGVVTLEEGKSAENNLYVVEGMQFDRGYISPYFVTDSEKMSVEFDNCKLLLVDKKITNARDLVGVLEDAIRGGYPILIIAEDIEQEALATLVVNKLRGTLKIAALRAPGFGERKSQYLDDIAILTGATVIREEVGLSLDKAGKEVLGNASKVVLTKETSTIVGDGSTQDAVKKRVTQIKNLIEQAEQDYEKEKLNERIAKLSGGVAVIQVGAQTETELKEKKLRVEDALNATKAAVEEGIVVGGGCTLLRLASKVDAIKATLDNDEEKVGADIVKRALSYPLKLIAKNAGVNGSVVSEKVLSNDNVKFGYNAATGKYEDLMAAGIIDPTKVVRCCLEHAASVAKTFLMSDCVVVEIKEPEPVPVGNPMDNSGYGY

SEQ ID NO: 77679 - DNA, 966 bp, Arabidopsis thaliana
  misc_feature (1)..(966): Ceres Seq. ID no. 12577142
  misc_feature: MA Experiment ID: 108595 Result: Up-regulated in Transcription
  misc_feature: MA Experiment 108595 PARAMETER Experiment Name: At_Ler-pi_Ovule_cDNA_P Parameter: Plant Line Value: null
  misc_feature: MA Experiment ID: 20000179 Result: Up-regulated in Transcription
  misc_feature: MA Experiment 20000179 PARAMETER Experiment Name: At_Germinating_Seeds_P Parameter: Age (hr) Value: 6 vs. 0
  misc_feature: MA Experiment 20000179 PARAMETER Experiment Name: At_Germinating_Seeds_P Parameter: Tissue Value: Germinating Seeds
  misc_feature: MA Experiment ID: 20000180 Result: Up-regulated in Transcription
  misc_feature: MA Experiment 20000180 PARAMETER Experiment Name: At_Germinating_Seeds_P Parameter: Age (hr) Value: 24 vs. 0
  misc_feature: MA Experiment 20000180 PARAMETER Experiment Name: At_Germinating_Seeds_P Parameter: Tissue Value: Germinating Seeds
  misc_feature: MA Experiment ID: 20000227 Result: Up-regulated in Transcription
  misc_feature: MA Experiment 20000227 PARAMETER Experiment Name: At_Root-Tips-vs-Tops_P Parameter: Tissue Value: Root Tips vs. Root Tops
  misc_feature: MA Experiment ID: 20000234 Result: Up-regulated in Transcription
  misc_feature: MA Experiment 20000234 PARAMETER Experiment Name: At_Siliques_P Parameter: Age (day) Value: 21
  misc_feature: MA Experiment 20000234 PARAMETER Experiment Name: At_Siliques_P Parameter: Organism Value: A. thaliana
  misc_feature: MA Experiment 20000234 PARAMETER Experiment Name: At_Siliques_P Parameter: Plant Line Value: WS
  misc_feature: MA Experiment 20000234 PARAMETER Experiment Name: At_Siliques_P Parameter: Tissue Value: Less Than 5mm Siliques vs. Whole Plant
  misc_feature: MA Experiment ID: 20000496 Result: Up-regulated in Transcription
  misc_feature: MA Experiment 20000496 PARAMETER Experiment Name: At_Guard_Cells_P Parameter: Harvest Date Value: 7/19/2002
  misc_feature: MA Experiment 20000496 PARAMETER Experiment Name: At_Guard_Cells_P Parameter: Organism Value: Canola
  misc_feature: MA Experiment 20000496 PARAMETER Experiment Name: At_Guard_Cells_P Parameter: Tissue Value: Guard Cells vs. Leaves
  misc_feature: MA Experiment ID: 20000573 Result: Down-regulated in Transcription
  misc_feature: MA Experiment 20000573 PARAMETER Experiment Name: At_100uM_ABA_Mutants__P Parameter: Organism Value: A. thaliana
  misc_feature: MA Experiment 20000573 PARAMETER Experiment Name: At_100uM_ABA_Mutants__P Parameter: Plant Line Value: CS22 vs. Ler wt
  misc_feature: MA Experiment 20000573 PARAMETER Experiment Name: At_100uM_ABA_Mutants__P Parameter: Timepoint (hr) Value: N/A
  misc_feature: MA Experiment 20000573 PARAMETER Experiment Name: At_100uM_ABA_Mutants__P Parameter: Tissue Value: Whole Plant
  misc_feature: MA Experiment 20000573 PARAMETER Experiment Name: At_100uM_ABA_Mutants__P Parameter: Treatment Value: None
  misc_feature: MA Experiment ID: 20000574 Result: Down-regulated in Transcription
  misc_feature: MA Experiment 20000574 PARAMETER Experiment Name: At_100uM_ABA_Mutants__P Parameter: Organism Value: A. thaliana
  misc_feature: MA Experiment 20000574 PARAMETER Experiment Name: At_100uM_ABA_Mutants__P Parameter: Plant Line Value: CS23 vs. Ler wt
  misc_feature: MA Experiment 20000574 PARAMETER Experiment Name: At_100uM_ABA_Mutants__P Parameter: Timepoint (hr) Value: N/A
  misc_feature: MA Experiment 20000574 PARAMETER Experiment Name: At_100uM_ABA_Mutants__P Parameter: Tissue Value: Whole Plant
  misc_feature: MA Experiment 20000574 PARAMETER Experiment Name: At_100uM_ABA_Mutants__P Parameter: Treatment Value: None
  misc_feature: MA Experiment ID: 20001248 Result: Down-regulated in Transcription
  misc_feature: MA Experiment 20001248 PARAMETER Experiment Name: At_Far-red-induction_P Parameter: Age (day) Value: 7
  misc_feature: MA Experiment 20001248 PARAMETER Experiment Name: At_Far-red-induction_P Parameter: Light Value: Far-red vs. White
  misc_feature: MA Experiment 20001248 PARAMETER Experiment Name: At_Far-red-induction_P Parameter: Organism Value: A. thaliana
  misc_feature: MA Experiment 20001248 PARAMETER Experiment Name: At_Far-red-induction_P Parameter: Plant Line Value: Columbia
  misc_feature: MA Experiment 20001248 PARAMETER Experiment Name: At_Far-red-induction_P Parameter: Timepoint (hr) Value: 4
  misc_feature: MA Experiment 20001248 PARAMETER Experiment Name: At_Far-red-induction_P Parameter: Tissue Value: Whole Plant
  misc_feature: MA Experiment ID: 20001450 Result: Down-regulated in Transcription
  misc_feature: MA Experiment 20001450 PARAMETER Experiment Name: At_Far-red-induction_P Parameter: Age (day) Value: 7
  misc_feature: MA Experiment 20001450 PARAMETER Experiment Name: At_Far-red-induction_P Parameter: Light Value: Far-red vs. White
  misc_feature: MA Experiment 20001450 PARAMETER Experiment Name: At_Far-red-induction_P Parameter: Organism Value: A. thaliana
  misc_feature: MA Experiment 20001450 PARAMETER Experiment Name: At_Far-red-induction_P Parameter: Plant Line Value: Columbia
  misc_feature: MA Experiment 20001450 PARAMETER Experiment Name: At_Far-red-induction_P Parameter: Timepoint (hr) Value: 8
  misc_feature: MA Experiment 20001450 PARAMETER Experiment Name: At_Far-red-induction_P Parameter: Tissue Value: Whole Plant
  misc_feature: MA Experiment ID: 20001451 Result: Down-regulated in Transcription
  misc_feature: MA Experiment 20001451 PARAMETER Experiment Name: At_Far-red-induction_P Parameter: Age (day) Value: 7
  misc_feature: MA Experiment 20001451 PARAMETER Experiment Name: At_Far-red-induction_P Parameter: Light Value: Far-red vs. White
  misc_feature: MA Experiment 20001451 PARAMETER Experiment Name: At_Far-red-induction_P Parameter: Organism Value: A. thaliana
  misc_feature: MA Experiment 20001451 PARAMETER Experiment Name: At_Far-red-induction_P Parameter: Plant Line Value: Columbia
  misc_feature: MA Experiment 20001451 PARAMETER Experiment Name: At_Far-red-induction_P Parameter: Timepoint (hr) Value: 24
  misc_feature: MA Experiment 20001451 PARAMETER Experiment Name: At_Far-red-induction_P Parameter: Tissue Value: Whole Plant
ccattctccacattttccaaggcttcagtttcacttcatcacactctctgcaaaaaaacaaaaatgagctctcaaatctgcagatctgcttccaaagcagccaaatctcttctctcttcagctaaaaatgctcgcttcttctctgaaggacgagccattggtgctgcggcagcggtttcggcgtcaggaaaaattcctttgtatgcatctaactttgcaagatcatcaggttctggtgttgcttctaagagttggatcactggactcttagctcttcctgctgcagcttatatgattcaagatcaagaggttcttgctgctgagatggaacgaacttttattgctatcaagcctgatggtgtgcaaagaggactgatatcagagatcatttctcgattcgaacgcaagggattcaagctagttggtatcaaagtcattgttccttctaaagatttcgcacaaaagcattaccatgatcttaaggaaagacctttcttcaatggtttgtgtgacttccttagctctggtcctgttattgccatggtctgggaaggagatggtgtgatcagatacggacgtaaactgattggagccactgatcctcagaaatctgagcctggaacaatccgaggagatcttgcagttactgttggcaggaacataatccatggaagtgatggaccagagactgcaaaggatgagatcagtctgtggtttaagcctcaagaacttgtttcttacactagtaactctgagaagtggctctatggtgacaactaaatccctcttcctcttgtcttttgaaatcaaatcacattggtttttcttttcttttcttacccatacaataaaaacaagaaacagttgttacggatacaaacacattccgggttttgatttttccccggtgaactcagtaaacagagcataagcaataagtatgggatgtttgaatctatattgttc

SEQ ID NO: 77680 - protein, 259 aa, Arabidopsis thaliana
  peptide (1)..(259): Ceres Seq. ID no. 12577143
  misc_feature (110)..(247): Pfam Name: Nucleoside diphosphate kinase Pfam Description: Nucleoside diphosphate kinase
  misc_feature (22)..(259): Homolog of NCBI NO: 15237018 NR Description: nucleoside diphosphate kinase 3 (ndpk3); protein At4g11010.1, supported by cDNA: gi_14334559, supported by cDNA:
  misc_feature (22)..(259): Homolog of NCBI NO: 19744167 NR Description: NDPK III [Brassica rapa]
  misc_feature (22)..(259): Homolog of NCBI NO: 18416233 NR Description: expressed protein; protein id: At4g23900.1, by cDNA: 38500. [Arabidopsis thaliana] >gi|7434630|pir||T08909
  misc_feature (22)..(259): Homolog of NCBI NO: 21593387 NR Description: nucleoside diphosphate kinase 3 (ndpk3)
  misc_feature (22)..(259): Homolog of NCBI NO: 6435320 NR Description: nucleoside diphosphate kinase [Pisum sativum]
  misc_feature (64)..(259): Homolog of NCBI NO: 8272416 NR Description: nucleoside diphosphate kinase 3 [Brassica rapa]
  misc_feature (22)..(259): Homolog of NCBI NO: 19699051 NR Description: nucleoside diphosphate kinase III [Spinacia
  misc_feature (22)..(257): Homolog of NCBI NO: 20218817 NR Description: putative nucleoside diphosphate kinase [Pinus
  misc_feature (107)..(259): Homolog of NCBI NO: 6225754 NR Description: NUCLEOSIDE DIPHOSPHATE KINASE III (NDK III) (NDP
  misc_feature (107)..(256): Homolog of NCBI NO: 30584391 NR Description: Homo sapiens non-metastatic cells 2, protein
PFSTFSKASVSLHHTLCKKTKMSSQICRSASKAAKSLLSSAKNARFFSEGRAIGAAAAVSASGKIPLYASNFARSSGSGVASKSWITGLLALPAAAYMIQDQEVLAAEMERTFIAIKPDGVQRGLISEIISRFERKGFKLVGIKVIVPSKDFAQKHYHDLKERPFFNGLCDFLSSGPVIAMVWEGDGVIRYGRKLIGATDPQKSEPGTIRGDLAVTVGRNIIHGSDGPETAKDEISLWFKPQELVSYTSNSEKWLYGDN

SEQ ID NO: 77681 - protein, 238 aa, Arabidopsis thaliana; identical to SEQ ID NO: 23294
  peptide (1)..(238): Ceres Seq. ID no. 12577144
  misc_feature (89)..(226): Pfam Name: Nucleoside diphosphate kinase Pfam Description: Nucleoside diphosphate kinase
  misc_feature (1)..(238): Homolog of NCBI NO: 15237018 NR Description: nucleoside diphosphate kinase 3 (ndpk3); protein At4g11010.1, supported by cDNA: gi_14334559, supported by cDNA:
  misc_feature (1)..(238): Homolog of NCBI NO: 19744167 NR Description: NDPK III [Brassica rapa]
  misc_feature (1)..(238): Homolog of NCBI NO: 18416233 NR Description: expressed protein; protein id: At4g23900.1, by cDNA: 38500. [Arabidopsis thaliana] >gi|7434630|pir||T08909
  misc_feature (1)..(238): Homolog of NCBI NO: 21593387 NR Description: nucleoside diphosphate kinase 3 (ndpk3)
  misc_feature (1)..(238): Homolog of NCBI NO: 6435320 NR Description: nucleoside diphosphate kinase [Pisum sativum]
  misc_feature (43)..(238): Homolog of NCBI NO: 8272416 NR Description: nucleoside diphosphate kinase 3 [Brassica rapa]
  misc_feature (1)..(238): Homolog of NCBI NO: 19699051 NR Description: nucleoside diphosphate kinase III [Spinacia
  misc_feature (1)..(236): Homolog of NCBI NO: 20218817 NR Description: putative nucleoside diphosphate kinase [Pinus
  misc_feature (86)..(238): Homolog of NCBI NO: 6225754 NR Description: NUCLEOSIDE DIPHOSPHATE KINASE III (NDK III) (NDP
  misc_feature (86)..(235): Homolog of NCBI NO: 30584391 NR Description: Homo sapiens non-metastatic cells 2, protein

SEQ ID NO: 77682 - protein, 162 aa, Arabidopsis thaliana; identical to SEQ ID NO: 23295
  peptide (1)..(162): Ceres Seq. ID no. 12577145
  misc_feature (13)..(150): Pfam Name: Nucleoside diphosphate kinase Pfam Description: Nucleoside diphosphate kinase
  misc_feature (1)..(162): Homolog of NCBI NO: 15237018 NR Description: nucleoside diphosphate kinase 3 (ndpk3); protein At4g11010.1, supported by cDNA: gi_14334559, supported by cDNA:
  misc_feature (1)..(162): Homolog of NCBI NO: 19744167 NR Description: NDPK III [Brassica rapa]
  misc_feature (1)..(162): Homolog of NCBI NO: 18416233 NR Description: expressed protein; protein id: At4g23900.1, by cDNA: 38500. [Arabidopsis thaliana] >gi|7434630|pir||T08909
  misc_feature (1)..(162): Homolog of NCBI NO: 21593387 NR Description: nucleoside diphosphate kinase 3 (ndpk3)
  misc_feature (1)..(162): Homolog of NCBI NO: 6435320 NR Description: nucleoside diphosphate kinase [Pisum sativum]
  misc_feature (1)..(162): Homolog of NCBI NO: 8272416 NR Description: nucleoside diphosphate kinase 3 [Brassica rapa]
  misc_feature (1)..(162): Homolog of NCBI NO: 19699051 NR Description: nucleoside diphosphate kinase III [Spinacia
  misc_feature (1)..(160): Homolog of NCBI NO: 20218817 NR Description: putative nucleoside diphosphate kinase [Pinus
  misc_feature (10)..(162): Homolog of NCBI NO: 6225754 NR Description: NUCLEOSIDE DIPHOSPHATE KINASE III (NDK III) (NDP
  misc_feature (10)..(159): Homolog of NCBI NO: 30584391 NR Description: Homo sapiens non-metastatic cells 2, protein

SEQ ID NO: 77683 - DNA, 1787 bp, Arabidopsis thaliana
  misc_feature (1)..(1787): Ceres Seq. ID no. 12577160
  misc_feature: MA Experiment ID: 20000234 Result: Up-regulated in Transcription
  misc_feature: MA Experiment 20000234 PARAMETER Experiment Name: At_Siliques_P Parameter: Age (day) Value: 21
  misc_feature: MA Experiment 20000234 PARAMETER Experiment Name: At_Siliques_P Parameter: Organism Value: A. thaliana
  misc_feature: MA Experiment 20000234 PARAMETER Experiment Name: At_Siliques_P Parameter: Plant Line Value: WS
  misc_feature: MA Experiment 20000234 PARAMETER Experiment Name: At_Siliques_P Parameter: Tissue Value: Less Than 5mm Siliques vs. Whole Plant
  misc_feature: MA Experiment ID: 20000265 Result: Up-regulated in Transcription
  misc_feature: MA Experiment 20000265 PARAMETER Experiment Name: At_Open_Flower_P Parameter: Age (day) Value: 21
  misc_feature: MA Experiment 20000265 PARAMETER Experiment Name: At_Open_Flower_P Parameter: Plant Line Value: WS
  misc_feature: MA Experiment 20000265 PARAMETER Experiment Name: At_Open_Flower_P Parameter: Tissue Value: Closed Flower vs. Whole Plant
  misc_feature: MA Experiment ID: 20000437 Result: Down-regulated in Transcription
  misc_feature: MA Experiment 20000437 PARAMETER Experiment Name: At_Drought_P Parameter: Age (day) Value: 8
  misc_feature: MA Experiment 20000437 PARAMETER Experiment Name: At_Drought_P Parameter: Organism Value: A. thaliana
  misc_feature: MA Experiment 20000437 PARAMETER Experiment Name: At_Drought_P Parameter: Plant Line Value: WS
  misc_feature: MA Experiment 20000437 PARAMETER Experiment Name: At_Drought_P Parameter: Timepoint (hr) Value: 24
  misc_feature: MA Experiment 20000437 PARAMETER Experiment Name: At_Drought_P Parameter: Tissue Value: Whole Plant
  misc_feature: MA Experiment 20000437 PARAMETER Experiment Name: At_Drought_P Parameter: Treatment Value: Drought vs. No Drought
  misc_feature: MA Experiment ID: 20000495 Result: Up-regulated in Transcription
  misc_feature: MA Experiment 20000495 PARAMETER Experiment Name: At_Guard_Cells_P Parameter: Harvest Date Value: 8/2/2002
  misc_feature: MA Experiment 20000495 PARAMETER Experiment Name: At_Guard_Cells_P Parameter: Organism Value: A. thaliana
  misc_feature: MA Experiment 20000495 PARAMETER Experiment Name: At_Guard_Cells_P Parameter: Tissue Value: Guard Cells vs. Leaves
  misc_feature: MA Experiment ID: 20000794 Result: Down-regulated in Transcription
  misc_feature: MA Experiment 20000794 PARAMETER Experiment Name: At_Petals_P Parameter: Age (day) Value: 23-25 days
  misc_feature: MA Experiment 20000794 PARAMETER Experiment Name: At_Petals_P Parameter: Plant Line Value: WS
  misc_feature: MA Experiment 20000794 PARAMETER Experiment Name: At_Petals_P Parameter: Tissue Value: Petals vs. Whole plant
  misc_feature: MA Experiment ID: 20001757 Result: Up-regulated in Transcription
  misc_feature: MA Experiment 20001757 PARAMETER Experiment Name: At_50mM_NH4NO3_L-to-H_P Parameter: Timepoint (hr) Value: 6
  misc_feature: MA Experiment 20001757 PARAMETER Experiment Name: At_50mM_NH4NO3_L-to-H_P Parameter: Tissue Value: Leaf
  misc_feature: MA Experiment 20001757 PARAMETER Experiment Name: At_50mM_NH4NO3_L-to-H_P Parameter: Treatment Value: 50mM NH4NO3 vs 100mM Mannitol
ctgatctgaattctcgccgagtgaatctagaaccaggtttaaggttttcaagcactctgtttccaatgctgcttccgagatggtttgcagaagcgttgttgctcctactttcaattcttgcctgttcaaacgctgcatttatcggtgtaaacattggcactgatctcaccaacatgccaccgccttcagacattgtaacacttctcaaatcacaacaaatcacacacgtccgtctctatgatgctaatagccatatgctcaaagcatttgccaacactagcatcgaagttatggtcggtgtaaccaatgaagaaatcctcaaaatcggacggtttccttcagctgcagctgcttgggttaacaaaaacgtcgctgcttatattccttcaactaatataaccgccattgctgttggtagtgaggttctcaccacgattcctcacgtggcgccgattctcgcctctgctcttaacaacattcacaaggctcttgtggcttccaatctcaactttaaggtcaaagtctccagccctatgtctatggatataatgcctaaaccgtttcctccatctacatctacctttagcccgtcgtggaacaccacggtttaccagcttcttcagtttttgaagaacactggttcctttttcatgttaaacgcgtatccttactacggttacacaaccgctaatgggattttcccgcttgattacgctttgttcaagcagctttctccggtgaagcagattgttgatcccaacacgcttttacattacaacagcatgtttgatgctatggttgatgctgcttactactccatggaagctttgaatttctccaagattcctgttgtagtcacggaaacaggctggccttcgtctggtggaagcgatgaagcggctgcaacagtcgctaatgcggagacattcaacactaacttgatcaagagagtgctgaacaactcaggtcctcctagtcaaccagacataccgataaacacttacatctacgagctgtacaatgaagacaagcggtcaggaccagtctctgaaagaaactgggggattttgtttccaaatgggacctcggtttaccctctgagtttgagtggtggctctagctccgcagctctaaacggttcatcgatgttctgcgtggctaaagcagatgctgatgatgataagttggttgacggtttgaattgggcgtgtggtcaaggccgagctaactgcgctgccattcaaccgggccaaccttgctacctccctaacgatgttaagagccatgcttcttttgctttcaatgactattaccagaagatgaaaagtgcaggtggaacttgtgactttgatggtacggctatcactacgactagagatcctagctatagaacatgtgcatatacgggaagcttaaacgcaaacgctactaatggaaactttcctccggatgcgttaggacccgcaagtccattgggaggaaacgcaaacgcacgtatcatctttagctaccatcttcccatattggcaccgttagctctcactctactacaactgttgcttcagcatgaccgccttttgtagaacgtttgccaaaaagcggttttgtagtaaccggggaagtctacctgtggcttggattggatttcttacggttaccggtagttactgtgtactttgtttttagtgtaagtgtaactagagactaaagagggctcacaagttcccattcttttttttgtcttcatctttgaactaaaatattcgaattagagtgatttaaatttc

SEQ ID NO: 77684 - protein, 526 aa, Arabidopsis thaliana
  peptide (1)..(526): Ceres Seq. ID no. 12577161
  misc_feature (58)..(368): Pfam Name: Glycosyl hydrolases family 17 Pfam Description: Glycosyl hydrolases family 17
  misc_feature (22)..(526): Homolog of NCBI NO: 15231273 NR Description: glycosyl hydrolase family 17; protein id: supported by cDNA: gi_14334497, supported by cDNA: gi_17104804
  misc_feature (58)..(526): Homolog of NCBI NO: 9280308 NR Description: beta-1,3-glucanase-like protein [Arabidopsis
  misc_feature (32)..(468): Homolog of NCBI NO: 34393509 NR Description: putative elicitor inducible beta-1,3-glucanase
  misc_feature (31)..(520): Homolog of NCBI NO: 18379267 NR Description: glycosyl hydrolase family 17 protein id: At2g01630.1, supported by cDNA: 154469. [Arabidopsis
  misc_feature (31)..(461): Homolog of NCBI NO: 25410916 NR Description: probable beta-1,3-glucanase [imported] -
  misc_feature (27)..(519): Homolog of NCBI NO: 22748323 NR Description: Putative beta-1,3-glucanase [Oryza sativa
  misc_feature (46)..(498): Homolog of NCBI NO: 15220923 NR Description: glycosyl hydrolase family 17; protein id:
  misc_feature (46)..(461): Homolog of NCBI NO: 25402689 NR Description: hypothetical protein [imported] - Arabidopsis
  misc_feature (58)..(461): Homolog of NCBI NO: 15219603 NR Description: glycosyl hydrolase family 17; protein id: [Arabidopsis thaliana] >gi|25404601|pir||E96687 hypothetical
  misc_feature (42)..(499): Homolog of NCBI NO: 34394648 NR Description: putative beta-1,3-glucanase [Oryza sativa
DLNSRRVNLEPGLRFSSTLFPMLLPRWFAEALLLLLSILACSNAAFIGVNIGTDLTNMPPPSDIVTLLKSQQITHVRLYDANSHMLKAFANTSIEVMVGVTNEEILKIGRFPSAAAAWVNKNVAAYIPSTNITAIAVGSEVLTTIPHVAPILASALNNIHKALVASNLNFKVKVSSPMSMDIMPKPFPPSTSTFSPSWNTTVYQLLQFLKNTGSFFMLNAYPYYGYTTANGIFPLDYALFKQLSPVKQIVDPNTLLHYNSMFDAMVDAAYYSMEALNFSKIPVVVTETGWPSSGGSDEAAATVANAETFNTNLIKRVLNNSGPPSQPDIPINTYIYELYNEDKRSGPVSERNWGILFPNGTSVYPLSLSGGSSSAALNGSSMFCVAKADADDDKLVDGLNWACGQGRANCAAIQPGQPCYLPNDVKSHASFAFNDYYQKMKSAGGTCDFDGTAITTTRDPSYRTCAYTGSLNANATNGNFPPDALGPASPLGGNANARIIFSYHLPILAPLALTLLQLLLQHDRLL

SEQ ID NO: 77685 - protein, 505 aa, Arabidopsis thaliana
  peptide (1)..(505): Ceres Seq. ID no. 12577162
  misc_feature (37)..(347): Pfam Name: Glycosyl hydrolases family 17 Pfam Description: Glycosyl hydrolases family 17
  misc_feature (1)..(505): Homolog of NCBI NO: 15231273 NR Description: glycosyl hydrolase family 17; protein id: supported by cDNA: gi_14334497, supported by cDNA: gi_17104804
  misc_feature (37)..(505): Homolog of NCBI NO: 9280308 NR Description: beta-1,3-glucanase-like protein [Arabidopsis
  misc_feature (11)..(447): Homolog of NCBI NO: 34393509 NR Description: putative elicitor inducible beta-1,3-glucanase
  misc_feature (10)..(499): Homolog of NCBI NO: 18379267 NR Description: glycosyl hydrolase family 17 protein id: At2g01630.1, supported by cDNA: 154469. [Arabidopsis
  misc_feature (10)..(440): Homolog of NCBI NO: 25410916 NR Description: probable beta-1,3-glucanase [imported] -
  misc_feature (6)..(498): Homolog of NCBI NO: 22748323 NR Description: Putative beta-1,3-glucanase [Oryza sativa
  misc_feature (25)..(477): Homolog of NCBI NO: 15220923 NR Description: glycosyl hydrolase family 17; protein id:
  misc_feature (25)..(440): Homolog of NCBI NO: 25402689 NR Description: hypothetical protein [imported] - Arabidopsis
  misc_feature (37)..(440): Homolog of NCBI NO: 15219603 NR Description: glycosyl hydrolase family 17; protein id: [Arabidopsis thaliana] >gi|25404601|pir||E96687 hypothetical
  misc_feature (21)..(478): Homolog of NCBI NO: 34394648 NR Description: putative beta-1,3-glucanase [Oryza sativa
MLLPRWFAEALLLLLSILACSNAAFIGVNIGTDLTNMPPPSDIVTLLKSQQITHVRLYDANSHMLKAFANTSIEVMVGVTNEEILKIGRFPSAAAAWVNKNVAAYIPSTNITAIAVGSEVLTTIPHVAPILASALNNIHKALVASNLNFKVKVSSPMSMDIMPKPFPPSTSTFSPSWNTTVYQLLQFLKNTGSFFMLNAYPYYGYTTANGIFPLDYALFKQLSPVKQIVDPNTLLHYNSMFDAMVDAAYYSMEALNFSKIPVVVTETGWPSSGGSDEAAATVANAETFNTNLIKRVLNNSGPPSQPDIPINTYIYELYNEDKRSGPVSERNWGILFPNGTSVYPLSLSGGSSSAALNGSSMFCVAKADADDDKLVDGLNWACGQGRANCAAIQPGQPCYLPNDVKSHASFAFNDYYQKMKSAGGTCDFDGTAITTTRDPSYRTCAYTGSLNANATNGNFPPDALGPASPLGGNANARIIFSYHLPILAPLALTLLQLLLQHDRLL

SEQ ID NO: 77686 - protein, 469 aa, Arabidopsis thaliana
  peptide (1)..(469): Ceres Seq. ID no. 12577163
  misc_feature (1)..(311): Pfam Name: Glycosyl hydrolases family 17 Pfam Description: Glycosyl hydrolases family 17
  misc_feature (1)..(469): Homolog of NCBI NO: 15231273 NR Description: glycosyl hydrolase family 17; protein id: supported by cDNA: gi_14334497, supported by cDNA: gi_17104804
  misc_feature (1)..(469): Homolog of NCBI NO: 9280308 NR Description: beta-1,3-glucanase-like protein [Arabidopsis
  misc_feature (1)..(411): Homolog of NCBI NO: 34393509 NR Description: putative elicitor inducible beta-1,3-glucanase
  misc_feature (1)..(463): Homolog of NCBI NO: 18379267 NR Description: glycosyl hydrolase family 17 protein id: At2g01630.1, supported by cDNA: 154469. [Arabidopsis
  misc_feature (1)..(404): Homolog of NCBI NO: 25410916 NR Description: probable beta-1,3-glucanase [imported] -
  misc_feature (1)..(462): Homolog of NCBI NO: 22748323 NR Description: Putative beta-1,3-glucanase [Oryza sativa
  misc_feature (1)..(441): Homolog of NCBI NO: 15220923 NR Description: glycosyl hydrolase family 17; protein id:
  misc_feature (1)..(404): Homolog of NCBI NO: 25402689 NR Description: hypothetical protein [imported] - Arabidopsis
  misc_feature (1)..(404): Homolog of NCBI NO: 15219603 NR Description: glycosyl hydrolase family 17; protein id: [Arabidopsis thaliana] >gi|25404601|pir||E96687 hypothetical
  misc_feature (1)..(442): Homolog of NCBI NO: 34394648 NR Description: putative beta-1,3-glucanase [Oryza sativa
MPPPSDIVTLLKSQQITHVRLYDANSHMLKAFANTSIEVMVGVTNEEILKIGRFPSAAAAWVNKNVAAYIPSTNITAIAVGSEVLTTIPHVAPILASALNNIHKALVASNLNFKVKVSSPMSMDIMPKPFPPSTSTFSPSWNTTVYQLLQFLKNTGSFFMLNAYPYYGYTTANGIFPLDYALFKQLSPVKQIVDPNTLLHYNSMFDAMVDAAYYSMEALNFSKIPVVVTETGWPSSGGSDEAAATVANAETFNTNLIKRVLNNSGPPSQPDIPINTYIYELYNEDKRSGPVSERNWGILFPNGTSVYPLSLSGGSSSAALNGSSMFCVAKADADDDKLVDGLNWACGQGRANCAAIQPGQPCYLPNDVKSHASFAFNDYYQKMKSAGGTCDFDGTAITTTRDPSYRTCAYTGSLNANATNGNFPPDALGPASPLGGNANARIIFSYHLPILAPLALTLLQLLLQHDRLL

SEQ ID NO: 77687 - DNA, 1605 bp, Arabidopsis thaliana
  misc_feature (1)..(1605): Ceres Seq. ID no. 12577171
  misc_feature: MA Experiment ID: 20000185 Result: Down-regulated in Transcription
  misc_feature: MA Experiment 20000185 PARAMETER Experiment Name: At_Roots__P Parameter: Age (day) Value: 7 vs. 21
  misc_feature: MA Experiment 20000185 PARAMETER Experiment Name: At_Roots__P Parameter: Organism Value: A. thaliana
  misc_feature: MA Experiment 20000185 PARAMETER Experiment Name: At_Roots__P Parameter: Tissue Value: Roots vs. Whole Plant
  misc_feature: MA Experiment ID: 20000227 Result: Down-regulated in Transcription
  misc_feature: MA Experiment 20000227 PARAMETER Experiment Name: At_Root-Tips-vs-Tops_P Parameter: Tissue Value: Root Tips vs. Root Tops
  misc_feature: MA Experiment ID: 20000234 Result: Up-regulated in Transcription
  misc_feature: MA Experiment 20000234 PARAMETER Experiment Name: At_Siliques_P Parameter: Age (day) Value: 21
  misc_feature: MA Experiment 20000234 PARAMETER Experiment Name: At_Siliques_P Parameter: Organism Value: A. thaliana
  misc_feature: MA Experiment 20000234 PARAMETER Experiment Name: At_Siliques_P Parameter: Plant Line Value: WS
  misc_feature: MA Experiment 20000234 PARAMETER Experiment Name: At_Siliques_P Parameter: Tissue Value: Less Than 5mm Siliques vs. Whole Plant
  misc_feature: MA Experiment ID: 20000495 Result: Up-regulated in Transcription
  misc_feature: MA Experiment 20000495 PARAMETER Experiment Name: At_Guard_Cells_P Parameter: Harvest Date Value: 8/2/2002
  misc_feature: MA Experiment 20000495 PARAMETER Experiment Name: At_Guard_Cells_P Parameter: Organism Value: A. thaliana
  misc_feature: MA Experiment 20000495 PARAMETER Experiment Name: At_Guard_Cells_P Parameter: Tissue Value: Guard Cells vs. Leaves
  misc_feature: MA Experiment ID: 20001248 Result: Down-regulated in Transcription
  misc_feature: MA Experiment 20001248 PARAMETER Experiment Name: At_Far-red-induction_P Parameter: Age (day) Value: 7
  misc_feature: MA Experiment 20001248 PARAMETER Experiment Name: At_Far-red-induction_P Parameter: Light Value: Far-red vs. White
  misc_feature: MA Experiment 20001248 PARAMETER Experiment Name: At_Far-red-induction_P Parameter: Organism Value: A. thaliana
  misc_feature: MA Experiment 20001248 PARAMETER Experiment Name: At_Far-red-induction_P Parameter: Plant Line Value: Columbia
  misc_feature: MA Experiment 20001248 PARAMETER Experiment Name: At_Far-red-induction_P Parameter: Timepoint (hr) Value: 4
  misc_feature: MA Experiment 20001248 PARAMETER Experiment Name: At_Far-red-induction_P Parameter: Tissue Value: Whole Plant
  misc_feature: MA Experiment ID: 20001451 Result: Down-regulated in Transcription
  misc_feature: MA Experiment 20001451 PARAMETER Experiment Name: At_Far-red-induction_P Parameter: Age (day) Value: 7
  misc_feature: MA Experiment 20001451 PARAMETER Experiment Name: At_Far-red-induction_P Parameter: Light Value: Far-red vs. White
  misc_feature: MA Experiment 20001451 PARAMETER Experiment Name: At_Far-red-induction_P Parameter: Organism Value: A. thaliana
  misc_feature: MA Experiment 20001451 PARAMETER Experiment Name: At_Far-red-induction_P Parameter: Plant Line Value: Columbia
  misc_feature: MA Experiment 20001451 PARAMETER Experiment Name: At_Far-red-induction_P Parameter: Timepoint (hr) Value: 24
  misc_feature: MA Experiment 20001451 PARAMETER Experiment Name: At_Far-red-induction_P Parameter: Tissue Value: Whole Plant
  misc_feature: MA Experiment ID: 20001557 Result: Up-regulated in Transcription
  misc_feature: MA Experiment 20001557 PARAMETER Experiment Name: At_Drought_Soil_Dry_P Parameter: Age (day) Value: 27
  misc_feature: MA Experiment 20001557 PARAMETER Experiment Name: At_Drought_Soil_Dry_P Parameter: Organism Value: A. thaliana
  misc_feature: MA Experiment 20001557 PARAMETER Experiment Name: At_Drought_Soil_Dry_P Parameter: Plant Line Value: WS
  misc_feature: MA Experiment 20001557 PARAMETER Experiment Name: At_Drought_Soil_Dry_P Parameter: Post Timepoint (hr) Value: 3
  misc_feature: MA Experiment 20001557 PARAMETER Experiment Name: At_Drought_Soil_Dry_P Parameter: Post-Treatment Value: Re-Water vs. No Drought
  misc_feature: MA Experiment 20001557 PARAMETER Experiment Name: At_Drought_Soil_Dry_P Parameter: Timepoint (day) Value: 13
  misc_feature: MA Experiment 20001557 PARAMETER Experiment Name: At_Drought_Soil_Dry_P Parameter: Treatment Value: Drought vs. No Drought
  misc_feature: MA Experiment ID: 20001558 Result: Up-regulated in Transcription
  misc_feature: MA Experiment 20001558 PARAMETER Experiment Name: At_Drought_Soil_Dry_P Parameter: Age (day) Value: 27
  misc_feature: MA Experiment 20001558 PARAMETER Experiment Name: At_Drought_Soil_Dry_P Parameter: Organism Value: A. thaliana
  misc_feature: MA Experiment 20001558 PARAMETER Experiment Name: At_Drought_Soil_Dry_P Parameter: Plant Line Value: WS
  misc_feature: MA Experiment 20001558 PARAMETER Experiment Name: At_Drought_Soil_Dry_P Parameter: Post Timepoint (hr) Value: 6
  misc_feature: MA Experiment 20001558 PARAMETER Experiment Name: At_Drought_Soil_Dry_P Parameter: Post-Treatment Value: Re-Water vs. No Drought
  misc_feature: MA Experiment 20001558 PARAMETER Experiment Name: At_Drought_Soil_Dry_P Parameter: Timepoint (day) Value: 13
  misc_feature: MA Experiment 20001558 PARAMETER Experiment Name: At_Drought_Soil_Dry_P Parameter: Treatment Value: Drought vs. No Drought
  misc_feature: MA Experiment ID: 20001559 Result: Up-regulated in Transcription
  misc_feature: MA Experiment 20001559 PARAMETER Experiment Name: At_Drought_Soil_Dry_P Parameter: Age (day) Value: 28
  misc_feature: MA Experiment 20001559 PARAMETER Experiment Name: At_Drought_Soil_Dry_P Parameter: Organism Value: A. thaliana
  misc_feature: MA Experiment 20001559 PARAMETER Experiment Name: At_Drought_Soil_Dry_P Parameter: Plant Line Value: WS
  misc_feature: MA Experiment 20001559 PARAMETER Experiment Name: At_Drought_Soil_Dry_P Parameter: Post Timepoint (hr) Value: 29
  misc_feature: MA Experiment 20001559 PARAMETER Experiment Name: At_Drought_Soil_Dry_P Parameter: Post-Treatment Value: Re-Water vs. No Drought
  misc_feature: MA Experiment 20001559 PARAMETER Experiment Name: At_Drought_Soil_Dry_P Parameter: Timepoint (day) Value: 14
  misc_feature: MA Experiment 20001559 PARAMETER Experiment Name: At_Drought_Soil_Dry_P Parameter: Treatment Value: Drought vs. No Drought
aaccttaatgcgcgatccgcttttctaaagttttgtgagagagaagagatctaaaaaaatccacaattttgttcaaatcttggagttaaatgctgaattttaggccttgttgcttagatttatggcttaaagtttcaaacttttcattggatatggtacaaatcttgtagttaaacactgaattgtgtccctcgtgggcgttgttgctttgatttatggccaaaagtttcaaacttggatatgtgagaagaaaatgtcaggatctgagacgggtttaatggcggcgaccagagaatcaatgcaatttacaatggctctccaccagcagcagcaacacagtcaagctcaacctcagcagtctcagaacaggccattgtcattcggtggagacgacggaactgctctttacaagcagccgatgagatcagtatcaccaccgcagcagtaccaacccaactcagctggtgagaattctgtcttgaacatgaacttgcccggaggtgagtctggaggcatgactggaactggaagtgagccagtgaaaaagaggagaggtagaccgaggaaatatgggcctgatagtggtgaaatgtcacttggtttgaatcctggagctccttctttcactgtcagccaacctagtagcggcggcgatggaggagagaagaagagaggaagacctcctggttcttctagcaaaaggctcaagcttcaagctttaggctcgactggaatcggatttacgcctcatgtacttaccgtgctggctggagaggatgtatcatccaagataatggcgttaactcataatggaccccgtgctgtgtgtgtcttgtctgcaaatggagccatctccaatgtgactctccgccagtctgccacatccggtggaactgttacatatgaggggagatttgagattctgtctttatcgggatctttccatttgctggagaacaatggtcaaagaagcaggacgggaggtctaagcgtgtcattatcaagtccggatggtaatgtcctcggtggcagtgtagctggtcttcttatagcagcatcacctgttcagattgttgttgggagtttcttaccagacggagaaaaagaaccaaaacagcatgtgggacaaatgggactgtcgtcacccgtattaccgcgtgtggccccaacgcaggtgctgatgactccaagtagcccacaatctcgaggcacaatgagtgagtcatcttgtggaggaggacatggaagccctattcatcagagcactggaggaccttacaataacaccattaacatgccctggaagtagccaagtgatctgtgtcggcttaaaaccaacaacttcccgttattagagtgatttatttctacatttggtttagactttctagttctgatggttatttctacagttggtttagactttctagttctgttcagacaaaaggagtttgataaattgaccgacctattttgtgtgtttgaggtactttcagaaccataggtgttcagaaattagaatgttctgtttaaggtagatcttttattttatgttgaggtactttcggaaccataagttgttcagaaattggaatatcctgatta

SEQ ID NO: 77688 - protein, 351 aa, Arabidopsis thaliana
  peptide (1)..(351): Ceres Seq. ID no. 12577172
  misc_feature (1)..(351): Homolog of NCBI NO: 18403332 NR Description: AT-hook DNA-binding protein (AHP1); protein id: supported by cDNA: gi_14326503, supported by cDNA: gi_19548036 thaliana] >gi|19548037|gb|AAL87382.1| At2g33620/F4P9.39
  misc_feature (1)..(351): Homolog of NCBI NO: 2598227 NR Description: AT-hook protein 1 [Arabidopsis thaliana]
  misc_feature (1)..(351): Homolog of NCBI NO: 14326504 NR Description: At2g33620/F4P9.39 [Arabidopsis thaliana]
  misc_feature (56)..(351): Homolog of NCBI NO: 25408293 NR Description: AT-hook DNA-binding protein (AHP1) [imported] -
  misc_feature (24)..(345): Homolog of NCBI NO: 37537056 NR Description: putative AT-Hook DNA-binding protein [Oryza
  misc_feature (81)..(345): Homolog of NCBI NO: 38346715 NR Description: OSJNBa0086O06.13 [Oryza sativa (japonica
  misc_feature (29)..(342): Homolog of NCBI NO: 15237481 NR Description: putative protein; protein id: At5g46640.1
  misc_feature (1)..(347): Homolog of NCBI NO: 18414996 NR Description: putative protein; protein id: At4g17950.1, by cDNA: gi_15451059, supported by cDNA: gi_20148332 [Arabidopsis >gi|15451060|gb|AAK96801.1| putative protein [Arabidopsis
  misc_feature (1)..(347): Homolog of NCBI NO: 25456045 NR Description: probable DNA-binding protein AT-hook 2 [imported]
  misc_feature (38)..(322): Homolog of NCBI NO: 15235790 NR Description: putative DNA binding protein; protein id: supported by cDNA: 12041. [Arabidopsis thaliana]
MSGSETGLMAATRESMQFTMALHQQQQHSQAQPQQSQNRPLSFGGDDGTALYKQPMRSVSPPQQYQPNSAGENSVLNMNLPGGESGGMTGTGSEPVKKRRGRPRKYGPDSGEMSLGLNPGAPSFTVSQPSSGGDGGEKKRGRPPGSSSKRLKLQALGSTGIGFTPHVLTVLAGEDVSSKIMALTHNGPRAVCVLSANGAISNVTLRQSATSGGTVTYEGRFEILSLSGSFHLLENNGQRSRTGGLSVSLSSPDGNVLGGSVAGLLIAASPVQIVVGSFLPDGEKEPKQHVGQMGLSSPVLPRVAPTQVLMTPSSPQSRGTMSESSCGGGHGSPIHQSTGGPYNNTINMPWK

SEQ ID NO: 77689 - protein, 343 aa, Arabidopsis thaliana
  peptide (1)..(343): Ceres Seq. ID no. 12577173
  misc_feature (1)..(343): Homolog of NCBI NO: 18403332 NR Description: AT-hook DNA-binding protein (AHP1); protein id: supported by cDNA: gi_14326503, supported by cDNA: gi_19548036 thaliana] >gi|19548037|gb|AAL87382.1| At2g33620/F4P9.39
  misc_feature (1)..(343): Homolog of NCBI NO: 2598227 NR Description: AT-hook protein 1 [Arabidopsis thaliana]
  misc_feature (1)..(343): Homolog of NCBI NO: 14326504 NR Description: At2g33620/F4P9.39 [Arabidopsis thaliana]
  misc_feature (48)..(343): Homolog of NCBI NO: 25408293 NR Description: AT-hook DNA-binding protein (AHP1) [imported] -
  misc_feature (16)..(337): Homolog of NCBI NO: 37537056 NR Description: putative AT-Hook DNA-binding protein [Oryza
  misc_feature (73)..(337): Homolog of NCBI NO: 38346715 NR Description: OSJNBa0086O06.13 [Oryza sativa (japonica
  misc_feature (21)..(334): Homolog of NCBI NO: 15237481 NR Description: putative protein; protein id: At5g46640.1
  misc_feature (1)..(339): Homolog of NCBI NO: 18414996 NR Description: putative protein; protein id: At4g17950.1, by cDNA: gi_15451059, supported by cDNA: gi_20148332 [Arabidopsis >gi|15451060|gb|AAK96801.1| putative protein [Arabidopsis
  misc_feature (1)..(339): Homolog of NCBI NO: 25456045 NR Description: probable DNA-binding protein AT-hook 2 [imported]
  misc_feature (30)..(314): Homolog of NCBI NO: 15235790 NR Description: putative DNA binding protein; protein id: supported by cDNA: 12041. [Arabidopsis thaliana]
MAATRESMQFTMALHQQQQHSQAQPQQSQNRPLSFGGDDGTALYKQPMRSVSPPQQYQPNSAGENSVLNMNLPGGESGGMTGTGSEPVKKRRGRPRKYGPDSGEMSLGLNPGAPSFTVSQPSSGGDGGEKKRGRPPGSSSKRLKLQALGSTGIGFTPHVLTVLAGEDVSSKIMALTHNGPRAVCVLSANGAISNVTLRQSATSGGTVTYEGRFEILSLSGSFHLLENNGQRSRTGGLSVSLSSPDGNVLGGSVAGLLIAASPVQIVVGSFLPDGEKEPKQHVGQMGLSSPVLPRVAPTQVLMTPSSPQSRGTMSESSCGGGHGSPIHQSTGGPYNNTINMPWK

SEQ ID NO: 77690 - protein, 336 aa, Arabidopsis thaliana
  peptide (1)..(336): Ceres Seq. ID no. 12577174
  misc_feature (1)..(336): Homolog of NCBI NO: 18403332 NR Description: AT-hook DNA-binding protein (AHP1); protein id: supported by cDNA: gi_14326503, supported by cDNA: gi_19548036 thaliana] >gi|19548037|gb|AAL87382.1| At2g33620/F4P9.39
  misc_feature (1)..(336): Homolog of NCBI NO: 2598227 NR Description: AT-hook protein 1 [Arabidopsis thaliana]
  misc_feature (1)..(336): Homolog of NCBI NO: 14326504 NR Description: At2g33620/F4P9.39 [Arabidopsis thaliana]
  misc_feature (41)..(336): Homolog of NCBI NO: 25408293 NR Description: AT-hook DNA-binding protein (AHP1) [imported] -
  misc_feature (9)..(330): Homolog of NCBI NO: 37537056 NR Description: putative AT-Hook DNA-binding protein [Oryza
  misc_feature (66)..(330): Homolog of NCBI NO: 38346715 NR Description: OSJNBa0086O06.13 [Oryza sativa (japonica
  misc_feature (14)..(327): Homolog of NCBI NO: 15237481 NR Description: putative protein; protein id: At5g46640.1
  misc_feature (1)..(332): Homolog of NCBI NO: 18414996 NR Description: putative protein; protein id: At4g17950.1, by cDNA: gi_15451059, supported by cDNA: gi_20148332 [Arabidopsis >gi|15451060|gb|AAK96801.1| putative protein [Arabidopsis
  misc_feature (1)..(332): Homolog of NCBI NO: 25456045 NR Description: probable DNA-binding protein AT-hook 2 [imported]
  misc_feature (23)..(307): Homolog of NCBI NO: 15235790 NR Description: putative DNA binding protein; protein id: supported by cDNA: 12041. [Arabidopsis thaliana]
MQFTMALHQQQQHSQAQPQQSQNRPLSFGGDDGTALYKQPMRSVSPPQQYQPNSAGENSVLNMNLPGGESGGMTGTGSEPVKKRRGRPRKYGPDSGEMSLGLNPGAPSFTVSQPSSGGDGGEKKRGRPPGSSSKRLKLQALGSTGIGFTPHVLTVLAGEDVSSKIMALTHNGPRAVCVLSANGAISNVTLRQSATSGGTVTYEGRFEILSLSGSFHLLENNGQRSRTGGLSVSLSSPDGNVLGGSVAGLLIAASPVQIVVGSFLPDGEKEPKQHVGQMGLSSPVLPRVAPTQVLMTPSSPQSRGTMSESSCGGGHGSPIHQSTGGPYNNTINMPWK

SEQ ID NO: 77691 - DNA, 792 bp, Arabidopsis thaliana
  misc_feature (1)..(792): Ceres Seq. ID no. 12577175
  misc_feature: MA Experiment ID: 108577 Result: Down-regulated in Transcription
  misc_feature: MA Experiment 108577 PARAMETER Experiment Name: At_42deg_Heat_cDNA_P Parameter: Temperature (deg C) Value: 42 vs. 22
  misc_feature: MA Experiment 108577 PARAMETER Experiment Name: At_42deg_Heat_cDNA_P Parameter: Timepoint (hr) Value: 6
  misc_feature: MA Experiment 108577 PARAMETER Experiment Name: At_42deg_Heat_cDNA_P Parameter: Tissue Value: Aerial
  misc_feature: MA Experiment ID: 108579 Result: Down-regulated in Transcription
  misc_feature: MA Experiment 108579 PARAMETER Experiment Name: At_4deg_Cold_cDNA_P Parameter: Temperature (deg C) Value: 4 vs. 22
  misc_feature: MA Experiment 108579 PARAMETER Experiment Name: At_4deg_Cold_cDNA_P Parameter: Timepoint (hr) Value: 6
  misc_feature: MA Experiment 108579 PARAMETER Experiment Name: At_4deg_Cold_cDNA_P Parameter: Tissue Value: Aerial
  misc_feature: MA Experiment ID: 108595 Result: Up-regulated in Transcription
  misc_feature: MA Experiment 108595 PARAMETER Experiment Name: At_Ler-pi_Ovule_cDNA_P Parameter: Plant Line Value: null
  misc_feature: MA Experiment ID: 20000069 Result: Up-regulated in Transcription
  misc_feature: MA Experiment 20000069 PARAMETER Experiment Name: At_100uM_ABA_Mutants_cDNA_P Parameter: Plant Line Value: CS23
  misc_feature: MA Experiment 20000069 PARAMETER Experiment Name: At_100uM_ABA_Mutants_cDNA_P Parameter: Timepoint (hr) Value: 6
  misc_feature: MA Experiment 20000069 PARAMETER Experiment Name: At_100uM_ABA_Mutants_cDNA_P Parameter: Tissue Value: Aerial
  misc_feature: MA Experiment 20000069 PARAMETER Experiment Name: At_100uM_ABA_Mutants_cDNA_P Parameter: Treatment Value: 100uM ABA vs. No Treatment
  misc_feature: MA Experiment ID: 20000070 Result: Up-regulated in Transcription
  misc_feature: MA Experiment 20000070 PARAMETER Experiment Name: At_100uM_ABA_Mutants_cDNA_P Parameter: Plant Line Value: CS24
  misc_feature: MA Experiment 20000070 PARAMETER Experiment Name: At_100uM_ABA_Mutants_cDNA_P Parameter: Timepoint (hr) Value: 6
  misc_feature: MA Experiment 20000070 PARAMETER Experiment Name: At_100uM_ABA_Mutants_cDNA_P Parameter: Tissue Value: Aerial
  misc_feature: MA Experiment 20000070 PARAMETER Experiment Name: At_100uM_ABA_Mutants_cDNA_P Parameter: Treatment Value: 100uM ABA vs. No Treatment
  misc_feature: MA Experiment ID: 20000071 Result: Up-regulated in Transcription
  misc_feature: MA Experiment 20000071 PARAMETER Experiment Name: At_100uM_ABA_Mutants_cDNA_P Parameter: Plant Line Value: CS8104
  misc_feature: MA Experiment 20000071 PARAMETER Experiment Name: At_100uM_ABA_Mutants_cDNA_P Parameter: Timepoint (hr) Value: 6
  misc_feature: MA Experiment 20000071 PARAMETER Experiment Name: At_100uM_ABA_Mutants_cDNA_P Parameter: Tissue Value: Aerial
  misc_feature: MA Experiment 20000071 PARAMETER Experiment Name: At_100uM_ABA_Mutants_cDNA_P Parameter: Treatment Value: 100uM ABA vs. No Treatment
  misc_feature: MA Experiment ID: 20000072 Result: Up-regulated in Transcription
  misc_feature: MA Experiment 20000072 PARAMETER Experiment Name: At_100uM_ABA_Mutants_cDNA_P Parameter: Plant Line Value: CS8105
  misc_feature: MA Experiment 20000072 PARAMETER Experiment Name: At_100uM_ABA_Mutants_cDNA_P Parameter: Timepoint (hr) Value: 6
  misc_feature: MA Experiment 20000072 PARAMETER Experiment Name: At_100uM_ABA_Mutants_cDNA_P Parameter: Tissue Value: Aerial
  misc_feature: MA Experiment 20000072 PARAMETER Experiment Name: At_100uM_ABA_Mutants_cDNA_P Parameter: Treatment Value: 100uM ABA vs. No Treatment
  misc_feature: MA Experiment ID: 20000086 Result: Up-regulated in Transcription
  misc_feature: MA Experiment 20000086 PARAMETER Experiment Name: At_100uM_ABA_Mutants_cDNA_P Parameter: Plant Line Value: CS22
  misc_feature: MA Experiment 20000086 PARAMETER Experiment Name: At_100uM_ABA_Mutants_cDNA_P Parameter: Timepoint (hr) Value: 6
  misc_feature: MA Experiment 20000086 PARAMETER Experiment Name: At_100uM_ABA_Mutants_cDNA_P Parameter: Tissue Value: Aerial
  misc_feature: MA Experiment 20000086 PARAMETER Experiment Name: At_100uM_ABA_Mutants_cDNA_P Parameter: Treatment Value: 100uM ABA vs. No Treatment
  misc_feature: MA Experiment ID: 20000087 Result: Up-regulated in Transcription
  misc_feature: MA Experiment 20000087 PARAMETER Experiment Name: At_100uM_ABA_Mutants_cDNA_P Parameter: Plant Line Value: WS
  misc_feature: MA Experiment 20000087 PARAMETER Experiment Name: At_100uM_ABA_Mutants_cDNA_P Parameter: Timepoint (hr) Value: 6
  misc_feature: MA Experiment 20000087 PARAMETER Experiment Name: At_100uM_ABA_Mutants_cDNA_P Parameter: Tissue Value: Aerial
  misc_feature: MA Experiment 20000087 PARAMETER Experiment Name: At_100uM_ABA_Mutants_cDNA_P Parameter: Treatment Value: 100uM ABA vs. No Treatment
  misc_feature: MA Experiment ID: 20000088 Result: Up-regulated in Transcription
  misc_feature: MA Experiment 20000088 PARAMETER Experiment Name: At_100uM_ABA_Mutants_cDNA_P Parameter: Plant Line Value: Landsberg
  misc_feature: MA Experiment 20000088 PARAMETER Experiment Name: At_100uM_ABA_Mutants_cDNA_P Parameter: Timepoint (hr) Value: 6
  misc_feature: MA Experiment 20000088 PARAMETER Experiment Name: At_100uM_ABA_Mutants_cDNA_P Parameter: Tissue Value: Aerial
  misc_feature: MA Experiment 20000088 PARAMETER Experiment Name: At_100uM_ABA_Mutants_cDNA_P Parameter: Treatment Value: 100uM ABA vs. No Treatment
  misc_feature: MA Experiment ID: 20000089 Result: Up-regulated in Transcription
  misc_feature: MA Experiment ID: 20000090 Result: Up-regulated in Transcription
  misc_feature: MA Experiment ID: 20000117 Result: Up-regulated in Transcription
  misc_feature: MA Experiment 20000117 PARAMETER Experiment Name: At_100uM_ABA_Mutants_cDNA_P Parameter: Plant Line Value: Columbia
  misc_feature: MA Experiment 20000117 PARAMETER Experiment Name: At_100uM_ABA_Mutants_cDNA_P Parameter: Timepoint (hr) Value: 6
  misc_feature: MA Experiment 20000117 PARAMETER Experiment Name: At_100uM_ABA_Mutants_cDNA_P Parameter: Tissue Value: Aerial
  misc_feature: MA Experiment 20000117 PARAMETER Experiment Name: At_100uM_ABA_Mutants_cDNA_P Parameter: Treatment Value: 100uM ABA vs. No Treatment
  misc_feature: MA Experiment ID: 20000315 Result: Down-regulated in Transcription
  misc_feature: MA Experiment 20000315 PARAMETER Experiment Name: At_14day_Shoots-Roots_Sub_P Parameter: Age (day) Value: 14
  misc_feature: MA Experiment 20000315 PARAMETER Experiment Name: At_14day_Shoots-Roots_Sub_P Parameter: Organism Value: A. thaliana
  misc_feature: MA Experiment 20000315 PARAMETER Experiment Name: At_14day_Shoots-Roots_Sub_P Parameter: Plant Line Value: WS
  misc_feature: MA Experiment 20000315 PARAMETER Experiment Name: At_14day_Shoots-Roots_Sub_P Parameter: Tissue Value: Shoots vs. Whole Plant
  misc_feature: MA Experiment ID: 20000328 Result: Down-regulated in Transcription
  misc_feature: MA Experiment 20000328 PARAMETER Experiment Name: At_42deg_Heat_Sub_P Parameter: Age (day) Value: 14
  misc_feature: MA Experiment 20000328 PARAMETER Experiment Name: At_42deg_Heat_Sub_P Parameter: Organism Value: A. thaliana
  misc_feature: MA Experiment 20000328 PARAMETER Experiment Name: At_42deg_Heat_Sub_P Parameter: Plant Line Value: WS
  misc_feature: MA Experiment 20000328 PARAMETER Experiment Name: At_42deg_Heat_Sub_P Parameter: Temperature (deg C) Value: 42 vs. 22
  misc_feature: MA Experiment 20000328 PARAMETER Experiment Name: At_42deg_Heat_Sub_P Parameter: Timepoint (hr) Value: 6
  misc_feature: MA Experiment 20000328 PARAMETER Experiment Name: At_42deg_Heat_Sub_P Parameter: Tissue Value: Aerial
  misc_feature: MA Experiment ID: 20000329 Result: Down-regulated in Transcription
  misc_feature: MA Experiment 20000329 PARAMETER Experiment Name: At_4deg_Cold_Sub_P Parameter: Age (day) Value: 14
  misc_feature: MA Experiment 20000329 PARAMETER Experiment Name: At_4deg_Cold_Sub_P Parameter: Organism Value: A. thaliana
  misc_feature: MA Experiment 20000329 PARAMETER Experiment Name: At_4deg_Cold_Sub_P Parameter: Plant Line Value: WS
  misc_feature: MA Experiment 20000329 PARAMETER Experiment Name: At_4deg_Cold_Sub_P Parameter: Temperature (deg C) Value: 4 vs. 22
  misc_feature: MA Experiment 20000329 PARAMETER Experiment Name: At_4deg_Cold_Sub_P Parameter: Timepoint (hr) Value: 6
  misc_feature: MA Experiment 20000329 PARAMETER Experiment Name: At_4deg_Cold_Sub_P Parameter: Tissue Value: Aerial
ccttttcggttttcacggtaaggctcggaggaaaacctaattcgtccggagaatctccacctcactctcgccaaacgcatctctgttgtagcttgtgatggatccaacacagaacacaagtgcagggattggtgggagcaatggtacaatcagatatcaaaccaatgatgggacttcaactgtgaccgttgctgatgattcaaaggagaatctttcccaagtcataaactctattgagaaaactttaggagtccttcatcagttacaccttaccgtcacttctttcacacccgcgtctcaactccatctcctccagcgccttaactctcttgtgatggagctagataacatgactaagttgtctgagaaatgcaacattcaaatccccatggaggttcttaacttgattgatgatgggaagaacccggatgagtttacgaaagatgttcttaatagctgcatagctagaaatcaagttactaagggcaagactgatgcttttaaggatttgagaaaacatattctggaggagcttgaacagaatttccctgatgaagtcgatatgtatagagaaatccgtgctagttctgctgctgaagcgaaacggttggcgcaatcgcaaagtgtgttaccaaatggggatgcaaaggtcaagaatgagctataagagcccaaaggatcctttttatgtttaccttgtactcttgtagaatataatgactgagtcgatgaatgtgatgtaacacgaacaatcccaagtggaatttctaataatatctgttggttctcttc

SEQ ID NO: 77692 - protein, 189 aa, Arabidopsis thaliana
  peptide (1)..(189): Ceres Seq. ID no. 12577176
  misc_feature (1)..(189): Homolog of NCBI NO: 18396004 NR Description: Expressed protein; protein id: At1g26665.1, by cDNA: gi_13926326, supported by cDNA: gi_16323257 [Arabidopsis >gi|13926327|gb|AAK49628.1|AF372912_1 At1g26660/T24P13_4
  misc_feature (1)..(166): Homolog of NCBI NO: 25403266 NR Description: protein T24P13.4 [imported] - Arabidopsis >gi|9295719|gb|AAF87025.1|AC006535_3 T24P13.4 [Arabidopsis
  misc_feature (1)..(189): Homolog of NCBI NO: 15238215 NR Description: putative protein; protein id: At5g41910.1 thaliana] >gi|9757936|dbj|BAB08424.1| gene_id:MJC20.1~similar to protein~sp|P45966 [Arabidopsis thaliana]
  misc_feature (13)..(161): Homolog of NCBI NO: 34873422 NR Description: similar to DNA segment, Chr 13, Wayne State
  misc_feature (37)..(161): Homolog of NCBI NO: 20070410 NR Description: DNA segment, Chr 13, Wayne State University 50, [Mus musculus] >gi|27681537|ref|XP_214417.1| similar to DNA Chr 13, Wayne State University 50, expressed [Mus musculus]
  misc_feature (37)..(161): Homolog of NCBI NO: 29145113 NR Description: similar to DNA segment, Chr 13, Wayne State
  misc_feature (37)..(161): Homolog of NCBI NO: 13097162 NR Description: Similar to CG5057 gene product [Homo sapiens]
  misc_feature (39)..(164): Homolog of NCBI NO: 9799628 NR Description: Nut2 [Drosophila melanogaster]
  misc_feature (45)..(181): Homolog of NCBI NO: 29841376 NR Description: similar to GenBank Accession Number BC003353
  misc_feature (39)..(164): Homolog of NCBI NO: 24665095 NR Description: CG5057-PA [Drosophila melanogaster]
MDPTQNTSAGIGGSNGTIRYQTNDGTSTVTVADDSKENLSQVINSIEKTLGVLHQLHLTVTSFTPASQLHLLQRLNSLVMELDNMTKLSEKCNIQIPMEVLNLIDDGKNPDEFTKDVLNSCIARNQVTKGKTDAFKDLRKHILEELEQNFPDEVDMYREIRASSAAEAKRLAQSQSVLPNGDAKVKNEL

SEQ ID NO: 77693 - protein, 110 aa, Arabidopsis thaliana
  peptide (1)..(110): Ceres Seq. ID no. 12577177
  misc_feature (1)..(110): Homolog of NCBI NO: 18396004 NR Description: Expressed protein; protein id: At1g26665.1, by cDNA: gi_13926326, supported by cDNA: gi_16323257 [Arabidopsis >gi|13926327|gb|AAK49628.1|AF372912_1 At1g26660/T24P13_4
  misc_feature (1)..(87): Homolog of NCBI NO: 25403266 NR Description: protein T24P13.4 [imported] - Arabidopsis >gi|9295719|gb|AAF87025.1|AC006535_3 T24P13.4 [Arabidopsis
  misc_feature (1)..(110): Homolog of NCBI NO: 15238215 NR Description: putative protein; protein id: At5g41910.1 thaliana] >gi|9757936|dbj|BAB08424.1| gene_id:MJC20.1~similar to protein~sp|P45966 [Arabidopsis thaliana]
  misc_feature (1)..(82): Homolog of NCBI NO: 34873422 NR Description: similar to DNA segment, Chr 13, Wayne State
  misc_feature (1)..(82): Homolog of NCBI NO: 20070410 NR Description: DNA segment, Chr 13, Wayne State University 50, [Mus musculus] >gi|27681537|ref|XP_214417.1| similar to DNA Chr 13, Wayne State University 50, expressed [Mus musculus]
  misc_feature (1)..(82): Homolog of NCBI NO: 29145113 NR Description: similar to DNA segment, Chr 13, Wayne State
  misc_feature (1)..(82): Homolog of NCBI NO: 13097162 NR Description: Similar to CG5057 gene product [Homo sapiens]
  misc_feature (1)..(85): Homolog of NCBI NO: 9799628 NR Description: Nut2 [Drosophila melanogaster]
  misc_feature (1)..(102): Homolog of NCBI NO: 29841376 NR Description: similar to GenBank Accession Number BC003353
  misc_feature (1)..(85): Homolog of NCBI NO: 24665095 NR Description: CG5057-PA [Drosophila melanogaster]
MELDNMTKLSEKCNIQIPMEVLNLIDDGKNPDEFTKDVLNSCIARNQVTKGKTDAFKDLRKHILEELEQNFPDEVDMYREIRASSAAEAKRLAQSQSVLPNGDAKVKNEL

SEQ ID NO: 77694 - protein, 105 aa, Arabidopsis thaliana
  peptide (1)..(105): Ceres Seq. ID no. 12577178
  misc_feature (1)..(105): Homolog of NCBI NO: 18396004 NR Description: Expressed protein; protein id: At1g26665.1, by cDNA: gi_13926326, supported by cDNA: gi_16323257 [Arabidopsis >gi|13926327|gb|AAK49628.1|AF372912_1 At1g26660/T24P13_4
  misc_feature (1)..(82): Homolog of NCBI NO: 25403266 NR Description: protein T24P13.4 [imported] - Arabidopsis >gi|9295719|gb|AAF87025.1|AC006535_3 T24P13.4 [Arabidopsis
  misc_feature (1)..(105): Homolog of NCBI NO: 15238215 NR Description: putative protein; protein id: At5g41910.1 thaliana] >gi|9757936|dbj|BAB08424.1| gene_id:MJC20.1~similar to protein~sp|P45966 [Arabidopsis thaliana]
  misc_feature (1)..(77): Homolog of NCBI NO: 34873422 NR Description: similar to DNA segment, Chr 13, Wayne State
  misc_feature (1)..(77): Homolog of NCBI NO: 20070410 NR Description: DNA segment, Chr 13, Wayne State University 50, [Mus musculus] >gi|27681537|ref|XP_214417.1| similar to DNA Chr 13, Wayne State University 50, expressed [Mus musculus]
  misc_feature (1)..(77): Homolog of NCBI NO: 29145113 NR Description: similar to DNA segment, Chr 13, Wayne State
  misc_feature (1)..(77): Homolog of NCBI NO: 13097162 NR Description: Similar to CG5057 gene product [Homo sapiens]
  misc_feature (1)..(80): Homolog of NCBI NO: 9799628 NR Description: Nut2 [Drosophila melanogaster]
  misc_feature (1)..(97): Homolog of NCBI NO: 29841376 NR Description: similar to GenBank Accession Number BC003353
  misc_feature (1)..(80): Homolog of NCBI NO: 24665095 NR Description: CG5057-PA [Drosophila melanogaster]
MTKLSEKCNIQIPMEVLNLIDDGKNPDEFTKDVLNSCIARNQVTKGKTDAFKDLRKHILEELEQNFPDEVDMYREIRASSAAEAKRLAQSQSVLPNGDAKVKNEL

SEQ ID NO: 77695 - DNA, 1048 bp, Arabidopsis thaliana
  misc_feature (1)..(1048): Ceres Seq. ID no. 12577187
  misc_feature: MA Experiment ID: 108462 Result: Down-regulated in Transcription
  misc_feature: MA Experiment 108462 PARAMETER Experiment Name: At_Germinating_Seeds_cDNA_P Parameter: Age (day) Value: 2 vs. 0
  misc_feature: MA Experiment 108462 PARAMETER Experiment Name: At_Germinating_Seeds_cDNA_P Parameter: Tissue Value: Germinating Seeds
  misc_feature: MA Experiment ID: 108463 Result: Down-regulated in Transcription
  misc_feature: MA Experiment 108463 PARAMETER Experiment Name: At_Germinating_Seeds_cDNA_P Parameter: Age (day) Value: 3 vs. 0
  misc_feature: MA Experiment 108463 PARAMETER Experiment Name: At_Germinating_Seeds_cDNA_P Parameter: Tissue Value: Germinating Seeds
  misc_feature: MA Experiment ID: 108668 Result: Up-regulated in Transcription
  misc_feature: MA Experiment 108668 PARAMETER Experiment Name: At_2mM_SA_cDNA_P Parameter: Plant Line Value: WS
  misc_feature: MA Experiment 108668 PARAMETER Experiment Name: At_2mM_SA_cDNA_P Parameter: Timepoint (hr) Value: 6
  misc_feature: MA Experiment 108668 PARAMETER Experiment Name: At_2mM_SA_cDNA_P Parameter: Treatment Value: 2mM SA vs. No Treatment
  misc_feature: MA Experiment ID: 20000090 Result: Up-regulated in Transcription
  misc_feature: MA Experiment ID: 20000173 Result: Down-regulated in Transcription
  misc_feature: MA Experiment 20000173 PARAMETER Experiment Name: At_42deg_Heat_P Parameter: Age (day) Value: 14
  misc_feature: MA Experiment 20000173 PARAMETER Experiment Name: At_42deg_Heat_P Parameter: Organism Value: A. thaliana
  misc_feature: MA Experiment 20000173 PARAMETER Experiment Name: At_42deg_Heat_P Parameter: Plant Line Value: WS
  misc_feature: MA Experiment 20000173 PARAMETER Experiment Name: At_42deg_Heat_P Parameter: Temperature (deg C) Value: 42 vs. 22
  misc_feature: MA Experiment 20000173 PARAMETER Experiment Name: At_42deg_Heat_P Parameter: Timepoint (hr) Value: 6
  misc_feature: MA Experiment 20000173 PARAMETER Experiment Name: At_42deg_Heat_P Parameter: Tissue Value: Aerial
  misc_feature: MA Experiment ID: 20000182 Result: Up-regulated in Transcription
  misc_feature: MA Experiment 20000182 PARAMETER Experiment Name: At_2mM_SA_P Parameter: Age (day) Value: 14
  misc_feature: MA Experiment 20000182 PARAMETER Experiment Name: At_2mM_SA_P Parameter: Organism Value: A. thaliana
  misc_feature: MA Experiment 20000182 PARAMETER Experiment Name: At_2mM_SA_P Parameter: Plant Line Value: WS
  misc_feature: MA Experiment 20000182 PARAMETER Experiment Name: At_2mM_SA_P Parameter: Timepoint (hr) Value: 6
  misc_feature: MA Experiment 20000182 PARAMETER Experiment Name: At_2mM_SA_P Parameter: Tissue Value: Aerial
  misc_feature: MA Experiment 20000182 PARAMETER Experiment Name: At_2mM_SA_P Parameter: Treatment Value: 2mM SA vs. No Treatment
  misc_feature: MA Experiment ID: 20000184 Result: Down-regulated in Transcription
  misc_feature: MA Experiment 20000184 PARAMETER Experiment Name: At_Shoots__P Parameter: Age (day) Value: 7
  misc_feature: MA Experiment 20000184 PARAMETER Experiment Name: At_Shoots__P Parameter: Tissue Value: Shoots vs. Whole Plant
  misc_feature: MA Experiment ID: 20000224 Result: Up-regulated in Transcription
agagctcaagagaagtaaagaaactgcgacaagagaaagaagattgactttggagaagagagagagtaacgatggaagatattcataatctcgatatagagaaaagtgatagatcgatttggttgatgaagtgtcctgtagttgtagacaaggcatggcacaagatagcagcttcgtcgtcttcttcttttgcttcctcggattctcctcccgacatggcaaagattgttcgcgaagttgatcctctacgggacgattctccccccgagttcaaaatgtatatggttggtgctgagtatgggaacatgccaaagtgctacgctttgaacatgttcacagactttgttccgatggggggcttttccgatgttaatcaaggttgtgcagctgctgaaggaaaggttgatcacaaattcgatatgaagccatatggtgaaaccattgaagaatatgctaggctttgtcgtgagagaacgagcaaagccatggttaaaaatcgacagattcaggttattgataatgaccgcggagttcatatgaggcccatgcctggaatgcttggtttagtttcctccaattccaaggaaaagaggaaacctcccccagtcaagcaaaccgaggtgaagaggacgaggagagatcgtggtgagcttgaagctataatgttcaagctatttgaaggccagcctaactggacattgaagcagcttgtacaagagacggaccagccagctcagttcctgaaagaaatactaaacgagctgtgcgtgtacaataagagaggatcgaaccaagggacatatgagcttaaacctgaatacaagaaatctgctgaagatgatacaggtgggcagtgaaatcaaccccttgtgtaattcactattatatacatgtgacatagtcataacattattataaaccctgagtcattattcatcagaagaaaaaaacaagattttagtagggaagagaaaagaggggttttaagtggtcatcttttaatttgtatctttaatcgaaacagacaaatataaaagagagtttttgt

SEQ ID NO: 77696 - protein, 261 aa, Arabidopsis thaliana; identical to SEQ ID NO: 35607
  peptide (1)..(261): Ceres Seq. ID no. 12577188
  misc_feature (4)..(260): Pfam Name: Transcription initiation factor IIF, beta subunit Pfam Description: Transcription initiation factor IIF, beta
  misc_feature (1)..(261): Homolog of NCBI NO: 15222264 NR Description: transcription initiation factor, putative; id: At1g75510.1, supported by cDNA: gi_12642907, supported by gi_13265438 [Arabidopsis thaliana]
  misc_feature (2)..(256): Homolog of NCBI NO: 34909946 NR Description: putative transcription initiation factor [Oryza
  misc_feature (66)..(256): Homolog of NCBI NO: 15231173 NR Description: transcription initiation factor IIF, beta
  misc_feature (103)..(256): Homolog of NCBI NO: 11285686 NR Description: hypothetical protein T25B15.40 - Arabidopsis >gi|10045560|emb|CAC07918.1| putative protein [Arabidopsis
  misc_feature (66)..(99): Homolog of NCBI NO: 11285686 NR Description: hypothetical protein T25B15.40 - Arabidopsis >gi|10045560|emb|CAC07918.1| putative protein [Arabidopsis
  misc_feature (2)..(251): Homolog of NCBI NO: 19111874 NR Description: transcription initiation factor iif, beta subunit
  misc_feature (1)..(251): Homolog of NCBI NO: 24645751 NR Description: Transcription factor TFIIFbeta CG6538-PA
  misc_feature (6)..(257): Homolog of NCBI NO: 38174399 NR Description: Unknown (protein for MGC:75790) [Silurana
  misc_feature (105)..(252): Homolog of NCBI NO: 19073998 NR Description: TRANSCRIPTION INITIATION FACTOR TFIIF BETA [Encephalitozoon cuniculi] >gi|19068640|emb|CAD25108.1|
  misc_feature (106)..(257): Homolog of NCBI NO: 464520 NR Description: TRANSCRIPTION INITIATION FACTOR IIF, BETA SUBUNIT BETA) (TRANSCRIPTION INITIATION FACTOR RAP30)

SEQ ID NO: 77697 - protein, 243 aa, Arabidopsis thaliana; identical to SEQ ID NO: 35608
  peptide (1)..(243): Ceres Seq. ID no. 12577189
  misc_feature (1)..(242): Pfam Name: Transcription initiation factor IIF, beta subunit Pfam Description: Transcription initiation factor IIF, beta
  misc_feature (1)..(243): Homolog of NCBI NO: 15222264 NR Description: transcription initiation factor, putative; id: At1g75510.1, supported by cDNA: gi_12642907, supported by gi_13265438 [Arabidopsis thaliana]
  misc_feature (1)..(238): Homolog of NCBI NO: 34909946 NR Description: putative transcription initiation factor [Oryza
  misc_feature (48)..(238): Homolog of NCBI NO: 15231173 NR Description: transcription initiation factor IIF, beta
  misc_feature (85)..(238): Homolog of NCBI NO: 11285686 NR Description: hypothetical protein T25B15.40 - Arabidopsis >gi|10045560|emb|CAC07918.1| putative protein [Arabidopsis
  misc_feature (48)..(81): Homolog of NCBI NO: 11285686 NR Description: hypothetical protein T25B15.40 - Arabidopsis >gi|10045560|emb|CAC07918.1| putative protein [Arabidopsis
  misc_feature (1)..(233): Homolog of NCBI NO: 19111874 NR Description: transcription initiation factor iif, beta subunit
  misc_feature (1)..(233): Homolog of NCBI NO: 24645751 NR Description: Transcription factor TFIIFbeta CG6538-PA
  misc_feature (1)..(239): Homolog of NCBI NO: 38174399 NR Description: Unknown (protein for MGC:75790) [Silurana
  misc_feature (87)..(234): Homolog of NCBI NO: 19073998 NR Description: TRANSCRIPTION INITIATION FACTOR TFIIF BETA [Encephalitozoon cuniculi] >gi|19068640|emb|CAD25108.1|
  misc_feature (88)..(239): Homolog of NCBI NO: 464520 NR Description: TRANSCRIPTION INITIATION FACTOR IIF, BETA SUBUNIT BETA) (TRANSCRIPTION INITIATION FACTOR RAP30)

SEQ ID NO: 77698 - protein, 213 aa, Arabidopsis thaliana
  peptide (1)..(213): Ceres Seq. ID no. 12577190
  misc_feature (1)..(212): Pfam Name: Transcription initiation factor IIF, beta subunit Pfam Description: Transcription initiation factor IIF, beta
  misc_feature (1)..(213): Homolog of NCBI NO: 15222264 NR Description: transcription initiation factor, putative; id: At1g75510.1, supported by cDNA: gi_12642907, supported by gi_13265438 [Arabidopsis thaliana]
  misc_feature (1)..(208): Homolog of NCBI NO: 34909946 NR Description: putative transcription initiation factor [Oryza
  misc_feature (18)..(208): Homolog of NCBI NO: 15231173 NR Description: transcription initiation factor IIF, beta
  misc_feature (55)..(208): Homolog of NCBI NO: 11285686 NR Description: hypothetical protein T25B15.40 - Arabidopsis >gi|10045560|emb|CAC07918.1| putative protein [Arabidopsis
  misc_feature (18)..(51): Homolog of NCBI NO: 11285686 NR Description: hypothetical protein T25B15.40 - Arabidopsis >gi|10045560|emb|CAC07918.1| putative protein [Arabidopsis
  misc_feature (1)..(203): Homolog of NCBI NO: 19111874 NR Description: transcription initiation factor iif, beta subunit
  misc_feature (1)..(203): Homolog of NCBI NO: 24645751 NR Description: Transcription factor TFIIFbeta CG6538-PA
  misc_feature (1)..(209): Homolog of NCBI NO: 38174399 NR Description: Unknown (protein for MGC:75790) [Silurana
  misc_feature (57)..(204): Homolog of NCBI NO: 19073998 NR Description: TRANSCRIPTION INITIATION FACTOR TFIIF BETA [Encephalitozoon cuniculi] >gi|19068640|emb|CAD25108.1|
  misc_feature (58)..(209): Homolog of NCBI NO: 464520 NR Description: TRANSCRIPTION INITIATION FACTOR IIF, BETA SUBUNIT BETA) (TRANSCRIPTION INITIATION FACTOR RAP30)
MAKIVREVDPLRDDSPPEFKMYMVGAEYGNMPKCYALNMFTDFVPMGGFSDVNQGCAAAEGKVDHKFDMKPYGETIEEYARLCRERTSKAMVKNRQIQVIDNDRGVHMRPMPGMLGLVSSNSKEKRKPPPVKQTEVKRTRRDRGELEAIMFKLFEGQPNWTLKQLVQETDQPAQFLKEILNELCVYNKRGSNQGTYELKPEYKKSAEDDTGGQ

SEQ ID NO: 77699 - DNA, 1197 bp, Arabidopsis thaliana
  misc_feature (1)..(1197): Ceres Seq. ID no. 12577199
  misc_feature: MA Experiment ID: 108461 Result: Up-regulated in Transcription
  misc_feature: MA Experiment 108461 PARAMETER Experiment Name: At_Germinating_Seeds_cDNA_P Parameter: Age (day) Value: 1 vs. 0
  misc_feature: MA Experiment 108461 PARAMETER Experiment Name: At_Germinating_Seeds_cDNA_P Parameter: Tissue Value: Germinating Seeds
  misc_feature: MA Experiment ID: 108462 Result: Up-regulated in Transcription
  misc_feature: MA Experiment 108462 PARAMETER Experiment Name: At_Germinating_Seeds_cDNA_P Parameter: Age (day) Value: 2 vs. 0
  misc_feature: MA Experiment 108462 PARAMETER Experiment Name: At_Germinating_Seeds_cDNA_P Parameter: Tissue Value: Germinating Seeds
  misc_feature: MA Experiment ID: 108463 Result: Up-regulated in Transcription
  misc_feature: MA Experiment 108463 PARAMETER Experiment Name: At_Germinating_Seeds_cDNA_P Parameter: Age (day) Value: 3 vs. 0
  misc_feature: MA Experiment 108463 PARAMETER Experiment Name: At_Germinating_Seeds_cDNA_P Parameter: Tissue Value: Germinating Seeds
  misc_feature: MA Experiment ID: 108464 Result: Up-regulated in Transcription
  misc_feature: MA Experiment 108464 PARAMETER Experiment Name: At_Germinating_Seeds_cDNA_P Parameter: Age (day) Value: 4 vs. 0
  misc_feature: MA Experiment 108464 PARAMETER Experiment Name: At_Germinating_Seeds_cDNA_P Parameter: Tissue Value: Germinating Seeds
  misc_feature: MA Experiment ID: 108585 Result: Down-regulated in Transcription
  misc_feature: MA Experiment 108585 PARAMETER Experiment Name: At_5mM_NaNP_cDNA_P Parameter: Timepoint (hr) Value: 6
  misc_feature: MA Experiment 108585 PARAMETER Experiment Name: At_5mM_NaNP_cDNA_P Parameter: Tissue Value: Aerial
  misc_feature: MA Experiment 108585 PARAMETER Experiment Name: At_5mM_NaNP_cDNA_P Parameter: Treatment Value: null
  misc_feature: MA Experiment ID: 108595 Result: Down-regulated in Transcription
  misc_feature: MA Experiment 108595 PARAMETER Experiment Name: At_Ler-pi_Ovule_cDNA_P Parameter: Plant Line Value: null
  misc_feature: MA Experiment ID: 20000069 Result: Down-regulated in Transcription
  misc_feature: MA Experiment 20000069 PARAMETER Experiment Name: At_100uM_ABA_Mutants_cDNA_P Parameter: Plant Line Value: CS23
  misc_feature: MA Experiment 20000069 PARAMETER Experiment Name: At_100uM_ABA_Mutants_cDNA_P Parameter: Timepoint (hr) Value: 6
  misc_feature: MA Experiment 20000069 PARAMETER Experiment Name: At_100uM_ABA_Mutants_cDNA_P Parameter: Tissue Value: Aerial
  misc_feature: MA Experiment 20000069 PARAMETER Experiment Name: At_100uM_ABA_Mutants_cDNA_P Parameter: Treatment Value: 100uM ABA vs. No Treatment
  misc_feature: MA Experiment ID: 20000070 Result: Down-regulated in Transcription
  misc_feature: MA Experiment 20000070 PARAMETER Experiment Name: At_100uM_ABA_Mutants_cDNA_P Parameter: Plant Line Value: CS24
  misc_feature: MA Experiment 20000070 PARAMETER Experiment Name: At_100uM_ABA_Mutants_cDNA_P Parameter: Timepoint (hr) Value: 6
  misc_feature: MA Experiment 20000070 PARAMETER Experiment Name: At_100uM_ABA_Mutants_cDNA_P Parameter: Tissue Value: Aerial
  misc_feature: MA Experiment 20000070 PARAMETER Experiment Name: At_100uM_ABA_Mutants_cDNA_P Parameter: Treatment Value: 100uM ABA vs. No Treatment
  misc_feature: MA Experiment ID: 20000071 Result: Down-regulated in Transcription
  misc_feature: MA Experiment 20000071 PARAMETER Experiment Name: At_100uM_ABA_Mutants_cDNA_P Parameter: Plant Line Value: CS8104
  misc_feature: MA Experiment 20000071 PARAMETER Experiment Name: At_100uM_ABA_Mutants_cDNA_P Parameter: Timepoint (hr) Value: 6
  misc_feature: MA Experiment 20000071 PARAMETER Experiment Name: At_100uM_ABA_Mutants_cDNA_P Parameter: Tissue Value: Aerial
  misc_feature: MA Experiment 20000071 PARAMETER Experiment Name: At_100uM_ABA_Mutants_cDNA_P Parameter: Treatment Value: 100uM ABA vs. No Treatment
  misc_feature: MA Experiment ID: 20000072 Result: Down-regulated in Transcription
  misc_feature: MA Experiment 20000072 PARAMETER Experiment Name: At_100uM_ABA_Mutants_cDNA_P Parameter: Plant Line Value: CS8105
  misc_feature: MA Experiment 20000072 PARAMETER Experiment Name: At_100uM_ABA_Mutants_cDNA_P Parameter: Timepoint (hr) Value: 6
  misc_feature: MA Experiment 20000072 PARAMETER Experiment Name: At_100uM_ABA_Mutants_cDNA_P Parameter: Tissue Value: Aerial
  misc_feature: MA Experiment 20000072 PARAMETER Experiment Name: At_100uM_ABA_Mutants_cDNA_P Parameter: Treatment Value: 100uM ABA vs. No Treatment
  misc_feature: MA Experiment ID: 20000086 Result: Down-regulated in Transcription
  misc_feature: MA Experiment 20000086 PARAMETER Experiment Name: At_100uM_ABA_Mutants_cDNA_P Parameter: Plant Line Value: CS22
  misc_feature: MA Experiment 20000086 PARAMETER Experiment Name: At_100uM_ABA_Mutants_cDNA_P Parameter: Timepoint (hr) Value: 6
  misc_feature: MA Experiment 20000086 PARAMETER Experiment Name: At_100uM_ABA_Mutants_cDNA_P Parameter: Tissue Value: Aerial
  misc_feature: MA Experiment 20000086 PARAMETER Experiment Name: At_100uM_ABA_Mutants_cDNA_P Parameter: Treatment Value: 100uM ABA vs. No Treatment
  misc_feature: MA Experiment ID: 20000087 Result: Down-regulated in Transcription
  misc_feature: MA Experiment 20000087 PARAMETER Experiment Name: At_100uM_ABA_Mutants_cDNA_P Parameter: Plant Line Value: WS
  misc_feature: MA Experiment 20000087 PARAMETER Experiment Name: At_100uM_ABA_Mutants_cDNA_P Parameter: Timepoint (hr) Value: 6
  misc_feature: MA Experiment 20000087 PARAMETER Experiment Name: At_100uM_ABA_Mutants_cDNA_P Parameter: Tissue Value: Aerial
  misc_feature: MA Experiment 20000087 PARAMETER Experiment Name: At_100uM_ABA_Mutants_cDNA_P Parameter: Treatment Value: 100uM ABA vs. No Treatment
  misc_feature: MA Experiment ID: 20000117 Result: Down-regulated in Transcription
  misc_feature: MA Experiment 20000117 PARAMETER Experiment Name: At_100uM_ABA_Mutants_cDNA_P Parameter: Plant Line Value: Columbia
  misc_feature: MA Experiment 20000117 PARAMETER Experiment Name: At_100uM_ABA_Mutants_cDNA_P Parameter: Timepoint (hr) Value: 6
  misc_feature: MA Experiment 20000117 PARAMETER Experiment Name: At_100uM_ABA_Mutants_cDNA_P Parameter: Tissue Value: Aerial
  misc_feature: MA Experiment 20000117 PARAMETER Experiment Name: At_100uM_ABA_Mutants_cDNA_P Parameter: Treatment Value: 100uM ABA vs. No Treatment
agtttcagcgaaacgatggagcttctctgctcaccaacgtctctttcctcctccttcgctctctcttctgctcttttagtccctcgttcgttctccatgccagggacaaggagattcatggttctgtgtagttcccagaaggaaagtcagatgacagtgtcagtaactggagcaactggattcatagggagacgattggttcagagacttcgtgctgataaccacgctatccgggtcttaacacgctctaaatccaaagctgagcaaatatttcctgccaaggacttcccaggtattgtgattgcagaagaatcggagtggaagaactgtgtacaaggctctactgctgttgtgaacttggcaggactgcctattagtacaaggtggtctcccgagatcaagaaagagattaagggcagccggatccgtgtcacctccaaagttgttgacttaatcaataattcaccagcagaagctaggcctaccgttctagttagcgccacggctgttggttactatggtactagtgagacaggagtattcgacgaaaatagtccatcagggaaggactatcttgcagaggtttgcagagaatgggaaggaactgcattgaaagcaaataaggatgttagagtggcacttatccgcattggtgttgttcttggcaaagacggtggagctttggccatgatgataccctttttccaaatgtttgctggaggacctctgggttccggacaacaatggttctcttggattcacgtggatgacttggtgaacttaatttacgaggccctcactaatccatcttataaaggagttattaatgggactgcgccgaatccggttaggcttggggaaatgtgccagcagctaggcagtgttcttagccgaccatcgtggctaccagttcctgactttgcactcaaagctttgctcggagaaggtgccactgtagttctggagggacagaaggtattacctgtaagagccaaagagcttggttttgaattcaagtataaatacgtgaaggatgcactcagagccattatgcaataaggtgacacacataagcatctttgtaaaattggttttgatcacagaaaatccccagaaaaacaagatattcttttcttttcgtctctatatctttctttttgagtaaaactcgagggccgatttggccaatcgaggggg

SEQ ID NO: 77700 - protein, 352 aa, Arabidopsis thaliana
  peptide (1)..(352): Ceres Seq. ID no. 12577200
  misc_feature (53)..(296): Pfam Name: NAD dependent epimerase/dehydratase family Pfam Description: NAD dependent epimerase/dehydratase family
  misc_feature (6)..(352): Homolog of NCBI NO: 18399648 NR Description: expressed protein; protein id: At2g21280.1, by cDNA: gi_11908095, supported by cDNA: gi_12642905, supported cDNA: gi_13265530 [Arabidopsis thaliana]
  misc_feature (72)..(352): Homolog of NCBI NO: 25326146 NR Description: hypothetical protein At2g21280 [imported] -
  misc_feature (51)..(351): Homolog of NCBI NO: 23130096 NR Description: hypothetical protein [Nostoc punctiforme]
  misc_feature (51)..(352): Homolog of NCBI NO: 17229882 NR Description: cell division inhibitor [Nostoc sp. PCC 7120]
  misc_feature (51)..(351): Homolog of NCBI NO: 23043197 NR Description: hypothetical protein [Trichodesmium erythraeum
  misc_feature (51)..(351): Homolog of NCBI NO: 25019701 NR Description: unknown [Synechococcus sp. PCC 7942]
  misc_feature (47)..(351): Homolog of NCBI NO: 16330099 NR Description: cell division inhibitor [Synechocystis sp. PCC
  misc_feature (51)..(351): Homolog of NCBI NO: 7388457 NR Description: Hypothetical protein slr1223
  misc_feature (51)..(352): Homolog of NCBI NO: 22298008 NR Description: ORF_ID:tll0465~putative sugar nucleotide epimerase
  misc_feature (51)..(350): Homolog of NCBI NO: 33239592 NR Description: Predicted nucleoside-diphosphate sugar epimerase
SFSETMELLCSPTSLSSSFALSSALLVPRSFSMPGTRRFMVLCSSQKESQMTVSVTGATGFIGRRLVQRLRADNHAIRVLTRSKSKAEQIFPAKDFPGIVIAEESEWKNCVQGSTAVVNLAGLPISTRWSPEIKKEIKGSRIRVTSKVVDLINNSPAEARPTVLVSATAVGYYGTSETGVFDENSPSGKDYLAEVCREWEGTALKANKDVRVALIRIGVVLGKDGGALAMMIPFFQMFAGGPLGSGQQWFSWIHVDDLVNLIYEALTNPSYKGVINGTAPNPVRLGEMCQQLGSVLSRPSWLPVPDFALKALLGEGATVVLEGQKVLPVRAKELGFEFKYKYVKDALRAIMQ

SEQ ID NO: 77701 - protein, 347 aa, Arabidopsis thaliana; identical to SEQ ID NO: 40612
  peptide (1)..(347): Ceres Seq. ID no. 12577201
  misc_feature (48)..(291): Pfam Name: NAD dependent epimerase/dehydratase family Pfam Description: NAD dependent epimerase/dehydratase family
  misc_feature (1)..(347): Homolog of NCBI NO: 18399648 NR Description: expressed protein; protein id: At2g21280.1, by cDNA: gi_11908095, supported by cDNA: gi_12642905, supported cDNA: gi_13265530 [Arabidopsis thaliana]
  misc_feature (67)..(347): Homolog of NCBI NO: 25326146 NR Description: hypothetical protein At2g21280 [imported] -
  misc_feature (46)..(346): Homolog of NCBI NO: 23130096 NR Description: hypothetical protein [Nostoc punctiforme]
  misc_feature (46)..(347): Homolog of NCBI NO: 17229882 NR Description: cell division inhibitor [Nostoc sp. PCC 7120]
  misc_feature (46)..(346): Homolog of NCBI NO: 23043197 NR Description: hypothetical protein [Trichodesmium erythraeum
  misc_feature (46)..(346): Homolog of NCBI NO: 25019701 NR Description: unknown [Synechococcus sp. PCC 7942]
  misc_feature (42)..(346): Homolog of NCBI NO: 16330099 NR Description: cell division inhibitor [Synechocystis sp. PCC
  misc_feature (46)..(346): Homolog of NCBI NO: 7388457 NR Description: Hypothetical protein slr1223
  misc_feature (46)..(347): Homolog of NCBI NO: 22298008 NR Description: ORF_ID:tll0465~putative sugar nucleotide epimerase
  misc_feature (46)..(345): Homolog of NCBI NO: 33239592 NR Description: Predicted nucleoside-diphosphate sugar epimerase

SEQ ID NO: 77702 - protein, 320 aa, Arabidopsis thaliana; identical to SEQ ID NO: 40613
  peptide (1)..(320): Ceres Seq. ID no. 12577202
  misc_feature (21)..(264): Pfam Name: NAD dependent epimerase/dehydratase family Pfam Description: NAD dependent epimerase/dehydratase family
  misc_feature (1)..(320): Homolog of NCBI NO: 18399648 NR Description: expressed protein; protein id: At2g21280.1, by cDNA: gi_11908095, supported by cDNA: gi_12642905, supported cDNA: gi_13265530 [Arabidopsis thaliana]
  misc_feature (40)..(320): Homolog of NCBI NO: 25326146 NR Description: hypothetical protein At2g21280 [imported] -
  misc_feature (19)..(319): Homolog of NCBI NO: 23130096 NR Description: hypothetical protein [Nostoc punctiforme]
  misc_feature (19)..(320): Homolog of NCBI NO: 17229882 NR Description: cell division inhibitor [Nostoc sp. PCC 7120]
  misc_feature (19)..(319): Homolog of NCBI NO: 23043197 NR Description: hypothetical protein [Trichodesmium erythraeum
  misc_feature (19)..(319): Homolog of NCBI NO: 25019701 NR Description: unknown [Synechococcus sp. PCC 7942]
  misc_feature (15)..(319): Homolog of NCBI NO: 16330099 NR Description: cell division inhibitor [Synechocystis sp. PCC
  misc_feature (19)..(319): Homolog of NCBI NO: 7388457 NR Description: Hypothetical protein slr1223
  misc_feature (19)..(320): Homolog of NCBI NO: 22298008 NR Description: ORF_ID:tll0465~putative sugar nucleotide epimerase
  misc_feature (19)..(318): Homolog of NCBI NO: 33239592 NR Description: Predicted nucleoside-diphosphate sugar epimerase

SEQ ID NO: 77703 - DNA, 892 bp, Arabidopsis thaliana
  misc_feature (1)..(892): Ceres Seq. ID no. 12577221
  misc_feature: MA Experiment ID: 20000286 Result: Down-regulated in Transcription
  misc_feature: MA Experiment 20000286 PARAMETER Experiment Name: At_Open_Flower_P Parameter: Age (day) Value: 21
  misc_feature: MA Experiment 20000286 PARAMETER Experiment Name: At_Open_Flower_P Parameter: Plant Line Value: WS
  misc_feature: MA Experiment 20000286 PARAMETER Experiment Name: At_Open_Flower_P Parameter: Tissue Value: Half Open vs. Whole Plant
  misc_feature: MA Experiment ID: 20000439 Result: Down-regulated in Transcription
  misc_feature: MA Experiment 20000439 PARAMETER Experiment Name: At_Roots__P Parameter: Age (day) Value: 14 vs. 21
  misc_feature: MA Experiment 20000439 PARAMETER Experiment Name: At_Roots__P Parameter: Organism Value: A. thaliana
  misc_feature: MA Experiment 20000439 PARAMETER Experiment Name: At_Roots__P Parameter: Tissue Value: Roots vs. Whole Plant
gtcgcgcatttagcgttgttttgaagctctctctttcaaattctgttcgtctctcgcgatctctctctctctctcagatagctccgaaactttcacgcagagttaagtgaagcaggatgggattgtcattcgccaagctttttagcaggctttttgccaagaaggagatgagaattctgatggttggtcttgatgctgctggtaagaccaccattttgtacaagctcaagctcggagagattgtaaccaccattcccactattgggttcaatgtggagactgtggagtacaagaacatcagtttcacagtgtgggatgtcggcggtcaggataagatccgtcccttgtggaggcattacttccagaacacccaaggtcttatctttgtggtggacagcaatgacagagaccgtgttgttgaggctagagatgaattgcaccgaatgttgaatgaggacgagctgcgtgatgctgttctgctcgtatttgctaacaagcaggatctcccaaatgctatgaatgcagctgagatcacggataagcttggtctccactctctccgtcagcgtcactggtacatccagagcacatgtgccacttcaggcgaggggctttacgaaggtcttgactggttgtccaacaacattgccggcaaggcgtagagggaaagttcgtggtggagttgatttgctgagcaaatctggatgcaggggcaaacattatctgaattttttttttggtttccgttttcgttattgttctgcttttttttttgggatatgtcgatggattttgtgattgtacgtagaacttagaaaaaaactaccttttatatagttttggtaaaactgtaatcgaagatttcacctactgctttcgtggttttggtcac

SEQ ID NO: 77704 - protein, 181 aa, Arabidopsis thaliana; identical to SEQ ID NO: 22281
  peptide (1)..(181): Ceres Seq. ID no. 12577222
  misc_feature (4)..(169): Pfam Name: ADP-ribosylation factor family Pfam Description: ADP-ribosylation factor family
  misc_feature (1)..(169): Homolog of NCBI NO: 8778579 NR Description: F28C11.12 [Arabidopsis thaliana]
  misc_feature (1)..(181): Homolog of NCBI NO: 15223164 NR Description: putative ADP-ribosylation factor 1; protein id: supported by cDNA: 33126., supported by cDNA: gi_13430503,
  misc_feature (1)..(180): Homolog of NCBI NO: 25294174 NR Description: F5O8.5 protein - Arabidopsis thaliana
  misc_feature (1)..(181): Homolog of NCBI NO: 30681825 NR Description: ADP-ribosylation factor, putative [Arabidopsis
  misc_feature (1)..(181): Homolog of NCBI NO: 15226521 NR Description: ADP-ribosylation factor 1; protein id: supported by cDNA: 34414., supported by cDNA: gi_18650621, by cDNA: gi_553037 [Arabidopsis thaliana]
  misc_feature (1)..(181): Homolog of NCBI NO: 25294169 NR Description: ADP-ribosylation factor [imported] - pepper
  misc_feature (1)..(180): Homolog of NCBI NO: 17154685 NR Description: ADP-ribosylation factor [Gossypium hirsutum]
  misc_feature (1)..(180): Homolog of NCBI NO: 6573751 NR Description: F20B24.7 [Arabidopsis thaliana]
  misc_feature (1)..(181): Homolog of NCBI NO: 34909214 NR Description: putative ADP-ribosylation factor [Oryza sativa
  misc_feature (1)..(181): Homolog of NCBI NO: 15228723 NR Description: ADP-ribosylation factor-like protein; protein id: supported by cDNA: 14909., supported by cDNA: gi_13926301, by cDNA: gi_16323247 [Arabidopsis thaliana]

SEQ ID NO: 77705 - protein, 164 aa, Arabidopsis thaliana; identical to SEQ ID NO: 22282
  peptide (1)..(164): Ceres Seq. ID no. 12577223
  misc_feature (1)..(152): Pfam Name: ADP-ribosylation factor family Pfam Description: ADP-ribosylation factor family
  misc_feature (1)..(152): Homolog of NCBI NO: 8778579 NR Description: F28C11.12 [Arabidopsis thaliana]
  misc_feature (1)..(164): Homolog of NCBI NO: 15223164 NR Description: putative ADP-ribosylation factor 1; protein id: supported by cDNA: 33126., supported by cDNA: gi_13430503,
  misc_feature (1)..(163): Homolog of NCBI NO: 25294174 NR Description: F5O8.5 protein - Arabidopsis thaliana
  misc_feature (1)..(164): Homolog of NCBI NO: 30681825 NR Description: ADP-ribosylation factor, putative [Arabidopsis
  misc_feature (1)..(164): Homolog of NCBI NO: 15226521 NR Description: ADP-ribosylation factor 1; protein id: supported by cDNA: 34414., supported by cDNA: gi_18650621, by cDNA: gi_553037 [Arabidopsis thaliana]
  misc_feature (1)..(164): Homolog of NCBI NO: 25294169 NR Description: ADP-ribosylation factor [imported] - pepper
  misc_feature (1)..(163): Homolog of NCBI NO: 17154685 NR Description: ADP-ribosylation factor [Gossypium hirsutum]
  misc_feature (1)..(163): Homolog of NCBI NO: 6573751 NR Description: F20B24.7 [Arabidopsis thaliana]
  misc_feature (1)..(164): Homolog of NCBI NO: 34909214 NR Description: putative ADP-ribosylation factor [Oryza sativa
  misc_feature (1)..(164): Homolog of NCBI NO: 15228723 NR Description: ADP-ribosylation factor-like protein; protein id: supported by cDNA: 14909., supported by cDNA: gi_13926301, by cDNA: gi_16323247 [Arabidopsis thaliana]

SEQ ID NO: 77706 - protein, 160 aa, Arabidopsis thaliana; identical to SEQ ID NO: 22283
  peptide (1)..(160): Ceres Seq. ID no. 12577224
  misc_feature (1)..(148): Pfam Name: ADP-ribosylation factor family Pfam Description: ADP-ribosylation factor family
  misc_feature (1)..(148): Homolog of NCBI NO: 8778579 NR Description: F28C11.12 [Arabidopsis thaliana]
  misc_feature (1)..(160): Homolog of NCBI NO: 15223164 NR Description: putative ADP-ribosylation factor 1; protein id: supported by cDNA: 33126., supported by cDNA: gi_13430503,
  misc_feature (1)..(159): Homolog of NCBI NO: 25294174 NR Description: F5O8.5 protein - Arabidopsis thaliana
  misc_feature (1)..(160): Homolog of NCBI NO: 30681825 NR Description: ADP-ribosylation factor, putative [Arabidopsis
  misc_feature (1)..(160): Homolog of NCBI NO: 15226521 NR Description: ADP-ribosylation factor 1; protein id: supported by cDNA: 34414., supported by cDNA: gi_18650621, by cDNA: gi_553037 [Arabidopsis thaliana]
  misc_feature (1)..(160): Homolog of NCBI NO: 25294169 NR Description: ADP-ribosylation factor [imported] - pepper
  misc_feature (1)..(159): Homolog of NCBI NO: 17154685 NR Description: ADP-ribosylation factor [Gossypium hirsutum]
  misc_feature (1)..(159): Homolog of NCBI NO: 6573751 NR Description: F20B24.7 [Arabidopsis thaliana]
  misc_feature (1)..(160): Homolog of NCBI NO: 34909214 NR Description: putative ADP-ribosylation factor [Oryza sativa
  misc_feature (1)..(160): Homolog of NCBI NO: 15228723 NR Description: ADP-ribosylation factor-like protein; protein id: supported by cDNA: 14909., supported by cDNA: gi_13926301, by cDNA: gi_16323247 [Arabidopsis thaliana]

SEQ ID NO: 77707 - DNA, 1145 bp, Arabidopsis thaliana
  misc_feature (1)..(1145): Ceres Seq. ID no. 12577233
  misc_feature: MA Experiment ID: 20000173 Result: Up-regulated in Transcription
  misc_feature: MA Experiment 20000173 PARAMETER Experiment Name: At_42deg_Heat_P Parameter: Age (day) Value: 14
  misc_feature: MA Experiment 20000173 PARAMETER Experiment Name: At_42deg_Heat_P Parameter: Organism Value: A. thaliana
  misc_feature: MA Experiment 20000173 PARAMETER Experiment Name: At_42deg_Heat_P Parameter: Plant Line Value: WS
  misc_feature: MA Experiment 20000173 PARAMETER Experiment Name: At_42deg_Heat_P Parameter: Temperature (deg C) Value: 42 vs. 22
  misc_feature: MA Experiment 20000173 PARAMETER Experiment Name: At_42deg_Heat_P Parameter: Timepoint (hr) Value: 6
  misc_feature: MA Experiment 20000173 PARAMETER Experiment Name: At_42deg_Heat_P Parameter: Tissue Value: Aerial
  misc_feature: MA Experiment ID: 20000184 Result: Up-regulated in Transcription
  misc_feature: MA Experiment 20000184 PARAMETER Experiment Name: At_Shoots__P Parameter: Age (day) Value: 7
  misc_feature: MA Experiment 20000184 PARAMETER Experiment Name: At_Shoots__P Parameter: Tissue Value: Shoots vs. Whole Plant
  misc_feature: MA Experiment ID: 20000264 Result: Up-regulated in Transcription
  misc_feature: MA Experiment 20000264 PARAMETER Experiment Name: At_Open_Flower_P Parameter: Age (day) Value: 21
  misc_feature: MA Experiment 20000264 PARAMETER Experiment Name: At_Open_Flower_P Parameter: Plant Line Value: WS
  misc_feature: MA Experiment 20000264 PARAMETER Experiment Name: At_Open_Flower_P Parameter: Tissue Value: Open Flower vs. Whole Plant
  misc_feature: MA Experiment ID: 20000439 Result: Down-regulated in Transcription
  misc_feature: MA Experiment 20000439 PARAMETER Experiment Name: At_Roots__P Parameter: Age (day) Value: 14 vs. 21
  misc_feature: MA Experiment 20000439 PARAMETER Experiment Name: At_Roots__P Parameter: Organism Value: A. thaliana
  misc_feature: MA Experiment 20000439 PARAMETER Experiment Name: At_Roots__P Parameter: Tissue Value: Roots vs. Whole Plant
  misc_feature: MA Experiment ID: 20000794 Result: Up-regulated in Transcription
  misc_feature: MA Experiment 20000794 PARAMETER Experiment Name: At_Petals_P Parameter: Age (day) Value: 23-25 days
  misc_feature: MA Experiment 20000794 PARAMETER Experiment Name: At_Petals_P Parameter: Plant Line Value: WS
  misc_feature: MA Experiment 20000794 PARAMETER Experiment Name: At_Petals_P Parameter: Tissue Value: Petals vs. Whole plant
  misc_feature: MA Experiment ID: 20001248 Result: Down-regulated in Transcription
  misc_feature: MA Experiment 20001248 PARAMETER Experiment Name: At_Far-red-induction_P Parameter: Age (day) Value: 7
  misc_feature: MA Experiment 20001248 PARAMETER Experiment Name: At_Far-red-induction_P Parameter: Light Value: Far-red vs. White
  misc_feature: MA Experiment 20001248 PARAMETER Experiment Name: At_Far-red-induction_P Parameter: Organism Value: A. thaliana
  misc_feature: MA Experiment 20001248 PARAMETER Experiment Name: At_Far-red-induction_P Parameter: Plant Line Value: Columbia
  misc_feature: MA Experiment 20001248 PARAMETER Experiment Name: At_Far-red-induction_P Parameter: Timepoint (hr) Value: 4
  misc_feature: MA Experiment 20001248 PARAMETER Experiment Name: At_Far-red-induction_P Parameter: Tissue Value: Whole Plant
  misc_feature: MA Experiment ID: 20001557 Result: Up-regulated in Transcription
  misc_feature: MA Experiment 20001557 PARAMETER Experiment Name: At_Drought_Soil_Dry_P Parameter: Age (day) Value: 27
  misc_feature: MA Experiment 20001557 PARAMETER Experiment Name: At_Drought_Soil_Dry_P Parameter: Organism Value: A. thaliana
  misc_feature: MA Experiment 20001557 PARAMETER Experiment Name: At_Drought_Soil_Dry_P Parameter: Plant Line Value: WS
  misc_feature: MA Experiment 20001557 PARAMETER Experiment Name: At_Drought_Soil_Dry_P Parameter: Post Timepoint (hr) Value: 3
  misc_feature: MA Experiment 20001557 PARAMETER Experiment Name: At_Drought_Soil_Dry_P Parameter: Post-Treatment Value: Re-Water vs. No Drought
  misc_feature: MA Experiment 20001557 PARAMETER Experiment Name: At_Drought_Soil_Dry_P Parameter: Timepoint (day) Value: 13
  misc_feature: MA Experiment 20001557 PARAMETER Experiment Name: At_Drought_Soil_Dry_P Parameter: Treatment Value: Drought vs. No Drought
  misc_feature: MA Experiment ID: 20001904 Result: Up-regulated in Transcription
  misc_feature: MA Experiment 20001904 PARAMETER Experiment Name: At_Drought_Reproduction_P Parameter: Age (day) Value: 37
  misc_feature: MA Experiment 20001904 PARAMETER Experiment Name: At_Drought_Reproduction_P Parameter: Organism Value: A. thaliana
  misc_feature: MA Experiment 20001904 PARAMETER Experiment Name: At_Drought_Reproduction_P Parameter: Plant Line Value: WS
  misc_feature: MA Experiment 20001904 PARAMETER Experiment Name: At_Drought_Reproduction_P Parameter: Timepoint (day) Value: 7
  misc_feature: MA Experiment 20001904 PARAMETER Experiment Name: At_Drought_Reproduction_P Parameter: Tissue Value: Rosettes
  misc_feature: MA Experiment 20001904 PARAMETER Experiment Name: At_Drought_Reproduction_P Parameter: Treatment Value: Drought vs. No Drought
ctgtctatctatctctctcgctcgcataaaaggttaacctcaaaacaagtagctcctccttccattaggatggcggcaggactctcaaccgccgttacattcaaaccactccaccgctctttctcctcctcctctaccgatttccgactccgcctcccgaaatccttatccggattctctccgtctcttcgatttaaacgcttttctgtctgttacgtcgtcgaagaacggagacagaattctccgattgagaacgatgagagaccggagagcacgagctccacaaacgctatagacgctgagtatctggcgttgcgtttggcggagaaattggagaggaagaaatcggagaggtccacttatctaatcgctgctatgttgtcgagctttggtatcacttctatggctgttatggctgtttactacagattctcttggcaaatggagggaggtgagatctcaatgttggaaatgtttggtacatttgctctctctgttggtgctgctgttggtatggaattctgggcaagatgggctcatagagctctgtggcacgcttctctatggaatatgcatgagtcacatcacaaaccaagagaaggaccgtttgagctaaacgatgtttttgctatagtgaacgctggtccagcgattggtctcctctcttatggattcttcaataaaggactcgttcctggtctctgctttggcgccgggttaggcataacggtgtttggaatcgcctacatgtttgtccacgatggtctcgtgcacaagcgtttccctgtaggtcccatcgccgacgtcccttacctccgaaaggtcgccgccgctcaccagctacatcacacagacaagttcaatggtgtaccatatggactgtttcttggacccaaggaattggaagaagttggaggaaatgaagagttagataaggagattagtcggagaatcaaatcatacaaaaaggcctcgggctccgggtcgagttcgagttcttgactttaaacaagttttaaatcccaaattctttttttgtcttctgtcattatgatcatcttaagacggtctatgttgataaatcctatatgccgattttgattttaatgaatattttaaaaaatataaatacctctctttcttgc

SEQ ID NO: 77708 - protein, 333 aa, Arabidopsis thaliana
  peptide (1)..(333): Ceres Seq. ID no. 12577234
  misc_feature (159)..(318): Pfam Name: Carotene hydroxylase Pfam Description: Carotene hydroxylase
  misc_feature (24)..(333): Homolog of NCBI NO: 15235959 NR Description: beta-carotene hydroxylase; protein id: supported by cDNA: gi_13877914, supported by cDNA: gi_21280902,
  misc_feature (40)..(333): Homolog of NCBI NO: 1575296 NR Description: beta-carotene hydroxylase [Arabidopsis thaliana]
  misc_feature (24)..(327): Homolog of NCBI NO: 15237204 NR Description: beta-carotene hydroxylase, putative; protein id:
  misc_feature (64)..(323): Homolog of NCBI NO: 9988836 NR Description: beta-carotene hydroxylase [Citrus unshiu]
  misc_feature (64)..(323): Homolog of NCBI NO: 11245486 NR Description: beta-carotene hydroxylase [Citrus unshiu]
  misc_feature (24)..(321): Homolog of NCBI NO: 9971820 NR Description: beta hydroxylase [Tagetes erecta]
  misc_feature (23)..(322): Homolog of NCBI NO: 5870598 NR Description: beta-carotene hydroxylase [Lycopersicon
  misc_feature (56)..(325): Homolog of NCBI NO: 2956717 NR Description: beta-carotene hydroxylase 2 [Capsicum annuum]
  misc_feature (52)..(322): Homolog of NCBI NO: 5870600 NR Description: beta-carotene hydroxylase [Lycopersicon
  misc_feature (61)..(320): Homolog of NCBI NO: 21734857 NR Description: beta-carotene hydroxylase [Vitis vinifera]
LSIYLSRSHKRLTSKQVAPPSIRMAAGLSTAVTFKPLHRSFSSSSTDFRLRLPKSLSGFSPSLRFKRFSVCYVVEERRQNSPIENDERPESTSSTNAIDAEYLALRLAEKLERKKSERSTYLIAAMLSSFGITSMAVMAVYYRFSWQMEGGEISMLEMFGTFALSVGAAVGMEFWARWAHRALWHASLWNMHESHHKPREGPFELNDVFAIVNAGPAIGLLSYGFFNKGLVPGLCFGAGLGITVFGIAYMFVHDGLVHKRFPVGPIADVPYLRKVAAAHQLHHTDKFNGVPYGLFLGPKELEEVGGNEELDKEISRRIKSYKKASGSGSSSSS

SEQ ID NO: 77709 - protein, 310 aa, Arabidopsis thaliana
  peptide (1)..(310): Ceres Seq. ID no. 12577235
  misc_feature (136)..(295): Pfam Name: Carotene hydroxylase Pfam Description: Carotene hydroxylase
  misc_feature (1)..(310): Homolog of NCBI NO: 15235959 NR Description: beta-carotene hydroxylase; protein id: supported by cDNA: gi_13877914, supported by cDNA: gi_21280902,
  misc_feature (17)..(310): Homolog of NCBI NO: 1575296 NR Description: beta-carotene hydroxylase [Arabidopsis thaliana]
  misc_feature (1)..(304): Homolog of NCBI NO: 15237204 NR Description: beta-carotene hydroxylase, putative; protein id:
  misc_feature (41)..(300): Homolog of NCBI NO: 9988836 NR Description: beta-carotene hydroxylase [Citrus unshiu]
  misc_feature (41)..(300): Homolog of NCBI NO: 11245486 NR Description: beta-carotene hydroxylase [Citrus unshiu]
  misc_feature (1)..(298): Homolog of NCBI NO: 9971820 NR Description: beta hydroxylase [Tagetes erecta]
  misc_feature (1)..(299): Homolog of NCBI NO: 5870598 NR Description: beta-carotene hydroxylase [Lycopersicon
  misc_feature (33)..(302): Homolog of NCBI NO: 2956717 NR Description: beta-carotene hydroxylase 2 [Capsicum annuum]
  misc_feature (29)..(299): Homolog of NCBI NO: 5870600 NR Description: beta-carotene hydroxylase [Lycopersicon
  misc_feature (38)..(297): Homolog of NCBI NO: 21734857 NR Description: beta-carotene hydroxylase [Vitis vinifera]
MAAGLSTAVTFKPLHRSFSSSSTDFRLRLPKSLSGFSPSLRFKRFSVCYVVEERRQNSPIENDERPESTSSTNAIDAEYLALRLAEKLERKKSERSTYLIAAMLSSFGITSMAVMAVYYRFSWQMEGGEISMLEMFGTFALSVGAAVGMEFWARWAHRALWHASLWNMHESHHKPREGPFELNDVFAIVNAGPAIGLLSYGFFNKGLVPGLCFGAGLGITVFGIAYMFVHDGLVHKRFPVGPIADVPYLRKVAAAHQLHHTDKFNGVPYGLFLGPKELEEVGGNEELDKEISRRIKSYKKASGSGSSSSS

SEQ ID NO: 77710 - protein, 208 aa, Arabidopsis thaliana
  peptide (1)..(208): Ceres Seq. ID no. 12577236
  misc_feature (34)..(193): Pfam Name: Carotene hydroxylase Pfam Description: Carotene hydroxylase
  misc_feature (1)..(208): Homolog of NCBI NO: 15235959 NR Description: beta-carotene hydroxylase; protein id: supported by cDNA: gi_13877914, supported by cDNA: gi_21280902,
  misc_feature (1)..(208): Homolog of NCBI NO: 1575296 NR Description: beta-carotene hydroxylase [Arabidopsis thaliana]
  misc_feature (1)..(202): Homolog of NCBI NO: 15237204 NR Description: beta-carotene hydroxylase, putative; protein id:
  misc_feature (1)..(198): Homolog of NCBI NO: 9988836 NR Description: beta-carotene hydroxylase [Citrus unshiu]
  misc_feature (1)..(198): Homolog of NCBI NO: 11245486 NR Description: beta-carotene hydroxylase [Citrus unshiu]
  misc_feature (1)..(196): Homolog of NCBI NO: 9971820 NR Description: beta hydroxylase [Tagetes erecta]
  misc_feature (1)..(197): Homolog of NCBI NO: 5870598 NR Description: beta-carotene hydroxylase [Lycopersicon
  misc_feature (1)..(200): Homolog of NCBI NO: 2956717 NR Description: beta-carotene hydroxylase 2 [Capsicum annuum]
  misc_feature (1)..(197): Homolog of NCBI NO: 5870600 NR Description: beta-carotene hydroxylase [Lycopersicon
  misc_feature (1)..(195): Homolog of NCBI NO: 21734857 NR Description: beta-carotene hydroxylase [Vitis vinifera]
MLSSFGITSMAVMAVYYRFSWQMEGGEISMLEMFGTFALSVGAAVGMEFWARWAHRALWHASLWNMHESHHKPREGPFELNDVFAIVNAGPAIGLLSYGFFNKGLVPGLCFGAGLGITVFGIAYMFVHDGLVHKRFPVGPIADVPYLRKVAAAHQLHHTDKFNGVPYGLFLGPKELEEVGGNEELDKEISRRIKSYKKASGSGSSSSS

SEQ ID NO: 77711 - DNA, 896 bp, Arabidopsis thaliana
  misc_feature (1)..(896): Ceres Seq. ID no. 12577241
  misc_feature: MA Experiment ID: 108434 Result: Up-regulated in Transcription
  misc_feature: MA Experiment 108434 PARAMETER Experiment Name: At_Root_Tips_cDNA_P Parameter: Tissue Value: Root Tips
  misc_feature: MA Experiment ID: 108464 Result: Down-regulated in Transcription
  misc_feature: MA Experiment 108464 PARAMETER Experiment Name: At_Germinating_Seeds_cDNA_P Parameter: Age (day) Value: 4 vs. 0
  misc_feature: MA Experiment 108464 PARAMETER Experiment Name: At_Germinating_Seeds_cDNA_P Parameter: Tissue Value: Germinating Seeds
  misc_feature: MA Experiment ID: 108576 Result: Down-regulated in Transcription
  misc_feature: MA Experiment 108576 PARAMETER Experiment Name: At_42deg_Heat_cDNA_P Parameter: Temperature (deg C) Value: 42 vs. 22
  misc_feature: MA Experiment 108576 PARAMETER Experiment Name: At_42deg_Heat_cDNA_P Parameter: Timepoint (hr) Value: 1
  misc_feature: MA Experiment 108576 PARAMETER Experiment Name: At_42deg_Heat_cDNA_P Parameter: Tissue Value: Aerial
  misc_feature: MA Experiment ID: 108668 Result: Down-regulated in Transcription
  misc_feature: MA Experiment 108668 PARAMETER Experiment Name: At_2mM_SA_cDNA_P Parameter: Plant Line Value: WS
  misc_feature: MA Experiment 108668 PARAMETER Experiment Name: At_2mM_SA_cDNA_P Parameter: Timepoint (hr) Value: 6
  misc_feature: MA Experiment 108668 PARAMETER Experiment Name: At_2mM_SA_cDNA_P Parameter: Treatment Value: 2mM SA vs. No Treatment
  misc_feature: MA Experiment ID: 20000184 Result: Up-regulated in Transcription
  misc_feature: MA Experiment 20000184 PARAMETER Experiment Name: At_Shoots__P Parameter: Age (day) Value: 7
  misc_feature: MA Experiment 20000184 PARAMETER Experiment Name: At_Shoots__P Parameter: Tissue Value: Shoots vs. Whole Plant
  misc_feature: MA Experiment ID: 20000224 Result: Down-regulated in Transcription
  misc_feature: MA Experiment ID: 20000451 Result: Down-regulated in Transcription
  misc_feature: MA Experiment 20000451 PARAMETER Experiment Name: At_CS6879_Shoots-Roots_P Parameter: Age (day) Value: 14
  misc_feature: MA Experiment 20000451 PARAMETER Experiment Name: At_CS6879_Shoots-Roots_P Parameter: Organism Value: A. thaliana
  misc_feature: MA Experiment 20000451 PARAMETER Experiment Name: At_CS6879_Shoots-Roots_P Parameter: Plant Line Value: CS6879 vs. WS
  misc_feature: MA Experiment 20000451 PARAMETER Experiment Name: At_CS6879_Shoots-Roots_P Parameter: Tissue Value: Roots
  misc_feature: MA Experiment ID: 20000452 Result: Down-regulated in Transcription
  misc_feature: MA Experiment 20000452 PARAMETER Experiment Name: At_CS6879_Shoots-Roots_P Parameter: Age (day) Value: 14
  misc_feature: MA Experiment 20000452 PARAMETER Experiment Name: At_CS6879_Shoots-Roots_P Parameter: Organism Value: A. thaliana
  misc_feature: MA Experiment 20000452 PARAMETER Experiment Name: At_CS6879_Shoots-Roots_P Parameter: Plant Line Value: CS6879 vs. WS
  misc_feature: MA Experiment 20000452 PARAMETER Experiment Name: At_CS6879_Shoots-Roots_P Parameter: Tissue Value: Shoots
agagtgtttccgacaagctctctctttaagacaatccatctctttcttcaagctaagccccgacggaaagctaaactcattgcttaaatagattccctcatatctgagccgaaggttaactacatgaccggcgctgagaacggcgtgagaatgacgtcaccagaggcgtcttcaacatcctccctcgccaccacaagtgtccacgtaagcgctctcgacggactcgtgaacgtgaactctctcttcaccatcgccgtcttcgttggtctttccttagcgactccaggacaacacagcctcgaacaacgatccagctgcgacgcaagtgctgacgtcgccaagaagctactggtcttcgaagtcgtctccttcagcttcttcctcttctcctctcttgtagctcagggtcttaagcttgccttaaaccttcttaatagcaaagacgtcaacgagattttcagagctcacatcaatatcaaggttttgagatggggaatgatggcttctgctgtcggatctgtaatgggctgtctcttcttgatgctctctatggttaatgtgattcagatccgtcttggtttgctctcttgcggcagcaaatcggcggctcaagctgttgcaacgctcgtcactctggtttcctctgctctgctgatttacatctctaccgccatttacgctttctggcattgatgctatgtcaaaattggataatgtccatggctttgttttgattagccaatgtgtaatttcatcatcaatgccttccaatctagttttttgtttttttgtttcggagaatgaagaatcaatcacaagatacagaacattggattatgagaatttgatgttaagcttttatgaacagaaatgaagcattatgtttgttgtttggt

SEQ ID NO: 77712 - protein, 189 aa, Arabidopsis thaliana
  peptide (1)..(189): Ceres Seq. ID no. 12577242
  misc_feature (1)..(189): Homolog of NCBI NO: 18397969 NR Description: expressed protein; protein id: At3g07510.1, by cDNA: gi_13877548, supported by cDNA: gi_20148734 [Arabidopsis >gi|13877549|gb|AAK43852.1|AF370475_1 Unknown protein
  misc_feature (10)..(189): Homolog of NCBI NO: 6041846 NR Description: unknown protein [Arabidopsis thaliana]
  misc_feature (3)..(189): Homolog of NCBI NO: 37531676 NR Description: hypothetical protein [Oryza sativa (japonica group)] >gi|21671930|gb|AAM74292.1| Hypothetical protein [Oryza
  misc_feature (5)..(187): Homolog of NCBI NO: 15226312 NR Description: hypothetical protein; protein id: At2g01580.1
  misc_feature (23)..(187): Homolog of NCBI NO: 15239293 NR Description: putative protein; protein id: At5g05950.1, by cDNA: 252000. [Arabidopsis thaliana] gene_id:K18J17.12~pir||T12959~similar to unknown protein
  misc_feature (24)..(187): Homolog of NCBI NO: 34395171 NR Description: unknown protein [Oryza sativa (japonica
  misc_feature (24)..(187): Homolog of NCBI NO: 34900646 NR Description: hypothetical protein~similar to Arabidopsis
  misc_feature (26)..(107): Homolog of NCBI NO: 38345578 NR Description: OSJNBa0027H06.14 [Oryza sativa (japonica
  misc_feature (120)..(189): Homolog of NCBI NO: 38345578 NR Description: OSJNBa0027H06.14 [Oryza sativa (japonica
  misc_feature (26)..(187): Homolog of NCBI NO: 15232676 NR Description: putative protein; protein id: At3g46890.1
MTGAENGVRMTSPEASSTSSLATTSVHVSALDGLVNVNSLFTIAVFVGLSLATPGQHSLEQRSSCDASADVAKKLLVFEVVSFSFFLFSSLVAQGLKLALNLLNSKDVNEIFRAHINIKVLRWGMMASAVGSVMGCLFLMLSMVNVIQIRLGLLSCGSKSAAQAVATLVTLVSSALLIYISTAIYAFWH

SEQ ID NO: 77713 - protein, 180 aa, Arabidopsis thaliana
  peptide (1)..(180): Ceres Seq. ID no. 12577243
  misc_feature (1)..(180): Homolog of NCBI NO: 18397969 NR Description: expressed protein; protein id: At3g07510.1, by cDNA: gi_13877548, supported by cDNA: gi_20148734 [Arabidopsis >gi|13877549|gb|AAK43852.1|AF370475_1 Unknown protein
  misc_feature (1)..(180): Homolog of NCBI NO: 6041846 NR Description: unknown protein [Arabidopsis thaliana]
  misc_feature (1)..(180): Homolog of NCBI NO: 37531676 NR Description: hypothetical protein [Oryza sativa (japonica group)] >gi|21671930|gb|AAM74292.1| Hypothetical protein [Oryza
  misc_feature (1)..(178): Homolog of NCBI NO: 15226312 NR Description: hypothetical protein; protein id: At2g01580.1
  misc_feature (14)..(178): Homolog of NCBI NO: 15239293 NR Description: putative protein; protein id: At5g05950.1, by cDNA: 252000. [Arabidopsis thaliana] gene_id:K18J17.12~pir||T12959~similar to unknown protein
  misc_feature (15)..(178): Homolog of NCBI NO: 34395171 NR Description: unknown protein [Oryza sativa (japonica
  misc_feature (15)..(178): Homolog of NCBI NO: 34900646 NR Description: hypothetical protein~similar to Arabidopsis
  misc_feature (17)..(98): Homolog of NCBI NO: 38345578 NR Description: OSJNBa0027H06.14 [Oryza sativa (japonica
  misc_feature (111)..(180): Homolog of NCBI NO: 38345578 NR Description: OSJNBa0027H06.14 [Oryza sativa (japonica
  misc_feature (17)..(178): Homolog of NCBI NO: 15232676 NR Description: putative protein; protein id: At3g46890.1
MTSPEASSTSSLATTSVHVSALDGLVNVNSLFTIAVFVGLSLATPGQHSLEQRSSCDASADVAKKLLVFEVVSFSFFLFSSLVAQGLKLALNLLNSKDVNEIFRAHINIKVLRWGMMASAVGSVMGCLFLMLSMVNVIQIRLGLLSCGSKSAAQAVATLVTLVSSALLIYISTAIYAFWH

SEQ ID NO: 77714 - DNA, 1675 bp, Arabidopsis thaliana
  misc_feature (1)..(1675): Ceres Seq. ID no. 12577247
  misc_feature: MA Experiment ID: 108434 Result: Up-regulated in Transcription
  misc_feature: MA Experiment 108434 PARAMETER Experiment Name: At_Root_Tips_cDNA_P Parameter: Tissue Value: Root Tips
  misc_feature: MA Experiment ID: 108461 Result: Down-regulated in Transcription
  misc_feature: MA Experiment 108461 PARAMETER Experiment Name: At_Germinating_Seeds_cDNA_P Parameter: Age (day) Value: 1 vs. 0
  misc_feature: MA Experiment 108461 PARAMETER Experiment Name: At_Germinating_Seeds_cDNA_P Parameter: Tissue Value: Germinating Seeds
  misc_feature: MA Experiment ID: 108462 Result: Down-regulated in Transcription
  misc_feature: MA Experiment 108462 PARAMETER Experiment Name: At_Germinating_Seeds_cDNA_P Parameter: Age (day) Value: 2 vs. 0
  misc_feature: MA Experiment 108462 PARAMETER Experiment Name: At_Germinating_Seeds_cDNA_P Parameter: Tissue Value: Germinating Seeds
  misc_feature: MA Experiment ID: 108463 Result: Down-regulated in Transcription
  misc_feature: MA Experiment 108463 PARAMETER Experiment Name: At_Germinating_Seeds_cDNA_P Parameter: Age (day) Value: 3 vs. 0
  misc_feature: MA Experiment 108463 PARAMETER Experiment Name: At_Germinating_Seeds_cDNA_P Parameter: Tissue Value: Germinating Seeds
  misc_feature: MA Experiment ID: 108464 Result: Down-regulated in Transcription
  misc_feature: MA Experiment 108464 PARAMETER Experiment Name: At_Germinating_Seeds_cDNA_P Parameter: Age (day) Value: 4 vs. 0
  misc_feature: MA Experiment 108464 PARAMETER Experiment Name: At_Germinating_Seeds_cDNA_P Parameter: Tissue Value: Germinating Seeds
  misc_feature: MA Experiment ID: 108573 Result: Up-regulated in Transcription
  misc_feature: MA Experiment 108573 PARAMETER Experiment Name: At_Drought_cDNA_P Parameter: Timepoint (hr) Value: 6
  misc_feature: MA Experiment 108573 PARAMETER Experiment Name: At_Drought_cDNA_P Parameter: Tissue Value: Aerial
  misc_feature: MA Experiment 108573 PARAMETER Experiment Name: At_Drought_cDNA_P Parameter: Treatment Value: Drought vs. No Drought
  misc_feature: MA Experiment ID: 20000087 Result: Down-regulated in Transcription
  misc_feature: MA Experiment 20000087 PARAMETER Experiment Name: At_100uM_ABA_Mutants_cDNA_P Parameter: Plant Line Value: WS
  misc_feature: MA Experiment 20000087 PARAMETER Experiment Name: At_100uM_ABA_Mutants_cDNA_P Parameter: Timepoint (hr) Value: 6
  misc_feature: MA Experiment 20000087 PARAMETER Experiment Name: At_100uM_ABA_Mutants_cDNA_P Parameter: Tissue Value: Aerial
  misc_feature: MA Experiment 20000087 PARAMETER Experiment Name: At_100uM_ABA_Mutants_cDNA_P Parameter: Treatment Value: 100uM ABA vs. No Treatment
  misc_feature: MA Experiment ID: 20000111 Result: Up-regulated in Transcription
  misc_feature: MA Experiment 20000111 PARAMETER Experiment Name: At_42deg_Heat_cDNA_P Parameter: Temperature (deg C) Value: 42 vs. 22
  misc_feature: MA Experiment 20000111 PARAMETER Experiment Name: At_42deg_Heat_cDNA_P Parameter: Timepoint (hr) Value: 6
  misc_feature: MA Experiment 20000111 PARAMETER Experiment Name: At_42deg_Heat_cDNA_P Parameter: Tissue Value: Aerial
  misc_feature: MA Experiment ID: 20000224 Result: Down-regulated in Transcription
tctctctctctctcttttgcccttacgtcctcgagctcaaccctttaattgcatctacgacagtcgtaccttttgctaggttatcgtcgtcatgatgcagcagccacctccagcttccaacggtgctgcaacagggccagggcagattccttccgaccaacaagcttacctccagcagcagcagtcgtggatgatgcagcaccagcagcaacaacaaggtcagccgcctgcaggatggaatcagcagtctgcaccgtcttctggtcaaccacagcagcagcagtatggtggtggtggatctcagaatccaggatcagctggtgagatccggtccctgtggatcggtgacttgcagccatggatggatgagaactatctcatgaacgtctttggtcttactggcgaggctacagcagctaaagttattcgcaataaacagaacggatattcagaaggttatggctttattgagtttgtgaaccatgctacagctgagaggaatttacagacttacaatggtgctccgatgccgagcagtgagcaggccttcaggttgaactgggctcagcttggagctggagagagacgccaggctgaagggcctgagcacacagtttttgttggagacttggcacctgatgttaccgaccacatgcttactgaaacgtttaaagctgtgtattcctctgtcaagggagctaaagttgtgaatgataggactactggacggtccaagggttatggatttgtcaggtttgcggatgaaagtgagcagattcgtgccatgactgaaatgaatggtcaatactgctcatcaaggcctatgcgtactggtcctgctgccaacaagaagcctcttacaatgcaaccagcttcatatcagaacactcaaggaaattcaggagaaagtgatccaactaacacaacaatttttgttggagctgtggatcaaagtgtaacagaagatgatttgaagtcagtttttggtcaatttggtgaactagttcatgtgaaaatacccgcaggaaaacgttgcggatttgttcaatacgccaatagggcatgtgctgagcaagcactttctgtgttgaacggaacacaacttgggggacaaagcattcgtctttcatggggtcgcagtccttccaacaaacagactcaacctgatcaagcccagtatggtggtggtggaggatactatgggtatcctcctcaaggatatgaagcatacggatatgcacctcctcctcaggaccctaacgcctactacggtggttatgctgggggcggctatggaaactaccagcagcctggtggataccagcagcaacagcagtgaagcatgatgtgtaagtcgtgatcgagctgaagttgtagaaagctgtaaccgtttgacaatggtgaatgaattattgaagtggatgtgtattagctcttcttgtctcagattctctcttcaactcttttttttttcttttggattatttttctttcgcgtggctattgttgagtgtccttgcaagtcataacaaaaagcttaaacccaagtgttttttgtcatgactaatatgaccattatgttttcttgctgtaccatttcttcttgtatcacctatgacttccaattattcagtagtaccctcataatttttcaataatactcgttttgtgatcc

SEQ ID NO: 77715 - protein, 415 aa, Arabidopsis thaliana; identical to SEQ ID NO: 38736
  peptide (1)..(415): Ceres Seq. ID no. 12577248
  misc_feature (175)..(247): Pfam Name: RNA recognition motif. (a.k.a. RRM, RBD, or RNP domain) Pfam Description: RNA recognition motif. (a.k.a. RRM, RBD, or RNP
  misc_feature (1)..(415): Homolog of NCBI NO: 7485342 NR Description: hypothetical protein F10M23.340 - Arabidopsis >gi|4455223|emb|CAB36546.1| putative DNA binding protein thaliana] >gi|7269553|emb|CAB79555.1| putative DNA binding
  misc_feature (1)..(415): Homolog of NCBI NO: 18416906 NR Description: RNA binding protein 45 (RBP45), putative; protein At4g27000.1, supported by cDNA: gi_13878152, supported by cDNA: supported by cDNA: gi_17104568, supported by cDNA: gi_20259887
  misc_feature (7)..(406): Homolog of NCBI NO: 9758270 NR Description: contains similarity to polyadenylate-binding
  misc_feature (7)..(406): Homolog of NCBI NO: 18423684 NR Description: RNA binding protein 45 (RBP45), putative; protein At5g54900.1, supported by cDNA: 107768., supported by cDNA: [Arabidopsis thaliana] >gi|11762114|gb|AAG40335.1|AF324983_1
  misc_feature (10)..(407): Homolog of NCBI NO: 9663767 NR Description: RNA Binding Protein 45 [Nicotiana plumbaginifolia]
  misc_feature (1)..(415): Homolog of NCBI NO: 34896988 NR Description: putative RNA binding protein [Oryza sativa]
  misc_feature (39)..(415): Homolog of NCBI NO: 15221071 NR Description: RNA binding protein 45 (RBP45), putative; protein At1g11650.1, supported by cDNA: 30022., supported by cDNA: [Arabidopsis thaliana] >gi|25402676|pir||H86249 hypothetical
  misc_feature (39)..(415): Homolog of NCBI NO: 21592583 NR Description: putative DNA binding protein [Arabidopsis
  misc_feature (2)..(415): Homolog of NCBI NO: 40253807 NR Description: putative RNA Binding Protein 45 [Oryza sativa
  misc_feature (2)..(413): Homolog of NCBI NO: 39545835 NR Description: OSJNBb0060E08.6 [Oryza sativa (japonica

SEQ ID NO: 77716 - protein, 414 aa, Arabidopsis thaliana; identical to SEQ ID NO: 38737
  peptide (1)..(414): Ceres Seq. ID no. 12577249
  misc_feature (174)..(246): Pfam Name: RNA recognition motif. (a.k.a. RRM, RBD, or RNP domain) Pfam Description: RNA recognition motif. (a.k.a. RRM, RBD, or RNP
  misc_feature (1)..(414): Homolog of NCBI NO: 7485342 NR Description: hypothetical protein F10M23.340 - Arabidopsis >gi|4455223|emb|CAB36546.1| putative DNA binding protein thaliana] >gi|7269553|emb|CAB79555.1| putative DNA binding
  misc_feature (1)..(414): Homolog of NCBI NO: 18416906 NR Description: RNA binding protein 45 (RBP45), putative; protein At4g27000.1, supported by cDNA: gi_13878152, supported by cDNA: supported by cDNA: gi_17104568, supported by cDNA: gi_20259887
  misc_feature (6)..(405): Homolog of NCBI NO: 9758270 NR Description: contains similarity to polyadenylate-binding
  misc_feature (6)..(405): Homolog of NCBI NO: 18423684 NR Description: RNA binding protein 45 (RBP45), putative; protein At5g54900.1, supported by cDNA: 107768., supported by cDNA: [Arabidopsis thaliana] >gi|11762114|gb|AAG40335.1|AF324983_1
  misc_feature (9)..(406): Homolog of NCBI NO: 9663767 NR Description: RNA Binding Protein 45 [Nicotiana plumbaginifolia]
  misc_feature (1)..(414): Homolog of NCBI NO: 34896988 NR Description: putative RNA binding protein [Oryza sativa]
  misc_feature (38)..(414): Homolog of NCBI NO: 15221071 NR Description: RNA binding protein 45 (RBP45), putative; protein At1g11650.1, supported by cDNA: 30022., supported by cDNA: [Arabidopsis thaliana] >gi|25402676|pir||H86249 hypothetical
  misc_feature (38)..(414): Homolog of NCBI NO: 21592583 NR Description: putative DNA binding protein [Arabidopsis
  misc_feature (1)..(414): Homolog of NCBI NO: 40253807 NR Description: putative RNA Binding Protein 45 [Oryza sativa
  misc_feature (1)..(412): Homolog of NCBI NO: 39545835 NR Description: OSJNBb0060E08.6 [Oryza sativa (japonica

SEQ ID NO: 77717 - protein, 382 aa, Arabidopsis thaliana; identical to SEQ ID NO: 38738
  peptide (1)..(382): Ceres Seq. ID no. 12577250
  misc_feature (142)..(214): Pfam Name: RNA recognition motif. (a.k.a. RRM, RBD, or RNP domain) Pfam Description: RNA recognition motif. (a.k.a. RRM, RBD, or RNP
  misc_feature (1)..(382): Homolog of NCBI NO: 7485342 NR Description: hypothetical protein F10M23.340 - Arabidopsis >gi|4455223|emb|CAB36546.1| putative DNA binding protein thaliana] >gi|7269553|emb|CAB79555.1| putative DNA binding
  misc_feature (1)..(382): Homolog of NCBI NO: 18416906 NR Description: RNA binding protein 45 (RBP45), putative; protein At4g27000.1, supported by cDNA: gi_13878152, supported by cDNA: supported by cDNA: gi_17104568, supported by cDNA: gi_20259887
  misc_feature (1)..(373): Homolog of NCBI NO: 9758270 NR Description: contains similarity to polyadenylate-binding
  misc_feature (1)..(373): Homolog of NCBI NO: 18423684 NR Description: RNA binding protein 45 (RBP45), putative; protein At5g54900.1, supported by cDNA: 107768., supported by cDNA: [Arabidopsis thaliana] >gi|11762114|gb|AAG40335.1|AF324983_1
  misc_feature (1)..(374): Homolog of NCBI NO: 9663767 NR Description: RNA Binding Protein 45 [Nicotiana plumbaginifolia]
  misc_feature (1)..(382): Homolog of NCBI NO: 34896988 NR Description: putative RNA binding protein [Oryza sativa]
  misc_feature (6)..(382): Homolog of NCBI NO: 15221071 NR Description: RNA binding protein 45 (RBP45), putative; protein At1g11650.1, supported by cDNA: 30022., supported by cDNA: [Arabidopsis thaliana] >gi|25402676|pir||H86249 hypothetical
  misc_feature (6)..(382): Homolog of NCBI NO: 21592583 NR Description: putative DNA binding protein [Arabidopsis
  misc_feature (1)..(382): Homolog of NCBI NO: 40253807 NR Description: putative RNA Binding Protein 45 [Oryza sativa
  misc_feature (1)..(380): Homolog of NCBI NO: 39545835 NR Description: OSJNBb0060E08.6 [Oryza sativa (japonica

SEQ ID NO: 77718 - DNA, 1356 bp, Arabidopsis thaliana
  misc_feature (1)..(1356): Ceres Seq. ID no. 12577268
  misc_feature: MA Experiment ID: 20000437 Result: Up-regulated in Transcription
  misc_feature: MA Experiment 20000437 PARAMETER Experiment Name: At_Drought_P Parameter: Age (day) Value: 8
  misc_feature: MA Experiment 20000437 PARAMETER Experiment Name: At_Drought_P Parameter: Organism Value: A. thaliana
  misc_feature: MA Experiment 20000437 PARAMETER Experiment Name: At_Drought_P Parameter: Plant Line Value: WS
  misc_feature: MA Experiment 20000437 PARAMETER Experiment Name: At_Drought_P Parameter: Timepoint (hr) Value: 24
  misc_feature: MA Experiment 20000437 PARAMETER Experiment Name: At_Drought_P Parameter: Tissue Value: Whole Plant
  misc_feature: MA Experiment 20000437 PARAMETER Experiment Name: At_Drought_P Parameter: Treatment Value: Drought vs. No Drought
  misc_feature: MA Experiment ID: 20000495 Result: Up-regulated in Transcription
  misc_feature: MA Experiment 20000495 PARAMETER Experiment Name: At_Guard_Cells_P Parameter: Harvest Date Value: 8/2/2002
  misc_feature: MA Experiment 20000495 PARAMETER Experiment Name: At_Guard_Cells_P Parameter: Organism Value: A. thaliana
  misc_feature: MA Experiment 20000495 PARAMETER Experiment Name: At_Guard_Cells_P Parameter: Tissue Value: Guard Cells vs. Leaves
  misc_feature: MA Experiment ID: 20001248 Result: Up-regulated in Transcription
  misc_feature: MA Experiment 20001248 PARAMETER Experiment Name: At_Far-red-induction_P Parameter: Age (day) Value: 7
  misc_feature: MA Experiment 20001248 PARAMETER Experiment Name: At_Far-red-induction_P Parameter: Light Value: Far-red vs. White
  misc_feature: MA Experiment 20001248 PARAMETER Experiment Name: At_Far-red-induction_P Parameter: Organism Value: A. thaliana
  misc_feature: MA Experiment 20001248 PARAMETER Experiment Name: At_Far-red-induction_P Parameter: Plant Line Value: Columbia
  misc_feature: MA Experiment 20001248 PARAMETER Experiment Name: At_Far-red-induction_P Parameter: Timepoint (hr) Value: 4
  misc_feature: MA Experiment 20001248 PARAMETER Experiment Name: At_Far-red-induction_P Parameter: Tissue Value: Whole Plant
  misc_feature: MA Experiment ID: 20001450 Result: Up-regulated in Transcription
  misc_feature: MA Experiment 20001450 PARAMETER Experiment Name: At_Far-red-induction_P Parameter: Age (day) Value: 7
  misc_feature: MA Experiment 20001450 PARAMETER Experiment Name: At_Far-red-induction_P Parameter: Light Value: Far-red vs. White
  misc_feature: MA Experiment 20001450 PARAMETER Experiment Name: At_Far-red-induction_P Parameter: Organism Value: A. thaliana
  misc_feature: MA Experiment 20001450 PARAMETER Experiment Name: At_Far-red-induction_P Parameter: Plant Line Value: Columbia
  misc_feature: MA Experiment 20001450 PARAMETER Experiment Name: At_Far-red-induction_P Parameter: Timepoint (hr) Value: 8
  misc_feature: MA Experiment 20001450 PARAMETER Experiment Name: At_Far-red-induction_P Parameter: Tissue Value: Whole Plant
  misc_feature: MA Experiment ID: 20001451 Result: Up-regulated in Transcription
  misc_feature: MA Experiment 20001451 PARAMETER Experiment Name: At_Far-red-induction_P Parameter: Age (day) Value: 7
  misc_feature: MA Experiment 20001451 PARAMETER Experiment Name: At_Far-red-induction_P Parameter: Light Value: Far-red vs. White
  misc_feature: MA Experiment 20001451 PARAMETER Experiment Name: At_Far-red-induction_P Parameter: Organism Value: A. thaliana
  misc_feature: MA Experiment 20001451 PARAMETER Experiment Name: At_Far-red-induction_P Parameter: Plant Line Value: Columbia
  misc_feature: MA Experiment 20001451 PARAMETER Experiment Name: At_Far-red-induction_P Parameter: Timepoint (hr) Value: 24
  misc_feature: MA Experiment 20001451 PARAMETER Experiment Name: At_Far-red-induction_P Parameter: Tissue Value: Whole Plant
  misc_feature: MA Experiment ID: 20001906 Result: Up-regulated in Transcription
  misc_feature: MA Experiment 20001906 PARAMETER Experiment Name: At_Drought_Reproduction_P Parameter: Age (day) Value: 35
  misc_feature: MA Experiment 20001906 PARAMETER Experiment Name: At_Drought_Reproduction_P Parameter: Organism Value: A. thaliana
  misc_feature: MA Experiment 20001906 PARAMETER Experiment Name: At_Drought_Reproduction_P Parameter: Plant Line Value: WS
  misc_feature: MA Experiment 20001906 PARAMETER Experiment Name: At_Drought_Reproduction_P Parameter: Timepoint (day) Value: 5
  misc_feature: MA Experiment 20001906 PARAMETER Experiment Name: At_Drought_Reproduction_P Parameter: Tissue Value: Siliques
  misc_feature: MA Experiment 20001906 PARAMETER Experiment Name: At_Drought_Reproduction_P Parameter: Treatment Value: Drought vs. No Drought
acagtttctaaggcaaaataagctctctttctactatttctctttctctttctactatttctctcctgtggagaaactcaggagatagagagagagagagagaagagaagagagcatgtatgtttggttttataatctctctactcataccaaagatttgtctcagacccaccacttggacagagagaacccaagctcctttctctctttttctcgatctactccttcttaatctccttttttgaaacttgaagccactttcaacatcatccttaaacttttgttcccttattcacaatctcctgccacctctcatttctctagttgagttgttatctgcgtttttaagcactcgaatactgcatgcaaattccctgattgtttgctacatatatgggttctattagaggaaacattgaagagcctatatctcagtcattaacgaggcagaactctctctatagcttaaagctccatgaggttcaaacccacttaggaagttctggaaaaccactaggaagcatgaaccttgatgagcttctcaagactgtcttgccaccagctgaggaagggcttgttcgtcagggaagcttgacgttacctcgagatctcagtaaaaagacagttgatgaggtctggagagatatccaacaggacaagaatggaaacggtactagtactactactactcataagcagcctacactcggtgaaataacacttgaggatttgttgttgagagctggtgtagtgactgagacagtagtccctcaagaaaatgttgttaacatagcttcaaatgggcaatgggttgagtatcatcatcagcctcaacaacaacaagggtttatgacatatccggtttgcgagatgcaagatatggtgatgatgggtggattatcggatacaccacaagcgcctgggaggaaaagagtagctggagagattgtggagaagactgttgagaggagacagaagaggatgatcaagaacagagaatctgcagcacgttcacgagctaggaaacaggcttatacacatgaattagagatcaaggtttcaaggttagaagaagaaaacgaaaaacttcggaggctaaaggaggtggagaagatcctaccaagtgaaccaccaccagatcctaagtggaagctccggcgaacaaactctgcttctctctgatcctaaagactcttctttctttcttcttctttgtgttggtttatatcagaccgctttgttctttgtatattgtgtagactttattgactttgaacagcatgtctttataaacatttcttgagtgtattcctcttttgcagctagttcaaactttttgagtacaaacactagttc

SEQ ID NO: 77719 - protein, 262 aa, Arabidopsis thaliana; identical to SEQ ID NO: 40490
  peptide (1)..(262): Ceres Seq. ID no. 12577269
  misc_feature (187)..(245): Pfam Name: bZIP transcription factor Pfam Description: bZIP transcription factor
  misc_feature (1)..(262): Homolog of NCBI NO: 18405590 NR Description: bZIP family transcription factor; protein id: supported by cDNA: 114632., supported by cDNA: gi_13346156 thaliana] >gi|13346157|gb|AAK19602.1|AF334209_1 bZIP putative
  misc_feature (1)..(262): Homolog of NCBI NO: 26451276 NR Description: putative bZIP transcription factor AtbZIP12 /
  misc_feature (37)..(262): Homolog of NCBI NO: 21694632 NR Description: basic leucine zipper transcription factor
  misc_feature (44)..(262): Homolog of NCBI NO: 7487620 NR Description: probable bZIP transcription factor [imported] -
  misc_feature (1)..(129): Homolog of NCBI NO: 15230146 NR Description: ABA-responsive element binding protein 3; protein At3g56850.1, supported by cDNA: gi_13346154, supported by cDNA: supported by cDNA: gi_20148682, supported by cDNA: gi_9967420
  misc_feature (132)..(260): Homolog of NCBI NO: 15230146 NR Description: ABA-responsive element binding protein 3; protein At3g56850.1, supported by cDNA: gi_13346154, supported by cDNA: supported by cDNA: gi_20148682, supported by cDNA: gi_9967420
  misc_feature (1)..(129): Homolog of NCBI NO: 13346155 NR Description: bZIP protein DPBF3 [Arabidopsis thaliana]
  misc_feature (132)..(260): Homolog of NCBI NO: 13346155 NR Description: bZIP protein DPBF3 [Arabidopsis thaliana]
  misc_feature (14)..(140): Homolog of NCBI NO: 34909206 NR Description: putative promoter-binding factor-like protein
  misc_feature (165)..(237): Homolog of NCBI NO: 34909206 NR Description: putative promoter-binding factor-like protein

SEQ ID NO: 77720 - protein, 219 aa, Arabidopsis thaliana; identical to SEQ ID NO: 40491
  peptide (1)..(219): Ceres Seq. ID no. 12577270
  misc_feature (144)..(202): Pfam Name: bZIP transcription factor Pfam Description: bZIP transcription factor
  misc_feature (1)..(219): Homolog of NCBI NO: 18405590 NR Description: bZIP family transcription factor; protein id: supported by cDNA: 114632., supported by cDNA: gi_13346156 thaliana] >gi|13346157|gb|AAK19602.1|AF334209_1 bZIP putative
  misc_feature (1)..(219): Homolog of NCBI NO: 26451276 NR Description: putative bZIP transcription factor AtbZIP12 /
  misc_feature (1)..(219): Homolog of NCBI NO: 21694632 NR Description: basic leucine zipper transcription factor
  misc_feature (1)..(219): Homolog of NCBI NO: 7487620 NR Description: probable bZIP transcription factor [imported] -
  misc_feature (1)..(86): Homolog of NCBI NO: 15230146 NR Description: ABA-responsive element binding protein 3; protein At3g56850.1, supported by cDNA: gi_13346154, supported by cDNA: supported by cDNA: gi_20148682, supported by cDNA: gi_9967420
  misc_feature (89)..(217): Homolog of NCBI NO: 15230146 NR Description: ABA-responsive element binding protein 3; protein At3g56850.1, supported by cDNA: gi_13346154, supported by cDNA: supported by cDNA: gi_20148682, supported by cDNA: gi_9967420
  misc_feature (1)..(86): Homolog of NCBI NO: 13346155 NR Description: bZIP protein DPBF3 [Arabidopsis thaliana]
  misc_feature (89)..(217): Homolog of NCBI NO: 13346155 NR Description: bZIP protein DPBF3 [Arabidopsis thaliana]
  misc_feature (1)..(97): Homolog of NCBI NO: 34909206 NR Description: putative promoter-binding factor-like protein
  misc_feature (122)..(194): Homolog of NCBI NO: 34909206 NR Description: putative promoter-binding factor-like protein

SEQ ID NO: 77721 - DNA, 3984 bp, Arabidopsis thaliana
  misc_feature (1)..(3984): Ceres Seq. ID no. 12577278
  misc_feature: MA Experiment ID: 108461 Result: Down-regulated in Transcription
  misc_feature: MA Experiment 108461 PARAMETER Experiment Name: At_Germinating_Seeds_cDNA_P Parameter: Age (day) Value: 1 vs. 0
  misc_feature: MA Experiment 108461 PARAMETER Experiment Name: At_Germinating_Seeds_cDNA_P Parameter: Tissue Value: Germinating Seeds
  misc_feature: MA Experiment ID: 108464 Result: Down-regulated in Transcription
  misc_feature: MA Experiment 108464 PARAMETER Experiment Name: At_Germinating_Seeds_cDNA_P Parameter: Age (day) Value: 4 vs. 0
  misc_feature: MA Experiment 108464 PARAMETER Experiment Name: At_Germinating_Seeds_cDNA_P Parameter: Tissue Value: Germinating Seeds
  misc_feature: MA Experiment ID: 108595 Result: Up-regulated in Transcription
  misc_feature: MA Experiment 108595 PARAMETER Experiment Name: At_Ler-pi_Ovule_cDNA_P Parameter: Plant Line Value: null
  misc_feature: MA Experiment ID: 20000307 Result: Down-regulated in Transcription
  misc_feature: MA Experiment 20000307 PARAMETER Experiment Name: At_Germinating_Seeds_Sub_P Parameter: Age (hr) Value: 24 vs. 0
  misc_feature: MA Experiment 20000307 PARAMETER Experiment Name: At_Germinating_Seeds_Sub_P Parameter: Organism Value: A. thaliana
  misc_feature: MA Experiment 20000307 PARAMETER Experiment Name: At_Germinating_Seeds_Sub_P Parameter: Plant Line Value: WS
  misc_feature: MA Experiment 20000307 PARAMETER Experiment Name: At_Germinating_Seeds_Sub_P Parameter: Tissue Value: Germinating Seeds
atggtgttggcggagctcggcggccggataacccgcgccatacagcagatgaacaatgtgacaataatcgatgaaaaggttttgaatgatttcttaaacgagattactcgcgctttgctccagtccgatgtttcttttggccttgtggaaaagatgcagaccaatattaagaagatcgttaacctcgacgatctagcagctggccacaacaaacgcctgatcatcgagcaggctatcttcaaggaactctgtaggatgctggatccaggaaagcctgcctttgcccccaaaaaggccaaacctagtgtagtgatgttcgtcggtttacaaggtgctggaaaaaccacaacatgtaccaagtatgcttactatcatcagaagaaagggtacaaagcagctctagtgtgtgcggatactttcagggccggtgcttttgatcagctgaaacagaatgccaccaaggctaagatccccttttatggaagctacacagaatccgatcctgtgaaaattgctgttgagggagttgataggttcaagaaagaaaagtgtgatcttattattgttgacaccagtggtcgccataaacaagcagcttctctctttgaagaaatgcgtcaagttgctgaagcaacggaaccagatcttgttatatttgttatggatagcagtattggtcaagctgcatttgaacaagctgaagcttttaaggaaactgtatctgttggagctgtaattattactaagatggacggccatgccaagggaggtggtgctcttagcgctgttgcagctacaaaaagtcctgtgatattcattggaacaggagagcatatggatgagtttgaagtgtttgacgttaaaccatttgtcagccgtctcttaggaaagggtgattggtctggactcgtggataaactacaagaggtggtacctaaagatctacagaatgaacttgtagaaaatctctctcagggtaactttacgttgagaagtatgtacgaccagttccagtgctctctgcggattccacttaatcagcttttctcgatgctgcctggaattagtgctgaaatgatgccgaaaggacatggtgaagaaagccgagtgaagatgaagcgatacatgacaatgatggattctatgacaaataaagaacttgacagcccaaacccaaagatttttaacgagtcaaggataatgaggatagcgagagggtcagggaggttagtaagagaagtgatggagatgttggaagagtacaagaggatagcaaagacaatgaaagggatcaagatcccaaagaacggagacatgagcaaggtcataccgcctcagatgctaaaacagatgggcggcatgagcggtctgcagagtctcatgaagcagatgggttcggctaaggacatgatgggaatgtttggtggcggaggcaaagcccattacacacgcgtttcagagtcttcttcctttgtgtgtgtgagtttcaactttctctcttctttgttttcgtgtttattctctggagattttgtgttctgcgatgtgtcttctcttttgtcggatctctttgttccctggactatggacactaatccttcagagctggttgataccgacgttgtttgtgatacacgaccccccatgcactgcaacaaatcctttgcctacatgtctgaaaataagtgttcaggaactagccaccttaagcgtcacatttacttgggtatttgtgcgaagatcccagattacaataagctctcgcaaatcaaggaggaaaccacctcattccttcctaagaaatgtcagatattgcaaaccaaggatgaaaaacccacttcttgccttcccaagaaacgtcaaatgtcttctgctgatgtccctctagatcaagatcgctgtaaccttgagatggcaaagatgatcattatgcatgattaccctcttgatatggtcgagcatcctggttttgttggttttctgcaggctcttcgtccccgcttcagtgtctctagcttcgacaccattcatgctgattgtctcgctatgtttctatcccaaaagcagaaaattttggacattattggagagattcctgggggagttaatcttacagtagacttgtggtcatcaaagcaatcagtggcttacgcttttgtggcaggacactttgttgataaagactggaatttgactcaccgccttctaaatgttgttgttgtggcttctcctgattctgattttgcgttaaaccagcctataacagcttgcttatccgactggaacttggagggaaagatttcgagcatcgctgtcagccaatcattagtaaataaaacctccatcgacaatctcagaggtttcttgtctttcaggaaccagcatgtgttgaatggtcagttgttgatggggagatgctatgctcgcatcttaagcagtatggcgcaagatgcactcacagctgagcggcttcaagaacccataaagaaagtccgagatagcatcaagtatatccaaaccaacgaggcttgcggagacagatttgatgaactgaagagacggtttccatccccttcgctttacaaagatcttcttattgacaaccaaacgagatgggacacaagttacaatatgttgttggctgcctgtgaacacagacaagtgttttctagtttggaaacctgccatcctgactacaaaatatcattatctcctgaggaatggaaaaagattgagagtctttgctcatgcttgaaggtacttgtcgaagcgggtaatgcattgactgggccaaacctgttgacagcaaacgatttgtaccatgagatgacaaagcttcagctagatctgagccacgctgccccgggtgaagacccggatgtcagaaacctagcaaaatcattgagggaaaaattcgaccagtactggagaggatgcttccttgtgttggcagttgcagtggtcatggatcctcggttcaaaatgcagctcattaagtttacgttcaataagtcgtatggtgaagatgcagagaaatggaccaagtctgtcgaagatgcagtccatgatctgtaccttaactacagtgaacagaacctgttggatgcttatgtggatcatggcttttcggaaatagaggtggctcaggaatctcacttccatcaagacatggctgaagctgccaatacagggaatggacaatcatatgatgagacaagtccacaagtagaggaaaccacaaacatggttgaagctgccaatacagggaatggacaatcatatgatgagacaagtccacaagtagaggaaaccacatacatggctgaagctgccaatacagggaatggacaatcaggtgatgagacaagtccacaagtagagaaaaccacagacatggctgaagctaccaatacagggaatggacaatcaggtgatgagacaagtccacaagtagaggaaaccacagagtcacatcaacatgagagacagcttaaggcagagaagcagaatgtggtagggatttgggagggagtgagtgaagagagtcagctaacagaagaggaccaacaacgtggtgatgattctcaagcacacgcaatggtagaggaagaccacacaacatttccggtagacgtgcttctcgaggaagggtctaccctcatcacaataggagagtcattgtcagacttcgagatgtacatgacagatatgaatacggagctggatcaatacttggaagaaaatttgattccgaggtcagaagactttaacgttctgagctggtggagggtcaacaacaccaactacccaactctctcaaagatggctgtggatcttctctcggtccccttcagcaccgtctctcctgattccgtattcgacacagaggtgaagcagatggacaattacaggacatctcttcctggtgaaaccttggaggctctcttgtgcaccaaggactggttaaaaaatggaactttatga

SEQ ID NO: 77722 - protein, 1327 aa, Arabidopsis thaliana
  peptide (1)..(1327): Ceres Seq. ID no. 12577279
  misc_feature (327)..(428): Pfam Name: Signal peptide binding domain Pfam Description: Signal peptide binding domain
  misc_feature (1)..(479): Homolog of NCBI NO: 18394225 NR Description: expressed protein; protein id: At1g15310.1, by cDNA: 22158., supported by cDNA: gi_12745000 [Arabidopsis >gi|586036|sp|P37106|SR51_ARATH Signal recognition particle 54
  misc_feature (1)..(479): Homolog of NCBI NO: 18402407 NR Description: signal recognition particle 54 kDa protein 2 putative; protein id: At1g48900.1, supported by cDNA: supported by cDNA: gi_15810009, supported by cDNA: gi_17386101
  misc_feature (1)..(479): Homolog of NCBI NO: 515681 NR Description: signal recognition particle 54 kDa subunit
  misc_feature (163)..(479): Homolog of NCBI NO: 25294409 NR Description: hypothetical protein F27K7.8 [imported] - thaliana >gi|11094805|gb|AAG29734.1|AC084414_2 signal recognition
  misc_feature (1)..(163): Homolog of NCBI NO: 25294409 NR Description: hypothetical protein F27K7.8 [imported] - thaliana >gi|11094805|gb|AAG29734.1|AC084414_2 signal recognition
  misc_feature (1)..(476): Homolog of NCBI NO: 1711510 NR Description: Signal recognition particle 54 kDa protein 2 >gi|515679|gb|AAA66199.1| signal recognition particle 54 kDa
  misc_feature (1)..(478): Homolog of NCBI NO: 2119055 NR Description: signal recognition particle 54K protein - tomato
  misc_feature (1)..(476): Homolog of NCBI NO: 1711512 NR Description: SIGNAL RECOGNITION PARTICLE 54 KD PROTEIN 2
  misc_feature (1)..(478): Homolog of NCBI NO: 1711509 NR Description: SIGNAL RECOGNITION PARTICLE 54 KD PROTEIN 1
  misc_feature (550)..(1216): Homolog of NCBI NO: 15220044 NR Description: hypothetical protein; protein id: At1g80020.1
MVLAELGGRITRAIQQMNNVTIIDEKVLNDFLNEITRALLQSDVSFGLVEKMQTNIKKIVNLDDLAAGHNKRLIIEQAIFKELCRMLDPGKPAFAPKKAKPSVVMFVGLQGAGKTTTCTKYAYYHQKKGYKAALVCADTFRAGAFDQLKQNATKAKIPFYGSYTESDPVKIAVEGVDRFKKEKCDLIIVDTSGRHKQAASLFEEMRQVAEATEPDLVIFVMDSSIGQAAFEQAEAFKETVSVGAVIITKMDGHAKGGGALSAVAATKSPVIFIGTGEHMDEFEVFDVKPFVSRLLGKGDWSGLVDKLQEVVPKDLQNELVENLSQGNFTLRSMYDQFQCSLRIPLNQLFSMLPGISAEMMPKGHGEESRVKMKRYMTMMDSMTNKELDSPNPKIFNESRIMRIARGSGRLVREVMEMLEEYKRIAKTMKGIKIPKNGDMSKVIPPQMLKQMGGMSGLQSLMKQMGSAKDMMGMFGGGGKAHYTRVSESSSFVCVSFNFLSSLFSCLFSGDFVFCDVSSLLSDLFVPWTMDTNPSELVDTDVVCDTRPPMHCNKSFAYMSENKCSGTSHLKRHIYLGICAKIPDYNKLSQIKEETTSFLPKKCQILQTKDEKPTSCLPKKRQMSSADVPLDQDRCNLEMAKMIIMHDYPLDMVEHPGFVGFLQALRPRFSVSSFDTIHADCLAMFLSQKQKILDIIGEIPGGVNLTVDLWSSKQSVAYAFVAGHFVDKDWNLTHRLLNVVVVASPDSDFALNQPITACLSDWNLEGKISSIAVSQSLVNKTSIDNLRGFLSFRNQHVLNGQLLMGRCYARILSSMAQDALTAERLQEPIKKVRDSIKYIQTNEACGDRFDELKRRFPSPSLYKDLLIDNQTRWDTSYNMLLAACEHRQVFSSLETCHPDYKISLSPEEWKKIESLCSCLKVLVEAGNALTGPNLLTANDLYHEMTKLQLDLSHAAPGEDPDVRNLAKSLREKFDQYWRGCFLVLAVAVVMDPRFKMQLIKFTFNKSYGEDAEKWTKSVEDAVHDLYLNYSEQNLLDAYVDHGFSEIEVAQESHFHQDMAEAANTGNGQSYDETSPQVEETTNMVEAANTGNGQSYDETSPQVEETTYMAEAANTGNGQSGDETSPQVEKTTDMAEATNTGNGQSGDETSPQVEETTESHQHERQLKAEKQNVVGIWEGVSEESQLTEEDQQRGDDSQAHAMVEEDHTTFPVDVLLEEGSTLITIGESLSDFEMYMTDMNTELDQYLEENLIPRSEDFNVLSWWRVNNTNYPTLSKMAVDLLSVPFSTVSPDSVFDTEVKQMDNYRTSLPGETLEALLCTKDWLKNGTL

SEQ ID NO: 77723 - protein, 1311 aa, Arabidopsis thaliana
  peptide (1)..(1311): Ceres Seq. ID no. 12577280
  misc_feature (311)..(412): Pfam Name: Signal peptide binding domain Pfam Description: Signal peptide binding domain
  misc_feature (1)..(463): Homolog of NCBI NO: 18394225 NR Description: expressed protein; protein id: At1g15310.1, by cDNA: 22158., supported by cDNA: gi_12745000 [Arabidopsis >gi|586036|sp|P37106|SR51_ARATH Signal recognition particle 54
  misc_feature (1)..(463): Homolog of NCBI NO: 18402407 NR Description: signal recognition particle 54 kDa protein 2 putative; protein id: At1g48900.1, supported by cDNA: supported by cDNA: gi_15810009, supported by cDNA: gi_17386101
  misc_feature (1)..(463): Homolog of NCBI NO: 515681 NR Description: signal recognition particle 54 kDa subunit
  misc_feature (147)..(463): Homolog of NCBI NO: 25294409 NR Description: hypothetical protein F27K7.8 [imported] - thaliana >gi|11094805|gb|AAG29734.1|AC084414_2 signal recognition
  misc_feature (1)..(147): Homolog of NCBI NO: 25294409 NR Description: hypothetical protein F27K7.8 [imported] - thaliana >gi|11094805|gb|AAG29734.1|AC084414_2 signal recognition
  misc_feature (1)..(460): Homolog of NCBI NO: 1711510 NR Description: Signal recognition particle 54 kDa protein 2 >gi|515679|gb|AAA66199.1| signal recognition particle 54 kDa
  misc_feature (1)..(462): Homolog of NCBI NO: 2119055 NR Description: signal recognition particle 54K protein - tomato
  misc_feature (1)..(460): Homolog of NCBI NO: 1711512 NR Description: SIGNAL RECOGNITION PARTICLE 54 KD PROTEIN 2
  misc_feature (1)..(462): Homolog of NCBI NO: 1711509 NR Description: SIGNAL RECOGNITION PARTICLE 54 KD PROTEIN 1
  misc_feature (534)..(1200): Homolog of NCBI NO: 15220044 NR Description: hypothetical protein; protein id: At1g80020.1
MNNVTIIDEKVLNDFLNEITRALLQSDVSFGLVEKMQTNIKKIVNLDDLAAGHNKRLIIEQAIFKELCRMLDPGKPAFAPKKAKPSVVMFVGLQGAGKTTTCTKYAYYHQKKGYKAALVCADTFRAGAFDQLKQNATKAKIPFYGSYTESDPVKIAVEGVDRFKKEKCDLIIVDTSGRHKQAASLFEEMRQVAEATEPDLVIFVMDSSIGQAAFEQAEAFKETVSVGAVIITKMDGHAKGGGALSAVAATKSPVIFIGTGEHMDEFEVFDVKPFVSRLLGKGDWSGLVDKLQEVVPKDLQNELVENLSQGNFTLRSMYDQFQCSLRIPLNQLFSMLPGISAEMMPKGHGEESRVKMKRYMTMMDSMTNKELDSPNPKIFNESRIMRIARGSGRLVREVMEMLEEYKRIAKTMKGIKIPKNGDMSKVIPPQMLKQMGGMSGLQSLMKQMGSAKDMMGMFGGGGKAHYTRVSESSSFVCVSFNFLSSLFSCLFSGDFVFCDVSSLLSDLFVPWTMDTNPSELVDTDVVCDTRPPMHCNKSFAYMSENKCSGTSHLKRHIYLGICAKIPDYNKLSQIKEETTSFLPKKCQILQTKDEKPTSCLPKKRQMSSADVPLDQDRCNLEMAKMIIMHDYPLDMVEHPGFVGFLQALRPRFSVSSFDTIHADCLAMFLSQKQKILDIIGEIPGGVNLTVDLWSSKQSVAYAFVAGHFVDKDWNLTHRLLNVVVVASPDSDFALNQPITACLSDWNLEGKISSIAVSQSLVNKTSIDNLRGFLSFRNQHVLNGQLLMGRCYARILSSMAQDALTAERLQEPIKKVRDSIKYIQTNEACGDRFDELKRRFPSPSLYKDLLIDNQTRWDTSYNMLLAACEHRQVFSSLETCHPDYKISLSPEEWKKIESLCSCLKVLVEAGNALTGPNLLTANDLYHEMTKLQLDLSHAAPGEDPDVRNLAKSLREKFDQYWRGCFLVLAVAVVMDPRFKMQLIKFTFNKSYGEDAEKWTKSVEDAVHDLYLNYSEQNLLDAYVDHGFSEIEVAQESHFHQDMAEAANTGNGQSYDETSPQVEETTNMVEAANTGNGQSYDETSPQVEETTYMAEAANTGNGQSGDETSPQVEKTTDMAEATNTGNGQSGDETSPQVEETTESHQHERQLKAEKQNVVGIWEGVSEESQLTEEDQQRGDDSQAHAMVEEDHTTFPVDVLLEEGSTLITIGESLSDFEMYMTDMNTELDQYLEENLIPRSEDFNVLSWWRVNNTNYPTLSKMAVDLLSVPFSTVSPDSVFDTEVKQMDNYRTSLPGETLEALLCTKDWLKNGTL

SEQ ID NO: 77724 - protein, 1276 aa, Arabidopsis thaliana
  peptide (1)..(1276): Ceres Seq. ID no. 12577281
  misc_feature (276)..(377): Pfam Name: Signal peptide binding domain Pfam Description: Signal peptide binding domain
  misc_feature (1)..(428): Homolog of NCBI NO: 18394225 NR Description: expressed protein; protein id: At1g15310.1, by cDNA: 22158., supported by cDNA: gi_12745000 [Arabidopsis >gi|586036|sp|P37106|SR51_ARATH Signal recognition particle 54
  misc_feature (1)..(428): Homolog of NCBI NO: 18402407 NR Description: signal recognition particle 54 kDa protein 2 putative; protein id: At1g48900.1, supported by cDNA: supported by cDNA: gi_15810009, supported by cDNA: gi_17386101
  misc_feature (1)..(428): Homolog of NCBI NO: 515681 NR Description: signal recognition particle 54 kDa subunit
  misc_feature (112)..(428): Homolog of NCBI NO: 25294409 NR Description: hypothetical protein F27K7.8 [imported] - thaliana >gi|11094805|gb|AAG29734.1|AC084414_2 signal recognition
  misc_feature (1)..(112): Homolog of NCBI NO: 25294409 NR Description: hypothetical protein F27K7.8 [imported] - thaliana >gi|11094805|gb|AAG29734.1|AC084414_2 signal recognition
  misc_feature (1)..(425): Homolog of NCBI NO: 1711510 NR Description: Signal recognition particle 54 kDa protein 2 >gi|515679|gb|AAA66199.1| signal recognition particle 54 kDa
  misc_feature (1)..(427): Homolog of NCBI NO: 2119055 NR Description: signal recognition particle 54K protein - tomato
  misc_feature (1)..(425): Homolog of NCBI NO: 1711512 NR Description: SIGNAL RECOGNITION PARTICLE 54 KD PROTEIN 2
  misc_feature (1)..(427): Homolog of NCBI NO: 1711509 NR Description: SIGNAL RECOGNITION PARTICLE 54 KD PROTEIN 1
  misc_feature (499)..(1165): Homolog of NCBI NO: 15220044 NR Description: hypothetical protein; protein id: At1g80020.1
MQTNIKKIVNLDDLAAGHNKRLIIEQAIFKELCRMLDPGKPAFAPKKAKPSVVMFVGLQGAGKTTTCTKYAYYHQKKGYKAALVCADTFRAGAFDQLKQNATKAKIPFYGSYTESDPVKIAVEGVDRFKKEKCDLIIVDTSGRHKQAASLFEEMRQVAEATEPDLVIFVMDSSIGQAAFEQAEAFKETVSVGAVIITKMDGHAKGGGALSAVAATKSPVIFIGTGEHMDEFEVFDVKPFVSRLLGKGDWSGLVDKLQEVVPKDLQNELVENLSQGNFTLRSMYDQFQCSLRIPLNQLFSMLPGISAEMMPKGHGEESRVKMKRYMTMMDSMTNKELDSPNPKIFNESRIMRIARGSGRLVREVMEMLEEYKRIAKTMKGIKIPKNGDMSKVIPPQMLKQMGGMSGLQSLMKQMGSAKDMMGMFGGGGKAHYTRVSESSSFVCVSFNFLSSLFSCLFSGDFVFCDVSSLLSDLFVPWTMDTNPSELVDTDVVCDTRPPMHCNKSFAYMSENKCSGTSHLKRHIYLGICAKIPDYNKLSQIKEETTSFLPKKCQILQTKDEKPTSCLPKKRQMSSADVPLDQDRCNLEMAKMIIMHDYPLDMVEHPGFVGFLQALRPRFSVSSFDTIHADCLAMFLSQKQKILDIIGEIPGGVNLTVDLWSSKQSVAYAFVAGHFVDKDWNLTHRLLNVVVVASPDSDFALNQPITACLSDWNLEGKISSIAVSQSLVNKTSIDNLRGFLSFRNQHVLNGQLLMGRCYARILSSMAQDALTAERLQEPIKKVRDSIKYIQTNEACGDRFDELKRRFPSPSLYKDLLIDNQTRWDTSYNMLLAACEHRQVFSSLETCHPDYKISLSPEEWKKIESLCSCLKVLVEAGNALTGPNLLTANDLYHEMTKLQLDLSHAAPGEDPDVRNLAKSLREKFDQYWRGCFLVLAVAVVMDPRFKMQLIKFTFNKSYGEDAEKWTKSVEDAVHDLYLNYSEQNLLDAYVDHGFSEIEVAQESHFHQDMAEAANTGNGQSYDETSPQVEETTNMVEAANTGNGQSYDETSPQVEETTYMAEAANTGNGQSGDETSPQVEKTTDMAEATNTGNGQSGDETSPQVEETTESHQHERQLKAEKQNVVGIWEGVSEESQLTEEDQQRGDDSQAHAMVEEDHTTFPVDVLLEEGSTLITIGESLSDFEMYMTDMNTELDQYLEENLIPRSEDFNVLSWWRVNNTNYPTLSKMAVDLLSVPFSTVSPDSVFDTEVKQMDNYRTSLPGETLEALLCTKDWLKNGTL

SEQ ID NO: 77725 - DNA, 1475 bp, Arabidopsis thaliana
  misc_feature (1)..(1475): Ceres Seq. ID no. 12577311
  misc_feature: MA Experiment ID: 108434 Result: Down-regulated in Transcription
  misc_feature: MA Experiment 108434 PARAMETER Experiment Name: At_Root_Tips_cDNA_P Parameter: Tissue Value: Root Tips
  misc_feature: MA Experiment ID: 108461 Result: Down-regulated in Transcription
  misc_feature: MA Experiment 108461 PARAMETER Experiment Name: At_Germinating_Seeds_cDNA_P Parameter: Age (day) Value: 1 vs. 0
  misc_feature: MA Experiment 108461 PARAMETER Experiment Name: At_Germinating_Seeds_cDNA_P Parameter: Tissue Value: Germinating Seeds
  misc_feature: MA Experiment ID: 108488 Result: Down-regulated in Transcription
  misc_feature: MA Experiment ID: 108501 Result: Down-regulated in Transcription
  misc_feature: MA Experiment 108501 PARAMETER Experiment Name: At_ap2_floral_buds_cDNA_P Parameter: Plant Line Value: ap2 (Ler.)
  misc_feature: MA Experiment 108501 PARAMETER Experiment Name: At_ap2_floral_buds_cDNA_P Parameter: Tissue Value: Closed Flower
  misc_feature: MA Experiment ID: 108572 Result: Up-regulated in Transcription
  misc_feature: MA Experiment 108572 PARAMETER Experiment Name: At_Drought_cDNA_P Parameter: Timepoint (hr) Value: 1
  misc_feature: MA Experiment 108572 PARAMETER Experiment Name: At_Drought_cDNA_P Parameter: Tissue Value: Aerial
  misc_feature: MA Experiment 108572 PARAMETER Experiment Name: At_Drought_cDNA_P Parameter: Treatment Value: Drought vs. No Drought
  misc_feature: MA Experiment ID: 108573 Result: Up-regulated in Transcription
  misc_feature: MA Experiment 108573 PARAMETER Experiment Name: At_Drought_cDNA_P Parameter: Timepoint (hr) Value: 6
  misc_feature: MA Experiment 108573 PARAMETER Experiment Name: At_Drought_cDNA_P Parameter: Tissue Value: Aerial
  misc_feature: MA Experiment 108573 PARAMETER Experiment Name: At_Drought_cDNA_P Parameter: Treatment Value: Drought vs. No Drought
  misc_feature: MA Experiment ID: 108579 Result: Down-regulated in Transcription
  misc_feature: MA Experiment 108579 PARAMETER Experiment Name: At_4deg_Cold_cDNA_P Parameter: Temperature (deg C) Value: 4 vs. 22
  misc_feature: MA Experiment 108579 PARAMETER Experiment Name: At_4deg_Cold_cDNA_P Parameter: Timepoint (hr) Value: 6
  misc_feature: MA Experiment 108579 PARAMETER Experiment Name: At_4deg_Cold_cDNA_P Parameter: Tissue Value: Aerial
  misc_feature: MA Experiment ID: 108585 Result: Up-regulated in Transcription
  misc_feature: MA Experiment 108585 PARAMETER Experiment Name: At_5mM_NaNP_cDNA_P Parameter: Timepoint (hr) Value: 6
  misc_feature: MA Experiment 108585 PARAMETER Experiment Name: At_5mM_NaNP_cDNA_P Parameter: Tissue Value: Aerial
  misc_feature: MA Experiment 108585 PARAMETER Experiment Name: At_5mM_NaNP_cDNA_P Parameter: Treatment Value: null
  misc_feature: MA Experiment ID: 108605 Result: Up-regulated in Transcription
  misc_feature: MA Experiment 108605 PARAMETER Experiment Name: At_100uM_ABA_cDNA_P Parameter: Timepoint (hr) Value: 6
  misc_feature: MA Experiment 108605 PARAMETER Experiment Name: At_100uM_ABA_cDNA_P Parameter: Tissue Value: Aerial
  misc_feature: MA Experiment 108605 PARAMETER Experiment Name: At_100uM_ABA_cDNA_P Parameter: Treatment Value: 100uM ABA vs. No Treatment
  misc_feature: MA Experiment ID: 108607 Result: Up-regulated in Transcription
  misc_feature: MA Experiment 108607 PARAMETER Experiment Name: At_100uM_ABA_cDNA_P Parameter: Timepoint (hr) Value: 4
  misc_feature: MA Experiment 108607 PARAMETER Experiment Name: At_100uM_ABA_cDNA_P Parameter: Tissue Value: Aerial
  misc_feature: MA Experiment 108607 PARAMETER Experiment Name: At_100uM_ABA_cDNA_P Parameter: Treatment Value: 100uM ABA vs. No Treatment
  misc_feature: MA Experiment ID: 108608 Result: Up-regulated in Transcription
  misc_feature: MA Experiment 108608 PARAMETER Experiment Name: At_100uM_ABA_cDNA_P Parameter: Timepoint (hr) Value: 1
  misc_feature: MA Experiment 108608 PARAMETER Experiment Name: At_100uM_ABA_cDNA_P Parameter: Tissue Value: Aerial
  misc_feature: MA Experiment 108608 PARAMETER Experiment Name: At_100uM_ABA_cDNA_P Parameter: Treatment Value: 100uM ABA vs. No Treatment
  misc_feature: MA Experiment ID: 108609 Result: Up-regulated in Transcription
  misc_feature: MA Experiment 108609 PARAMETER Experiment Name: At_100uM_ABA_cDNA_P Parameter: Timepoint (hr) Value: 24
  misc_feature: MA Experiment 108609 PARAMETER Experiment Name: At_100uM_ABA_cDNA_P Parameter: Tissue Value: Aerial
  misc_feature: MA Experiment 108609 PARAMETER Experiment Name: At_100uM_ABA_cDNA_P Parameter: Treatment Value: 100uM ABA vs. No Treatment
  misc_feature: MA Experiment ID: 20000069 Result: Up-regulated in Transcription
  misc_feature: MA Experiment 20000069 PARAMETER Experiment Name: At_100uM_ABA_Mutants_cDNA_P Parameter: Plant Line Value: CS23
  misc_feature: MA Experiment 20000069 PARAMETER Experiment Name: At_100uM_ABA_Mutants_cDNA_P Parameter: Timepoint (hr) Value: 6
  misc_feature: MA Experiment 20000069 PARAMETER Experiment Name: At_100uM_ABA_Mutants_cDNA_P Parameter: Tissue Value: Aerial
  misc_feature: MA Experiment 20000069 PARAMETER Experiment Name: At_100uM_ABA_Mutants_cDNA_P Parameter: Treatment Value: 100uM ABA vs. No Treatment
  misc_feature: MA Experiment ID: 20000070 Result: Up-regulated in Transcription
  misc_feature: MA Experiment 20000070 PARAMETER Experiment Name: At_100uM_ABA_Mutants_cDNA_P Parameter: Plant Line Value: CS24
  misc_feature: MA Experiment 20000070 PARAMETER Experiment Name: At_100uM_ABA_Mutants_cDNA_P Parameter: Timepoint (hr) Value: 6
  misc_feature: MA Experiment 20000070 PARAMETER Experiment Name: At_100uM_ABA_Mutants_cDNA_P Parameter: Tissue Value: Aerial
  misc_feature: MA Experiment 20000070 PARAMETER Experiment Name: At_100uM_ABA_Mutants_cDNA_P Parameter: Treatment Value: 100uM ABA vs. No Treatment
  misc_feature: MA Experiment ID: 20000071 Result: Up-regulated in Transcription
  misc_feature: MA Experiment 20000071 PARAMETER Experiment Name: At_100uM_ABA_Mutants_cDNA_P Parameter: Plant Line Value: CS8104
  misc_feature: MA Experiment 20000071 PARAMETER Experiment Name: At_100uM_ABA_Mutants_cDNA_P Parameter: Timepoint (hr) Value: 6
  misc_feature: MA Experiment 20000071 PARAMETER Experiment Name: At_100uM_ABA_Mutants_cDNA_P Parameter: Tissue Value: Aerial
  misc_feature: MA Experiment 20000071 PARAMETER Experiment Name: At_100uM_ABA_Mutants_cDNA_P Parameter: Treatment Value: 100uM ABA vs. No Treatment
  misc_feature: MA Experiment ID: 20000072 Result: Up-regulated in Transcription
  misc_feature: MA Experiment 20000072 PARAMETER Experiment Name: At_100uM_ABA_Mutants_cDNA_P Parameter: Plant Line Value: CS8105
  misc_feature: MA Experiment 20000072 PARAMETER Experiment Name: At_100uM_ABA_Mutants_cDNA_P Parameter: Timepoint (hr) Value: 6
  misc_feature: MA Experiment 20000072 PARAMETER Experiment Name: At_100uM_ABA_Mutants_cDNA_P Parameter: Tissue Value: Aerial
  misc_feature: MA Experiment 20000072 PARAMETER Experiment Name: At_100uM_ABA_Mutants_cDNA_P Parameter: Treatment Value: 100uM ABA vs. No Treatment
  misc_feature: MA Experiment ID: 20000086 Result: Up-regulated in Transcription
  misc_feature: MA Experiment 20000086 PARAMETER Experiment Name: At_100uM_ABA_Mutants_cDNA_P Parameter: Plant Line Value: CS22
  misc_feature: MA Experiment 20000086 PARAMETER Experiment Name: At_100uM_ABA_Mutants_cDNA_P Parameter: Timepoint (hr) Value: 6
  misc_feature: MA Experiment 20000086 PARAMETER Experiment Name: At_100uM_ABA_Mutants_cDNA_P Parameter: Tissue Value: Aerial
  misc_feature: MA Experiment 20000086 PARAMETER Experiment Name: At_100uM_ABA_Mutants_cDNA_P Parameter: Treatment Value: 100uM ABA vs. No Treatment
  misc_feature: MA Experiment ID: 20000087 Result: Up-regulated in Transcription
  misc_feature: MA Experiment 20000087 PARAMETER Experiment Name: At_100uM_ABA_Mutants_cDNA_P Parameter: Plant Line Value: WS
  misc_feature: MA Experiment 20000087 PARAMETER Experiment Name: At_100uM_ABA_Mutants_cDNA_P Parameter: Timepoint (hr) Value: 6
  misc_feature: MA Experiment 20000087 PARAMETER Experiment Name: At_100uM_ABA_Mutants_cDNA_P Parameter: Tissue Value: Aerial
  misc_feature: MA Experiment 20000087 PARAMETER Experiment Name: At_100uM_ABA_Mutants_cDNA_P Parameter: Treatment Value: 100uM ABA vs. No Treatment
  misc_feature: MA Experiment ID: 20000088 Result: Up-regulated in Transcription
  misc_feature: MA Experiment 20000088 PARAMETER Experiment Name: At_100uM_ABA_Mutants_cDNA_P Parameter: Plant Line Value: Landsberg
  misc_feature: MA Experiment 20000088 PARAMETER Experiment Name: At_100uM_ABA_Mutants_cDNA_P Parameter: Timepoint (hr) Value: 6
  misc_feature: MA Experiment 20000088 PARAMETER Experiment Name: At_100uM_ABA_Mutants_cDNA_P Parameter: Tissue Value: Aerial
  misc_feature: MA Experiment 20000088 PARAMETER Experiment Name: At_100uM_ABA_Mutants_cDNA_P Parameter: Treatment Value: 100uM ABA vs. No Treatment
  misc_feature: MA Experiment ID: 20000089 Result: Up-regulated in Transcription
  misc_feature: MA Experiment ID: 20000111 Result: Down-regulated in Transcription
  misc_feature: MA Experiment 20000111 PARAMETER Experiment Name: At_42deg_Heat_cDNA_P Parameter: Temperature (deg C) Value: 42 vs. 22
  misc_feature: MA Experiment 20000111 PARAMETER Experiment Name: At_42deg_Heat_cDNA_P Parameter: Timepoint (hr) Value: 6
  misc_feature: MA Experiment 20000111 PARAMETER Experiment Name: At_42deg_Heat_cDNA_P Parameter: Tissue Value: Aerial
  misc_feature: MA Experiment ID: 20000113 Result: Down-regulated in Transcription
  misc_feature: MA Experiment 20000113 PARAMETER Experiment Name: At_42deg_Heat_cDNA_P Parameter: Temperature (deg C) Value: 42 vs. 22
  misc_feature: MA Experiment 20000113 PARAMETER Experiment Name: At_42deg_Heat_cDNA_P Parameter: Timepoint (hr) Value: 8
  misc_feature: MA Experiment 20000113 PARAMETER Experiment Name: At_42deg_Heat_cDNA_P Parameter: Tissue Value: Aerial
  misc_feature: MA Experiment ID: 20000117 Result: Up-regulated in Transcription
  misc_feature: MA Experiment 20000117 PARAMETER Experiment Name: At_100uM_ABA_Mutants_cDNA_P Parameter: Plant Line Value: Columbia
  misc_feature: MA Experiment 20000117 PARAMETER Experiment Name: At_100uM_ABA_Mutants_cDNA_P Parameter: Timepoint (hr) Value: 6
  misc_feature: MA Experiment 20000117 PARAMETER Experiment Name: At_100uM_ABA_Mutants_cDNA_P Parameter: Tissue Value: Aerial
  misc_feature: MA Experiment 20000117 PARAMETER Experiment Name: At_100uM_ABA_Mutants_cDNA_P Parameter: Treatment Value: 100uM ABA vs. No Treatment
  misc_feature: MA Experiment ID: 20000166 Result: Up-regulated in Transcription
  misc_feature: MA Experiment 20000166 PARAMETER Experiment Name: At_100uM_ABA_P Parameter: Age (day) Value: 14
  misc_feature: MA Experiment 20000166 PARAMETER Experiment Name: At_100uM_ABA_P Parameter: Organism Value: A. thaliana
  misc_feature: MA Experiment 20000166 PARAMETER Experiment Name: At_100uM_ABA_P Parameter: Plant Line Value: WS
  misc_feature: MA Experiment 20000166 PARAMETER Experiment Name: At_100uM_ABA_P Parameter: Timepoint (hr) Value: 1
  misc_feature: MA Experiment 20000166 PARAMETER Experiment Name: At_100uM_ABA_P Parameter: Tissue Value: Aerial
  misc_feature: MA Experiment 20000166 PARAMETER Experiment Name: At_100uM_ABA_P Parameter: Treatment Value: 100uM ABA vs. No Treatment
  misc_feature: MA Experiment ID: 20000169 Result: Up-regulated in Transcription
  misc_feature: MA Experiment 20000169 PARAMETER Experiment Name: At_100uM_ABA_P Parameter: Age (day) Value: 14
  misc_feature: MA Experiment 20000169 PARAMETER Experiment Name: At_100uM_ABA_P Parameter: Organism Value: A. thaliana
  misc_feature: MA Experiment 20000169 PARAMETER Experiment Name: At_100uM_ABA_P Parameter: Plant Line Value: WS
  misc_feature: MA Experiment 20000169 PARAMETER Experiment Name: At_100uM_ABA_P Parameter: Timepoint (hr) Value: 6
  misc_feature: MA Experiment 20000169 PARAMETER Experiment Name: At_100uM_ABA_P Parameter: Tissue Value: Aerial
  misc_feature: MA Experiment 20000169 PARAMETER Experiment Name: At_100uM_ABA_P Parameter: Treatment Value: 100uM ABA vs. No Treatment
  misc_feature: MA Experiment ID: 20000171 Result: Down-regulated in Transcription
  misc_feature: MA Experiment 20000171 PARAMETER Experiment Name: At_42deg_Heat_P Parameter: Age (day) Value: 14
  misc_feature: MA Experiment 20000171 PARAMETER Experiment Name: At_42deg_Heat_P Parameter: Organism Value: A. thaliana
  misc_feature: MA Experiment 20000171 PARAMETER Experiment Name: At_42deg_Heat_P Parameter: Plant Line Value: WS
  misc_feature: MA Experiment 20000171 PARAMETER Experiment Name: At_42deg_Heat_P Parameter: Temperature (deg C) Value: 42 vs. 22
  misc_feature: MA Experiment 20000171 PARAMETER Experiment Name: At_42deg_Heat_P Parameter: Timepoint (hr) Value: 1
  misc_feature: MA Experiment 20000171 PARAMETER Experiment Name: At_42deg_Heat_P Parameter: Tissue Value: Aerial
  misc_feature: MA Experiment ID: 20000173 Result: Down-regulated in Transcription
  misc_feature: MA Experiment 20000173 PARAMETER Experiment Name: At_42deg_Heat_P Parameter: Age (day) Value: 14
  misc_feature: MA Experiment 20000173 PARAMETER Experiment Name: At_42deg_Heat_P Parameter: Organism Value: A. thaliana
  misc_feature: MA Experiment 20000173 PARAMETER Experiment Name: At_42deg_Heat_P Parameter: Plant Line Value: WS
  misc_feature: MA Experiment 20000173 PARAMETER Experiment Name: At_42deg_Heat_P Parameter: Temperature (deg C) Value: 42 vs. 22
  misc_feature: MA Experiment 20000173 PARAMETER Experiment Name: At_42deg_Heat_P Parameter: Timepoint (hr) Value: 6
  misc_feature: MA Experiment 20000173 PARAMETER Experiment Name: At_42deg_Heat_P Parameter: Tissue Value: Aerial
  misc_feature: MA Experiment ID: 20000179 Result: Down-regulated in Transcription
  misc_feature: MA Experiment 20000179 PARAMETER Experiment Name: At_Germinating_Seeds_P Parameter: Age (hr) Value: 6 vs. 0
  misc_feature: MA Experiment 20000179 PARAMETER Experiment Name: At_Germinating_Seeds_P Parameter: Tissue Value: Germinating Seeds
  misc_feature: MA Experiment ID: 20000180 Result: Down-regulated in Transcription
  misc_feature: MA Experiment 20000180 PARAMETER Experiment Name: At_Germinating_Seeds_P Parameter: Age (hr) Value: 24 vs. 0
  misc_feature: MA Experiment 20000180 PARAMETER Experiment Name: At_Germinating_Seeds_P Parameter: Tissue Value: Germinating Seeds
  misc_feature: MA Experiment ID: 20000182 Result: Up-regulated in Transcription
  misc_feature: MA Experiment 20000182 PARAMETER Experiment Name: At_2mM_SA_P Parameter: Age (day) Value: 14
  misc_feature: MA Experiment 20000182 PARAMETER Experiment Name: At_2mM_SA_P Parameter: Organism Value: A. thaliana
  misc_feature: MA Experiment 20000182 PARAMETER Experiment Name: At_2mM_SA_P Parameter: Plant Line Value: WS
  misc_feature: MA Experiment 20000182 PARAMETER Experiment Name: At_2mM_SA_P Parameter: Timepoint (hr) Value: 6
  misc_feature: MA Experiment 20000182 PARAMETER Experiment Name: At_2mM_SA_P Parameter: Tissue Value: Aerial
  misc_feature: MA Experiment 20000182 PARAMETER Experiment Name: At_2mM_SA_P Parameter: Treatment Value: 2mM SA vs. No Treatment
  misc_feature: MA Experiment ID: 20000185 Result: Down-regulated in Transcription
  misc_feature: MA Experiment 20000185 PARAMETER Experiment Name: At_Roots__P Parameter: Age (day) Value: 7 vs. 21
  misc_feature: MA Experiment 20000185 PARAMETER Experiment Name: At_Roots__P Parameter: Organism Value: A. thaliana
  misc_feature: MA Experiment 20000185 PARAMETER Experiment Name: At_Roots__P Parameter: Tissue Value: Roots vs. Whole Plant
  misc_feature: MA Experiment ID: 20000234 Result: Down-regulated in Transcription
  misc_feature: MA Experiment 20000234 PARAMETER Experiment Name: At_Siliques_P Parameter: Age (day) Value: 21
  misc_feature: MA Experiment 20000234 PARAMETER Experiment Name: At_Siliques_P Parameter: Organism Value: A. thaliana
  misc_feature: MA Experiment 20000234 PARAMETER Experiment Name: At_Siliques_P Parameter: Plant Line Value: WS
  misc_feature: MA Experiment 20000234 PARAMETER Experiment Name: At_Siliques_P Parameter: Tissue Value: Less Than 5mm Siliques vs. Whole Plant
  misc_feature: MA Experiment ID: 20000235 Result: Down-regulated in Transcription
  misc_feature: MA Experiment 20000235 PARAMETER Experiment Name: At_Siliques_P Parameter: Age (day) Value: 21
  misc_feature: MA Experiment 20000235 PARAMETER Experiment Name: At_Siliques_P Parameter: Organism Value: A. thaliana
  misc_feature: MA Experiment 20000235 PARAMETER Experiment Name: At_Siliques_P Parameter: Plant Line Value: WS
  misc_feature: MA Experiment 20000235 PARAMETER Experiment Name: At_Siliques_P Parameter: Tissue Value: 5-10mm Siliques vs. Whole Plant
  misc_feature: MA Experiment ID: 20000265 Result: Down-regulated in Transcription
  misc_feature: MA Experiment 20000265 PARAMETER Experiment Name: At_Open_Flower_P Parameter: Age (day) Value: 21
  misc_feature: MA Experiment 20000265 PARAMETER Experiment Name: At_Open_Flower_P Parameter: Plant Line Value: WS
  misc_feature: MA Experiment 20000265 PARAMETER Experiment Name: At_Open_Flower_P Parameter: Tissue Value: Closed Flower vs. Whole Plant
  misc_feature: MA Experiment ID: 20000439 Result: Down-regulated in Transcription
  misc_feature: MA Experiment 20000439 PARAMETER Experiment Name: At_Roots__P Parameter: Age (day) Value: 14 vs. 21
  misc_feature: MA Experiment 20000439 PARAMETER Experiment Name: At_Roots__P Parameter: Organism Value: A. thaliana
  misc_feature: MA Experiment 20000439 PARAMETER Experiment Name: At_Roots__P Parameter: Tissue Value: Roots vs. Whole Plant
  misc_feature: MA Experiment ID: 20000445 Result: Up-regulated in Transcription
  misc_feature: MA Experiment 20000445 PARAMETER Experiment Name: At_100uM_NAA__P Parameter: Age (day) Value: 14
  misc_feature: MA Experiment 20000445 PARAMETER Experiment Name: At_100uM_NAA__P Parameter: Organism Value: A. thaliana
  misc_feature: MA Experiment 20000445 PARAMETER Experiment Name: At_100uM_NAA__P Parameter: Plant Line Value: WS
  misc_feature: MA Experiment 20000445 PARAMETER Experiment Name: At_100uM_NAA__P Parameter: Timepoint (hr) Value: 6
  misc_feature: MA Experiment 20000445 PARAMETER Experiment Name: At_100uM_NAA__P Parameter: Tissue Value: Aerial
  misc_feature: MA Experiment 20000445 PARAMETER Experiment Name: At_100uM_NAA__P Parameter: Treatment Value: 100uM NAA vs. No Treatment
  misc_feature: MA Experiment ID: 20000453 Result: Up-regulated in Transcription
  misc_feature: MA Experiment 20000453 PARAMETER Experiment Name: At_100uM_ABA_P Parameter: Age (day) Value: 15
  misc_feature: MA Experiment 20000453 PARAMETER Experiment Name: At_100uM_ABA_P Parameter: Organism Value: A. thaliana
  misc_feature: MA Experiment 20000453 PARAMETER Experiment Name: At_100uM_ABA_P Parameter: Plant Line Value: WS
  misc_feature: MA Experiment 20000453 PARAMETER Experiment Name: At_100uM_ABA_P Parameter: Timepoint (hr) Value: 24
  misc_feature: MA Experiment 20000453 PARAMETER Experiment Name: At_100uM_ABA_P Parameter: Tissue Value: Aerial
  misc_feature: MA Experiment 20000453 PARAMETER Experiment Name: At_100uM_ABA_P Parameter: Treatment Value: 100uM ABA vs. No Treatment
  misc_feature: MA Experiment ID: 20000455 Result: Up-regulated in Transcription
  misc_feature: MA Experiment 20000455 PARAMETER Experiment Name: At_100uM_ABA_P Parameter: Age (day) Value: 16
  misc_feature: MA Experiment 20000455 PARAMETER Experiment Name: At_100uM_ABA_P Parameter: Organism Value: A. thaliana
  misc_feature: MA Experiment 20000455 PARAMETER Experiment Name: At_100uM_ABA_P Parameter: Plant Line Value: WS
  misc_feature: MA Experiment 20000455 PARAMETER Experiment Name: At_100uM_ABA_P Parameter: Timepoint (hr) Value: 48
  misc_feature: MA Experiment 20000455 PARAMETER Experiment Name: At_100uM_ABA_P Parameter: Tissue Value: Aerial
  misc_feature: MA Experiment 20000455 PARAMETER Experiment Name: At_100uM_ABA_P Parameter: Treatment Value: 100uM ABA vs. No Treatment
  misc_feature: MA Experiment ID: 20000456 Result: Down-regulated in Transcription
  misc_feature: MA Experiment 20000456 PARAMETER Experiment Name: At_100uM_BA_P Parameter: Age (day) Value: 14
  misc_feature: MA Experiment 20000456 PARAMETER Experiment Name: At_100uM_BA_P Parameter: Organism Value: A. thaliana
  misc_feature: MA Experiment 20000456 PARAMETER Experiment Name: At_100uM_BA_P Parameter: Plant Line Value: WS
  misc_feature: MA Experiment 20000456 PARAMETER Experiment Name: At_100uM_BA_P Parameter: Timepoint (hr) Value: 6
  misc_feature: MA Experiment 20000456 PARAMETER Experiment Name: At_100uM_BA_P Parameter: Tissue Value: Aerial
  misc_feature: MA Experiment 20000456 PARAMETER Experiment Name: At_100uM_BA_P Parameter: Treatment Value: 100uM BA vs. No Treatment
  misc_feature: MA Experiment ID: 20000573 Result: Up-regulated in Transcription
  misc_feature: MA Experiment 20000573 PARAMETER Experiment Name: At_100uM_ABA_Mutants__P Parameter: Organism Value: A. thaliana
  misc_feature: MA Experiment 20000573 PARAMETER Experiment Name: At_100uM_ABA_Mutants__P Parameter: Plant Line Value: CS22 vs. Ler wt
  misc_feature: MA Experiment 20000573 PARAMETER Experiment Name: At_100uM_ABA_Mutants__P Parameter: Timepoint (hr) Value: N/A
  misc_feature: MA Experiment 20000573 PARAMETER Experiment Name: At_100uM_ABA_Mutants__P Parameter: Tissue Value: Whole Plant
  misc_feature: MA Experiment 20000573 PARAMETER Experiment Name: At_100uM_ABA_Mutants__P Parameter: Treatment Value: None
  misc_feature: MA Experiment ID: 20000574 Result: Up-regulated in Transcription
  misc_feature: MA Experiment 20000574 PARAMETER Experiment Name: At_100uM_ABA_Mutants__P Parameter: Organism Value: A. thaliana
  misc_feature: MA Experiment 20000574 PARAMETER Experiment Name: At_100uM_ABA_Mutants__P Parameter: Plant Line Value: CS23 vs. Ler wt
  misc_feature: MA Experiment 20000574 PARAMETER Experiment Name: At_100uM_ABA_Mutants__P Parameter: Timepoint (hr) Value: N/A
  misc_feature: MA Experiment 20000574 PARAMETER Experiment Name: At_100uM_ABA_Mutants__P Parameter: Tissue Value: Whole Plant
  misc_feature: MA Experiment 20000574 PARAMETER Experiment Name: At_100uM_ABA_Mutants__P Parameter: Treatment Value: None
  misc_feature: MA Experiment ID: 20000794 Result: Up-regulated in Transcription
  misc_feature: MA Experiment 20000794 PARAMETER Experiment Name: At_Petals_P Parameter: Age (day) Value: 23-25 days
  misc_feature: MA Experiment 20000794 PARAMETER Experiment Name: At_Petals_P Parameter: Plant Line Value: WS
  misc_feature: MA Experiment 20000794 PARAMETER Experiment Name: At_Petals_P Parameter: Tissue Value: Petals vs. Whole plant
  misc_feature: MA Experiment ID: 20001248 Result: Up-regulated in Transcription
  misc_feature: MA Experiment 20001248 PARAMETER Experiment Name: At_Far-red-induction_P Parameter: Age (day) Value: 7
  misc_feature: MA Experiment 20001248 PARAMETER Experiment Name: At_Far-red-induction_P Parameter: Light Value: Far-red vs. White
  misc_feature: MA Experiment 20001248 PARAMETER Experiment Name: At_Far-red-induction_P Parameter: Organism Value: A. thaliana
  misc_feature: MA Experiment 20001248 PARAMETER Experiment Name: At_Far-red-induction_P Parameter: Plant Line Value: Columbia
  misc_feature: MA Experiment 20001248 PARAMETER Experiment Name: At_Far-red-induction_P Parameter: Timepoint (hr) Value: 4
  misc_feature: MA Experiment 20001248 PARAMETER Experiment Name: At_Far-red-induction_P Parameter: Tissue Value: Whole Plant
  misc_feature: MA Experiment ID: 20001450 Result: Up-regulated in Transcription
  misc_feature: MA Experiment 20001450 PARAMETER Experiment Name: At_Far-red-induction_P Parameter: Age (day) Value: 7
  misc_feature: MA Experiment 20001450 PARAMETER Experiment Name: At_Far-red-induction_P Parameter: Light Value: Far-red vs. White
  misc_feature: MA Experiment 20001450 PARAMETER Experiment Name: At_Far-red-induction_P Parameter: Organism Value: A. thaliana
  misc_feature: MA Experiment 20001450 PARAMETER Experiment Name: At_Far-red-induction_P Parameter: Plant Line Value: Columbia
  misc_feature: MA Experiment 20001450 PARAMETER Experiment Name: At_Far-red-induction_P Parameter: Timepoint (hr) Value: 8
  misc_feature: MA Experiment 20001450 PARAMETER Experiment Name: At_Far-red-induction_P Parameter: Tissue Value: Whole Plant
  misc_feature: MA Experiment ID: 20001906 Result: Up-regulated in Transcription
  misc_feature: MA Experiment 20001906 PARAMETER Experiment Name: At_Drought_Reproduction_P Parameter: Age (day) Value: 35
  misc_feature: MA Experiment 20001906 PARAMETER Experiment Name: At_Drought_Reproduction_P Parameter: Organism Value: A. thaliana
  misc_feature: MA Experiment 20001906 PARAMETER Experiment Name: At_Drought_Reproduction_P Parameter: Plant Line Value: WS
  misc_feature: MA Experiment 20001906 PARAMETER Experiment Name: At_Drought_Reproduction_P Parameter: Timepoint (day) Value: 5
  misc_feature: MA Experiment 20001906 PARAMETER Experiment Name: At_Drought_Reproduction_P Parameter: Tissue Value: Siliques
  misc_feature: MA Experiment 20001906 PARAMETER Experiment Name: At_Drought_Reproduction_P Parameter: Treatment Value: Drought vs. No Drought
  misc_feature: MA Experiment ID: 20001908 Result: Up-regulated in Transcription
  misc_feature: MA Experiment 20001908 PARAMETER Experiment Name: At_Drought_Reproduction_P Parameter: Age (day) Value: 40
  misc_feature: MA Experiment 20001908 PARAMETER Experiment Name: At_Drought_Reproduction_P Parameter: Organism Value: A. thaliana
  misc_feature: MA Experiment 20001908 PARAMETER Experiment Name: At_Drought_Reproduction_P Parameter: Plant Line Value: WS
  misc_feature: MA Experiment 20001908 PARAMETER Experiment Name: At_Drought_Reproduction_P Parameter: Timepoint (day) Value: 10
  misc_feature: MA Experiment 20001908 PARAMETER Experiment Name: At_Drought_Reproduction_P Parameter: Tissue Value: Siliques
  misc_feature: MA Experiment 20001908 PARAMETER Experiment Name: At_Drought_Reproduction_P Parameter: Treatment Value: Drought vs. No Drought
  misc_feature: MA Experiment ID: 20001911 Result: Up-regulated in Transcription
  misc_feature: MA Experiment 20001911 PARAMETER Experiment Name: At_Drought_Reproduction_P Parameter: Age (day) Value: 40
  misc_feature: MA Experiment 20001911 PARAMETER Experiment Name: At_Drought_Reproduction_P Parameter: Organism Value: A. thaliana
  misc_feature: MA Experiment 20001911 PARAMETER Experiment Name: At_Drought_Reproduction_P Parameter: Plant Line Value: WS
  misc_feature: MA Experiment 20001911 PARAMETER Experiment Name: At_Drought_Reproduction_P Parameter: Timepoint (day) Value: 10
  misc_feature: MA Experiment 20001911 PARAMETER Experiment Name: At_Drought_Reproduction_P Parameter: Tissue Value: Flowers
  misc_feature: MA Experiment 20001911 PARAMETER Experiment Name: At_Drought_Reproduction_P Parameter: Treatment Value: Drought vs. No Drought
ccacgcgtccgaaaaatcgaccaaagagtaaccaaattgatatttatctcttctcaaccatggcgatgagacaagccgctaaggcaacgatcagggcctgttcttcctcttcttcttcgggttacttcgctcgacgtcagtttaatgcatcttctggtgatagcaaaaagattgtaggagttttctacaaggccaacgaatacgctaccaagaaccctaacttccttggctgcgtcgagaatgccttaggaatccgtgactggcttgaatcccaaggacatcagtacatcgtcactgatgacaaggaaggccctgattgcgaacttgagaaacatatcccggatcttcacgtcctaatctccactcccttccacccggcgtatgtaactgctgaaagaatcaagaaagccaaaaacttgaagcttctcctcacagctggtattggctcggatcatattgatctccaggcagctgcagctgctggcctgacggttgctgaagtcacgggaagcaacgtggtctcagtggcagaagatgagctcatgagaatcttaatcctcatgcgcaacttcgtaccagggtacaaccaggtcgtcaaaggcgagtggaacgtcgcgggcattgcgtacagagcttatgatcttgaagggaagacgataggaaccgtgggagctggaagaatcggaaagcttttgctgcagcggttgaaaccattcgggtgtaacttgttgtaccatgacaggcttcagatggcaccagagctggagaaagagactggagctaagttcgttgaggatctgaatgaaatgctccctaaatgtgacgttatagtcatcaacatgcctctcacggagaagacaagaggaatgttcaacaaagagttgatagggaaattgaagaaaggcgttttgatagtgaacaacgcaagaggagccatcatggagaggcaagcagtggtggatgcggtggagagtggacacattggagggtacagcggagacgtttgggacccacagccagctcctaaggaccatccatggcgttacatgcctaaccaggctatgacccctcatacctccggcaccaccattgacgctcagctacggtatgcggcggggacgaaagacatgttggagagatacttcaagggagaagacttccctactgagaattacatcgtcaaggacggtgaacttgctcctcagtaccggtaagcttttgaggaggtgacattgggaagatgatgagaaacgaccccaacgttcaagaaaacaaataaagaagtatttggactttgctaagtcgaatgacttgagtcatcttttggtttagtttttgttattatataagcacaataataataggagggcacttcccctgttctgagagtttgtgaacatattactcagtggtttaaatcacacatatgtatttgtttccccaatcgtaggaactcaatggtttcaaatctcatt

SEQ ID NO: 77726 - protein, 403 aa, Arabidopsis thaliana
  peptide (1)..(403): Ceres Seq. ID no. 12577312
  misc_feature (72)..(169): Pfam Name: D-isomer specific 2-hydroxyacid dehydrogenase, Pfam Description: D-isomer specific 2-hydroxyacid dehydrogenase,
  misc_feature (20)..(403): Homolog of NCBI NO: 15241492 NR Description: formate dehydrogenase (FDH); protein id: supported by cDNA: 7530., supported by cDNA: gi_14517547, by cDNA: gi_15810033, supported by cDNA: gi_19548046, supported
  misc_feature (20)..(403): Homolog of NCBI NO: 26454627 NR Description: Formate dehydrogenase, mitochondrial precursor dependent formate dehydrogenase) (FDH)
  misc_feature (22)..(403): Homolog of NCBI NO: 542089 NR Description: formate dehydrogenase (EC 1.2.1.2) precursor,
  misc_feature (45)..(403): Homolog of NCBI NO: 38636526 NR Description: formate dehydrogenase [Quercus robur]
  misc_feature (45)..(403): Homolog of NCBI NO: 21263612 NR Description: Formate dehydrogenase, mitochondrial precursor dependent formate dehydrogenase) (FDH)
  misc_feature (45)..(403): Homolog of NCBI NO: 21263611 NR Description: Formate dehydrogenase, mitochondrial precursor
  misc_feature (18)..(399): Homolog of NCBI NO: 4572458 NR Description: NAD-dependent formate dehydrogenase
  misc_feature (60)..(301): Homolog of NCBI NO: 40738675 NR Description: FDH_EMENI Probable formate dehydrogenase
  misc_feature (300)..(399): Homolog of NCBI NO: 40738675 NR Description: FDH_EMENI Probable formate dehydrogenase
  misc_feature (60)..(301): Homolog of NCBI NO: 416574 NR Description: PROBABLE FORMATE DEHYDROGENASE (NAD-DEPENDENT
TRPKNRPKSNQIDIYLFSTMAMRQAAKATIRACSSSSSSGYFARRQFNASSGDSKKIVGVFYKANEYATKNPNFLGCVENALGIRDWLESQGHQYIVTDDKEGPDCELEKHIPDLHVLISTPFHPAYVTAERIKKAKNLKLLLTAGIGSDHIDLQAAAAAGLTVAEVTGSNVVSVAEDELMRILILMRNFVPGYNQVVKGEWNVAGIAYRAYDLEGKTIGTVGAGRIGKLLLQRLKPFGCNLLYHDRLQMAPELEKETGAKFVEDLNEMLPKCDVIVINMPLTEKTRGMFNKELIGKLKKGVLIVNNARGAIMERQAVVDAVESGHIGGYSGDVWDPQPAPKDHPWRYMPNQAMTPHTSGTTIDAQLRYAAGTKDMLERYFKGEDFPTENYIVKDGELAPQYR

SEQ ID NO: 77727 - protein, 384 aa, Arabidopsis thaliana; identical to SEQ ID NO: 76128
  peptide (1)..(384): Ceres Seq. ID no. 12577313
  misc_feature (53)..(150): Pfam Name: D-isomer specific 2-hydroxyacid dehydrogenase, Pfam Description: D-isomer specific 2-hydroxyacid dehydrogenase,
  misc_feature (1)..(384): Homolog of NCBI NO: 15241492 NR Description: formate dehydrogenase (FDH); protein id: supported by cDNA: 7530., supported by cDNA: gi_14517547, by cDNA: gi_15810033, supported by cDNA: gi_19548046, supported
  misc_feature (1)..(384): Homolog of NCBI NO: 26454627 NR Description: Formate dehydrogenase, mitochondrial precursor dependent formate dehydrogenase) (FDH)
  misc_feature (3)..(384): Homolog of NCBI NO: 542089 NR Description: formate dehydrogenase (EC 1.2.1.2) precursor,
  misc_feature (26)..(384): Homolog of NCBI NO: 38636526 NR Description: formate dehydrogenase [Quercus robur]
  misc_feature (26)..(384): Homolog of NCBI NO: 21263612 NR Description: Formate dehydrogenase, mitochondrial precursor dependent formate dehydrogenase) (FDH)
  misc_feature (26)..(384): Homolog of NCBI NO: 21263611 NR Description: Formate dehydrogenase, mitochondrial precursor
  misc_feature (1)..(380): Homolog of NCBI NO: 4572458 NR Description: NAD-dependent formate dehydrogenase
  misc_feature (41)..(282): Homolog of NCBI NO: 40738675 NR Description: FDH_EMENI Probable formate dehydrogenase
  misc_feature (281)..(380): Homolog of NCBI NO: 40738675 NR Description: FDH_EMENI Probable formate dehydrogenase
  misc_feature (41)..(282): Homolog of NCBI NO: 416574 NR Description: PROBABLE FORMATE DEHYDROGENASE (NAD-DEPENDENT

SEQ ID NO: 77728 - protein, 382 aa, Arabidopsis thaliana; identical to SEQ ID NO: 76129
  peptide (1)..(382): Ceres Seq. ID no. 12577314
  misc_feature (51)..(148): Pfam Name: D-isomer specific 2-hydroxyacid dehydrogenase, Pfam Description: D-isomer specific 2-hydroxyacid dehydrogenase,
  misc_feature (1)..(382): Homolog of NCBI NO: 15241492 NR Description: formate dehydrogenase (FDH); protein id: supported by cDNA: 7530., supported by cDNA: gi_14517547, by cDNA: gi_15810033, supported by cDNA: gi_19548046, supported
  misc_feature (1)..(382): Homolog of NCBI NO: 26454627 NR Description: Formate dehydrogenase, mitochondrial precursor dependent formate dehydrogenase) (FDH)
  misc_feature (1)..(382): Homolog of NCBI NO: 542089 NR Description: formate dehydrogenase (EC 1.2.1.2) precursor,
  misc_feature (24)..(382): Homolog of NCBI NO: 38636526 NR Description: formate dehydrogenase [Quercus robur]
  misc_feature (24)..(382): Homolog of NCBI NO: 21263612 NR Description: Formate dehydrogenase, mitochondrial precursor dependent formate dehydrogenase) (FDH)
  misc_feature (24)..(382): Homolog of NCBI NO: 21263611 NR Description: Formate dehydrogenase, mitochondrial precursor
  misc_feature (1)..(378): Homolog of NCBI NO: 4572458 NR Description: NAD-dependent formate dehydrogenase
  misc_feature (39)..(280): Homolog of NCBI NO: 40738675 NR Description: FDH_EMENI Probable formate dehydrogenase
  misc_feature (279)..(378): Homolog of NCBI NO: 40738675 NR Description: FDH_EMENI Probable formate dehydrogenase
  misc_feature (39)..(280): Homolog of NCBI NO: 416574 NR Description: PROBABLE FORMATE DEHYDROGENASE (NAD-DEPENDENT

SEQ ID NO: 77729 - DNA, 3261 bp, Arabidopsis thaliana
  misc_feature (1)..(3261): Ceres Seq. ID no. 12577347
  misc_feature: MA Experiment ID: 20001451 Result: Up-regulated in Transcription
  misc_feature: MA Experiment 20001451 PARAMETER Experiment Name: At_Far-red-induction_P Parameter: Age (day) Value: 7
  misc_feature: MA Experiment 20001451 PARAMETER Experiment Name: At_Far-red-induction_P Parameter: Light Value: Far-red vs. White
  misc_feature: MA Experiment 20001451 PARAMETER Experiment Name: At_Far-red-induction_P Parameter: Organism Value: A. thaliana
  misc_feature: MA Experiment 20001451 PARAMETER Experiment Name: At_Far-red-induction_P Parameter: Plant Line Value: Columbia
  misc_feature: MA Experiment 20001451 PARAMETER Experiment Name: At_Far-red-induction_P Parameter: Timepoint (hr) Value: 24
  misc_feature: MA Experiment 20001451 PARAMETER Experiment Name: At_Far-red-induction_P Parameter: Tissue Value: Whole Plant
ttcttctagaatttgcgcatcctctccgccatggctgccgagaagttaagagacttgagtcagccgattgacgtcgttttactcgatgccactgttgaggccttttactctaccggatctaaggaagaaagagcttctgcggataatatcttgcgggatttgaaagctaatcctgatacttggcttcaagttgttcacattctacagaacaccagtagtacgcataccaaattttttgcccttcaggtgctggaaggtgttataaaatataggtggaatgcattacccgttgaacaacgtgatggaatgaaaaattacatctctgatgtcattgtgcagctgtcaagggatgaagcatctttcagaacggaaaggctttatgtcaacaagttaaatatcatcctggttcagatcgtgaaacaggagtggccggcaaagtggaaaagctttattcctgatttagttatagctgctaagactagtgaaactatctgtgagaattgcatggctattttgaaactcctaagtgaagaggtctttgatttctcaaaaggagagatgactcagcaaaagataaaagaactgaaacagtctctaaacagcgagtttcaactcattcacgagttatgcctatatgtcctctcagcttcccaaagacaagagcttatacgtgctacactctctgcattgcatgcctatctttcttggattccgttgggatacatatttgagtcccctttgctggagatcctacttaaattcttccctgttccagcatataggaatctcacacttcaatgtttgtcagaggttgcatctcttaattttggggacttctacgatatgcaatatgtcaagatgtacagcattttcatgaatcagttgcaggcaattctccctttaaatttaaatatccctgaggcatattcaactggaagtagtgaagaacaggcttttatccagaacttggcactgtttttcacttcgtttttcaagttacatataaaaatcctagaatctgcacccgaaaatatttctctattacttgcgggtctgggatatctcattagcatatcgtatgttgatgacactgaagtattcaaggtttgtttggactattggaattcattagtgttggagttgtttgggacgcgacatcatgcgtgtcaccctgcactaactccaagtctgtttggattgcaaatggctttccttcctagtacagttgatggtgttaaatctgaagtcactgagcggcaaaaactttattcagatccaatgtcaaaattaaggggactcatgattagtcgcacggctaagcctgaagaagtgttaattgttgaggacgaaaatgggaacattgttcgtgaaactatgaaggataatgatgttcttgtccagtataagataatgcgggagacattaatctacctctcacaccttgatcatgaagataccgaaaaacagatgttgagtaagctaagcaaacagttgagcggggaggaatgggcatggaacaatctaaacactttatgctgggctattgggtctatttctgggtccatggtagtagaacaggaaaacagatttctcgtgatggttatccgtgatttgttaagtttatgtgaagtcgtcaagggaaaagacaataaagctgttattgcgagcaacatcatgtacgttgttggacaatattcaagattcttaagagcccattggaagtttttgaagacagttgtccataagctgtttgaatttatgcatgagacgcatcctggtgttcaggacatggcttgcgacacattcttaaaaattgttcagaagtgtaagcgaaaatttgttattgttcaggttggagaaagtgagccatttgtgtctgaacttctatcaggccttgctacaatcgtcggagatcttcaacctcatcagattcatacattttatgaatctgttggtagtatgatccaggcagaatcagatcctcagaagaggggggaatacctccagaggttgatggctctcccgaatcagaaatgggcagaaattataggacaagcacgtcaaagtgcagatatcctcaaggaaccagatgtgatacgtactgtgcttaatatcctccagacaaatacgcgcgttgcaacttcactaggaacattcttcctgtctcaaatttcgttgatcttcttggatatgctgaatgtttacagaatgtatagtgaactcgtttcaagcagcattgctaatggtggcccatacgcttcgagaacatctcttgttaaacttttaaggtctgttaagagggaaattcttaagctgatagagacgtttttagataaagctgaaaaccagccacacattggaaaacagtttgttccaccaatgatggatcaagtacttggcgactatgcaagaaatgttcctgatgcaagagaatcagaagtcttgtcactctttgcgacaataatcaacaaatacaaggttgtaatgcgagatgaagttcccctcatatttgaagctgttttccagtgcacattggagatgattactaagaattttgaagattacccagagcaccgtctcaagtttttctcgttacttcgtgctattgctacattttgtttccgtgcgttgatacagttgtcaagtgagcaactgaagctagtgatggattcagttatctgggcatttaggcatactgaaagaaatatcgctgaaactgggctcaatctcttgctcgagatgctgaaaaactttcagaaatctgacttttgtaacaaattctaccaaacatactttctgcaaattgagcaagaagtatttgctgtcttgaccgataccttccacaagcctgggttcaagttgcatgtgttggtgttgcagcacttatttagcctggttgagagcggatcattggcagaaccattgtgggatgctgcaacggtaccgcatccttattcaaataatgtcgcctttgtgcttgagtacaccaccaagcttctaagctcatcattccccaacatgactacaacagaggtgacacagtttgtgaatggactttacgagtcgagaaacgatgttggcagatttaaggataacatacgcgacttccttatacagtccaaggaattttctgctcaggataacaaagatttatatgctgaggaagctgctgcccaaatggagagagagagacaaagaatgctttcgattcctggacttatagctcccagcgaaattcaagacgacatggccgattcttaa

SEQ ID NO: 77730 - protein, 1076 aa, Arabidopsis thaliana
  peptide (1)..(1076): Ceres Seq. ID no. 12577348
  misc_feature (37)..(103): Pfam Name: Importin-beta N-terminal domain Pfam Description: Importin-beta N-terminal domain
  misc_feature (1)..(1075): Homolog of NCBI NO: 5690335 NR Description: CRM1/XPO1 protein [Xenopus laevis]
  misc_feature (1)..(1075): Homolog of NCBI NO: 29789299 NR Description: exportin 1 (CRM1, yeast, homolog) [Rattus >gi|28971720|dbj|BAC65240.1| nuclear export factor CRM1 [Rattus
  misc_feature (1)..(1075): Homolog of NCBI NO: 4507943 NR Description: exportin 1; CRM1, yeast, homolog; Exportin-1 for chromosome region maintenance); exportin 1 (CRM1, yeast, [Homo sapiens] >gi|2626840|dbj|BAA23415.1| CRM1 protein [Homo
  misc_feature (4)..(1069): Homolog of NCBI NO: 11493965 NR Description: crm1 protein [Schizosaccharomyces pombe]
  misc_feature (4)..(1069): Homolog of NCBI NO: 19856107 NR Description: Exportin 1 (Chromosome region maintenance protein
  misc_feature (4)..(1069): Homolog of NCBI NO: 11281651 NR Description: CRM1/exportin 1 - fission yeast
  misc_feature (1)..(955): Homolog of NCBI NO: 19074824 NR Description: EXPORTIN 1 [Encephalitozoon cuniculi]
  misc_feature (753)..(1064): Homolog of NCBI NO: 23487052 NR Description: Plasmodium vivax PV1H14065_P-related [Plasmodium
  misc_feature (420)..(604): Homolog of NCBI NO: 13812138 NR Description: chromosomal region maintenance protein CRM1 theta] >gi|25396709|pir||F90086 chromosomal region maintenance
  misc_feature (612)..(1055): Homolog of NCBI NO: 19074824 NR Description: EXPORTIN 1 [Encephalitozoon cuniculi]
MAAEKLRDLSQPIDVVLLDATVEAFYSTGSKEERASADNILRDLKANPDTWLQVVHILQNTSSTHTKFFALQVLEGVIKYRWNALPVEQRDGMKNYISDVIVQLSRDEASFRTERLYVNKLNIILVQIVKQEWPAKWKSFIPDLVIAAKTSETICENCMAILKLLSEEVFDFSKGEMTQQKIKELKQSLNSEFQLIHELCLYVLSASQRQELIRATLSALHAYLSWIPLGYIFESPLLEILLKFFPVPAYRNLTLQCLSEVASLNFGDFYDMQYVKMYSIFMNQLQAILPLNLNIPEAYSTGSSEEQAFIQNLALFFTSFFKLHIKILESAPENISLLLAGLGYLISISYVDDTEVFKVCLDYWNSLVLELFGTRHHACHPALTPSLFGLQMAFLPSTVDGVKSEVTERQKLYSDPMSKLRGLMISRTAKPEEVLIVEDENGNIVRETMKDNDVLVQYKIMRETLIYLSHLDHEDTEKQMLSKLSKQLSGEEWAWNNLNTLCWAIGSISGSMVVEQENRFLVMVIRDLLSLCEVVKGKDNKAVIASNIMYVVGQYSRFLRAHWKFLKTVVHKLFEFMHETHPGVQDMACDTFLKIVQKCKRKFVIVQVGESEPFVSELLSGLATIVGDLQPHQIHTFYESVGSMIQAESDPQKRGEYLQRLMALPNQKWAEIIGQARQSADILKEPDVIRTVLNILQTNTRVATSLGTFFLSQISLIFLDMLNVYRMYSELVSSSIANGGPYASRTSLVKLLRSVKREILKLIETFLDKAENQPHIGKQFVPPMMDQVLGDYARNVPDARESEVLSLFATIINKYKVVMRDEVPLIFEAVFQCTLEMITKNFEDYPEHRLKFFSLLRAIATFCFRALIQLSSEQLKLVMDSVIWAFRHTERNIAETGLNLLLEMLKNFQKSDFCNKFYQTYFLQIEQEVFAVLTDTFHKPGFKLHVLVLQHLFSLVESGSLAEPLWDAATVPHPYSNNVAFVLEYTTKLLSSSFPNMTTTEVTQFVNGLYESRNDVGRFKDNIRDFLIQSKEFSAQDNKDLYAEEAAAQMERERQRMLSIPGLIAPSEIQDDMADS

SEQ ID NO: 77731 - protein, 984 aa, Arabidopsis thaliana
  peptide (1)..(984): Ceres Seq. ID no. 12577349
  misc_feature (1)..(983): Homolog of NCBI NO: 5690335 NR Description: CRM1/XPO1 protein [Xenopus laevis]
  misc_feature (1)..(983): Homolog of NCBI NO: 29789299 NR Description: exportin 1 (CRM1, yeast, homolog) [Rattus >gi|28971720|dbj|BAC65240.1| nuclear export factor CRM1 [Rattus
  misc_feature (1)..(983): Homolog of NCBI NO: 4507943 NR Description: exportin 1; CRM1, yeast, homolog; Exportin-1 for chromosome region maintenance); exportin 1 (CRM1, yeast, [Homo sapiens] >gi|2626840|dbj|BAA23415.1| CRM1 protein [Homo
  misc_feature (1)..(977): Homolog of NCBI NO: 11493965 NR Description: crm1 protein [Schizosaccharomyces pombe]
  misc_feature (1)..(977): Homolog of NCBI NO: 19856107 NR Description: Exportin 1 (Chromosome region maintenance protein
  misc_feature (1)..(977): Homolog of NCBI NO: 11281651 NR Description: CRM1/exportin 1 - fission yeast
  misc_feature (1)..(863): Homolog of NCBI NO: 19074824 NR Description: EXPORTIN 1 [Encephalitozoon cuniculi]
  misc_feature (661)..(972): Homolog of NCBI NO: 23487052 NR Description: Plasmodium vivax PV1H14065_P-related [Plasmodium
  misc_feature (328)..(512): Homolog of NCBI NO: 13812138 NR Description: chromosomal region maintenance protein CRM1 theta] >gi|25396709|pir||F90086 chromosomal region maintenance
  misc_feature (520)..(963): Homolog of NCBI NO: 19074824 NR Description: EXPORTIN 1 [Encephalitozoon cuniculi]
MKNYISDVIVQLSRDEASFRTERLYVNKLNIILVQIVKQEWPAKWKSFIPDLVIAAKTSETICENCMAILKLLSEEVFDFSKGEMTQQKIKELKQSLNSEFQLIHELCLYVLSASQRQELIRATLSALHAYLSWIPLGYIFESPLLEILLKFFPVPAYRNLTLQCLSEVASLNFGDFYDMQYVKMYSIFMNQLQAILPLNLNIPEAYSTGSSEEQAFIQNLALFFTSFFKLHIKILESAPENISLLLAGLGYLISISYVDDTEVFKVCLDYWNSLVLELFGTRHHACHPALTPSLFGLQMAFLPSTVDGVKSEVTERQKLYSDPMSKLRGLMISRTAKPEEVLIVEDENGNIVRETMKDNDVLVQYKIMRETLIYLSHLDHEDTEKQMLSKLSKQLSGEEWAWNNLNTLCWAIGSISGSMVVEQENRFLVMVIRDLLSLCEVVKGKDNKAVIASNIMYVVGQYSRFLRAHWKFLKTVVHKLFEFMHETHPGVQDMACDTFLKIVQKCKRKFVIVQVGESEPFVSELLSGLATIVGDLQPHQIHTFYESVGSMIQAESDPQKRGEYLQRLMALPNQKWAEIIGQARQSADILKEPDVIRTVLNILQTNTRVATSLGTFFLSQISLIFLDMLNVYRMYSELVSSSIANGGPYASRTSLVKLLRSVKREILKLIETFLDKAENQPHIGKQFVPPMMDQVLGDYARNVPDARESEVLSLFATIINKYKVVMRDEVPLIFEAVFQCTLEMITKNFEDYPEHRLKFFSLLRAIATFCFRALIQLSSEQLKLVMDSVIWAFRHTERNIAETGLNLLLEMLKNFQKSDFCNKFYQTYFLQIEQEVFAVLTDTFHKPGFKLHVLVLQHLFSLVESGSLAEPLWDAATVPHPYSNNVAFVLEYTTKLLSSSFPNMTTTEVTQFVNGLYESRNDVGRFKDNIRDFLIQSKEFSAQDNKDLYAEEAAAQMERERQRMLSIPGLIAPSEIQDDMADS

SEQ ID NO: 77732 - protein, 918 aa, Arabidopsis thaliana
  peptide (1)..(918): Ceres Seq. ID no. 12577350
  misc_feature (1)..(917): Homolog of NCBI NO: 5690335 NR Description: CRM1/XPO1 protein [Xenopus laevis]
  misc_feature (1)..(917): Homolog of NCBI NO: 29789299 NR Description: exportin 1 (CRM1, yeast, homolog) [Rattus >gi|28971720|dbj|BAC65240.1| nuclear export factor CRM1 [Rattus
  misc_feature (1)..(917): Homolog of NCBI NO: 4507943 NR Description: exportin 1; CRM1, yeast, homolog; Exportin-1 for chromosome region maintenance); exportin 1 (CRM1, yeast, [Homo sapiens] >gi|2626840|dbj|BAA23415.1| CRM1 protein [Homo
  misc_feature (1)..(911): Homolog of NCBI NO: 11493965 NR Description: crm1 protein [Schizosaccharomyces pombe]
  misc_feature (1)..(911): Homolog of NCBI NO: 19856107 NR Description: Exportin 1 (Chromosome region maintenance protein
  misc_feature (1)..(911): Homolog of NCBI NO: 11281651 NR Description: CRM1/exportin 1 - fission yeast
  misc_feature (1)..(797): Homolog of NCBI NO: 19074824 NR Description: EXPORTIN 1 [Encephalitozoon cuniculi]
  misc_feature (595)..(906): Homolog of NCBI NO: 23487052 NR Description: Plasmodium vivax PV1H14065_P-related [Plasmodium
  misc_feature (262)..(446): Homolog of NCBI NO: 13812138 NR Description: chromosomal region maintenance protein CRM1 theta] >gi|25396709|pir||F90086 chromosomal region maintenance
  misc_feature (454)..(897): Homolog of NCBI NO: 19074824 NR Description: EXPORTIN 1 [Encephalitozoon cuniculi]
MAILKLLSEEVFDFSKGEMTQQKIKELKQSLNSEFQLIHELCLYVLSASQRQELIRATLSALHAYLSWIPLGYIFESPLLEILLKFFPVPAYRNLTLQCLSEVASLNFGDFYDMQYVKMYSIFMNQLQAILPLNLNIPEAYSTGSSEEQAFIQNLALFFTSFFKLHIKILESAPENISLLLAGLGYLISISYVDDTEVFKVCLDYWNSLVLELFGTRHHACHPALTPSLFGLQMAFLPSTVDGVKSEVTERQKLYSDPMSKLRGLMISRTAKPEEVLIVEDENGNIVRETMKDNDVLVQYKIMRETLIYLSHLDHEDTEKQMLSKLSKQLSGEEWAWNNLNTLCWAIGSISGSMVVEQENRFLVMVIRDLLSLCEVVKGKDNKAVIASNIMYVVGQYSRFLRAHWKFLKTVVHKLFEFMHETHPGVQDMACDTFLKIVQKCKRKFVIVQVGESEPFVSELLSGLATIVGDLQPHQIHTFYESVGSMIQAESDPQKRGEYLQRLMALPNQKWAEIIGQARQSADILKEPDVIRTVLNILQTNTRVATSLGTFFLSQISLIFLDMLNVYRMYSELVSSSIANGGPYASRTSLVKLLRSVKREILKLIETFLDKAENQPHIGKQFVPPMMDQVLGDYARNVPDARESEVLSLFATIINKYKVVMRDEVPLIFEAVFQCTLEMITKNFEDYPEHRLKFFSLLRAIATFCFRALIQLSSEQLKLVMDSVIWAFRHTERNIAETGLNLLLEMLKNFQKSDFCNKFYQTYFLQIEQEVFAVLTDTFHKPGFKLHVLVLQHLFSLVESGSLAEPLWDAATVPHPYSNNVAFVLEYTTKLLSSSFPNMTTTEVTQFVNGLYESRNDVGRFKDNIRDFLIQSKEFSAQDNKDLYAEEAAAQMERERQRMLSIPGLIAPSEIQDDMADS

SEQ ID NO: 77733 - DNA, 854 bp, Arabidopsis thaliana
  misc_feature (1)..(854): Ceres Seq. ID no. 12577362
  misc_feature: MA Experiment ID: 108434 Result: Down-regulated in Transcription
  misc_feature: MA Experiment 108434 PARAMETER Experiment Name: At_Root_Tips_cDNA_P Parameter: Tissue Value: Root Tips
  misc_feature: MA Experiment ID: 108435 Result: Down-regulated in Transcription
  misc_feature: MA Experiment 108435 PARAMETER Experiment Name: At_stm_Mutants_cDNA_P Parameter: Plant Line Value: wt Landsburg vs stm
  misc_feature: MA Experiment 108435 PARAMETER Experiment Name: At_stm_Mutants_cDNA_P Parameter: Tissue Value: Shoot Apical Meristem Region
  misc_feature: MA Experiment ID: 108461 Result: Down-regulated in Transcription
  misc_feature: MA Experiment 108461 PARAMETER Experiment Name: At_Germinating_Seeds_cDNA_P Parameter: Age (day) Value: 1 vs. 0
  misc_feature: MA Experiment 108461 PARAMETER Experiment Name: At_Germinating_Seeds_cDNA_P Parameter: Tissue Value: Germinating Seeds
  misc_feature: MA Experiment ID: 108462 Result: Down-regulated in Transcription
  misc_feature: MA Experiment 108462 PARAMETER Experiment Name: At_Germinating_Seeds_cDNA_P Parameter: Age (day) Value: 2 vs. 0
  misc_feature: MA Experiment 108462 PARAMETER Experiment Name: At_Germinating_Seeds_cDNA_P Parameter: Tissue Value: Germinating Seeds
  misc_feature: MA Experiment ID: 108463 Result: Down-regulated in Transcription
  misc_feature: MA Experiment 108463 PARAMETER Experiment Name: At_Germinating_Seeds_cDNA_P Parameter: Age (day) Value: 3 vs. 0
  misc_feature: MA Experiment 108463 PARAMETER Experiment Name: At_Germinating_Seeds_cDNA_P Parameter: Tissue Value: Germinating Seeds
  misc_feature: MA Experiment ID: 108464 Result: Down-regulated in Transcription
  misc_feature: MA Experiment 108464 PARAMETER Experiment Name: At_Germinating_Seeds_cDNA_P Parameter: Age (day) Value: 4 vs. 0
  misc_feature: MA Experiment 108464 PARAMETER Experiment Name: At_Germinating_Seeds_cDNA_P Parameter: Tissue Value: Germinating Seeds
  misc_feature: MA Experiment ID: 108469 Result: Up-regulated in Transcription
  misc_feature: MA Experiment ID: 108474 Result: Down-regulated in Transcription
  misc_feature: MA Experiment 108474 PARAMETER Experiment Name: At_Drought_Flowers_cDNA_P Parameter: Timepoint (hr) Value: null
  misc_feature: MA Experiment 108474 PARAMETER Experiment Name: At_Drought_Flowers_cDNA_P Parameter: Treatment Value: Drought vs. No Drought
  misc_feature: MA Experiment ID: 108488 Result: Up-regulated in Transcription
  misc_feature: MA Experiment ID: 108501 Result: Up-regulated in Transcription
  misc_feature: MA Experiment 108501 PARAMETER Experiment Name: At_ap2_floral_buds_cDNA_P Parameter: Plant Line Value: ap2 (Ler.)
  misc_feature: MA Experiment 108501 PARAMETER Experiment Name: At_ap2_floral_buds_cDNA_P Parameter: Tissue Value: Closed Flower
  misc_feature: MA Experiment ID: 108569 Result: Up-regulated in Transcription
  misc_feature: MA Experiment 108569 PARAMETER Experiment Name: At_0.001%_MeJA__cDNA_P Parameter: Timepoint (hr) Value: 6
  misc_feature: MA Experiment 108569 PARAMETER Experiment Name: At_0.001%_MeJA__cDNA_P Parameter: Tissue Value: Aerial
  misc_feature: MA Experiment 108569 PARAMETER Experiment Name: At_0.001%_MeJA__cDNA_P Parameter: Treatment Value: 0.001% MeJA vs. No Treatment
  misc_feature: MA Experiment ID: 108573 Result: Up-regulated in Transcription
  misc_feature: MA Experiment 108573 PARAMETER Experiment Name: At_Drought_cDNA_P Parameter: Timepoint (hr) Value: 6
  misc_feature: MA Experiment 108573 PARAMETER Experiment Name: At_Drought_cDNA_P Parameter: Tissue Value: Aerial
  misc_feature: MA Experiment 108573 PARAMETER Experiment Name: At_Drought_cDNA_P Parameter: Treatment Value: Drought vs. No Drought
  misc_feature: MA Experiment ID: 108585 Result: Up-regulated in Transcription
  misc_feature: MA Experiment 108585 PARAMETER Experiment Name: At_5mM_NaNP_cDNA_P Parameter: Timepoint (hr) Value: 6
  misc_feature: MA Experiment 108585 PARAMETER Experiment Name: At_5mM_NaNP_cDNA_P Parameter: Tissue Value: Aerial
  misc_feature: MA Experiment 108585 PARAMETER Experiment Name: At_5mM_NaNP_cDNA_P Parameter: Treatment Value: null
  misc_feature: MA Experiment ID: 108595 Result: Down-regulated in Transcription
  misc_feature: MA Experiment 108595 PARAMETER Experiment Name: At_Ler-pi_Ovule_cDNA_P Parameter: Plant Line Value: null
  misc_feature: MA Experiment ID: 108605 Result: Up-regulated in Transcription
  misc_feature: MA Experiment 108605 PARAMETER Experiment Name: At_100uM_ABA_cDNA_P Parameter: Timepoint (hr) Value: 6
  misc_feature: MA Experiment 108605 PARAMETER Experiment Name: At_100uM_ABA_cDNA_P Parameter: Tissue Value: Aerial
  misc_feature: MA Experiment 108605 PARAMETER Experiment Name: At_100uM_ABA_cDNA_P Parameter: Treatment Value: 100uM ABA vs. No Treatment
  misc_feature: MA Experiment ID: 108668 Result: Up-regulated in Transcription
  misc_feature: MA Experiment 108668 PARAMETER Experiment Name: At_2mM_SA_cDNA_P Parameter: Plant Line Value: WS
  misc_feature: MA Experiment 108668 PARAMETER Experiment Name: At_2mM_SA_cDNA_P Parameter: Timepoint (hr) Value: 6
  misc_feature: MA Experiment 108668 PARAMETER Experiment Name: At_2mM_SA_cDNA_P Parameter: Treatment Value: 2mM SA vs. No Treatment
  misc_feature: MA Experiment ID: 20000030 Result: Up-regulated in Transcription
  misc_feature: MA Experiment 20000030 PARAMETER Experiment Name: At_CS6630_Roots_cDNA_P Parameter: Plant Line Value: CS6630 vs. WS
  misc_feature: MA Experiment 20000030 PARAMETER Experiment Name: At_CS6630_Roots_cDNA_P Parameter: Tissue Value: Roots
  misc_feature: MA Experiment ID: 20000069 Result: Up-regulated in Transcription
  misc_feature: MA Experiment 20000069 PARAMETER Experiment Name: At_100uM_ABA_Mutants_cDNA_P Parameter: Plant Line Value: CS23
  misc_feature: MA Experiment 20000069 PARAMETER Experiment Name: At_100uM_ABA_Mutants_cDNA_P Parameter: Timepoint (hr) Value: 6
  misc_feature: MA Experiment 20000069 PARAMETER Experiment Name: At_100uM_ABA_Mutants_cDNA_P Parameter: Tissue Value: Aerial
  misc_feature: MA Experiment 20000069 PARAMETER Experiment Name: At_100uM_ABA_Mutants_cDNA_P Parameter: Treatment Value: 100uM ABA vs. No Treatment
  misc_feature: MA Experiment ID: 20000070 Result: Up-regulated in Transcription
  misc_feature: MA Experiment 20000070 PARAMETER Experiment Name: At_100uM_ABA_Mutants_cDNA_P Parameter: Plant Line Value: CS24
  misc_feature: MA Experiment 20000070 PARAMETER Experiment Name: At_100uM_ABA_Mutants_cDNA_P Parameter: Timepoint (hr) Value: 6
  misc_feature: MA Experiment 20000070 PARAMETER Experiment Name: At_100uM_ABA_Mutants_cDNA_P Parameter: Tissue Value: Aerial
  misc_feature: MA Experiment 20000070 PARAMETER Experiment Name: At_100uM_ABA_Mutants_cDNA_P Parameter: Treatment Value: 100uM ABA vs. No Treatment
  misc_feature: MA Experiment ID: 20000071 Result: Up-regulated in Transcription
  misc_feature: MA Experiment 20000071 PARAMETER Experiment Name: At_100uM_ABA_Mutants_cDNA_P Parameter: Plant Line Value: CS8104
  misc_feature: MA Experiment 20000071 PARAMETER Experiment Name: At_100uM_ABA_Mutants_cDNA_P Parameter: Timepoint (hr) Value: 6
  misc_feature: MA Experiment 20000071 PARAMETER Experiment Name: At_100uM_ABA_Mutants_cDNA_P Parameter: Tissue Value: Aerial
  misc_feature: MA Experiment 20000071 PARAMETER Experiment Name: At_100uM_ABA_Mutants_cDNA_P Parameter: Treatment Value: 100uM ABA vs. No Treatment
  misc_feature: MA Experiment ID: 20000072 Result: Up-regulated in Transcription
  misc_feature: MA Experiment 20000072 PARAMETER Experiment Name: At_100uM_ABA_Mutants_cDNA_P Parameter: Plant Line Value: CS8105
  misc_feature: MA Experiment 20000072 PARAMETER Experiment Name: At_100uM_ABA_Mutants_cDNA_P Parameter: Timepoint (hr) Value: 6
  misc_feature: MA Experiment 20000072 PARAMETER Experiment Name: At_100uM_ABA_Mutants_cDNA_P Parameter: Tissue Value: Aerial
  misc_feature: MA Experiment 20000072 PARAMETER Experiment Name: At_100uM_ABA_Mutants_cDNA_P Parameter: Treatment Value: 100uM ABA vs. No Treatment
  misc_feature: MA Experiment ID: 20000087 Result: Up-regulated in Transcription
  misc_feature: MA Experiment 20000087 PARAMETER Experiment Name: At_100uM_ABA_Mutants_cDNA_P Parameter: Plant Line Value: WS
  misc_feature: MA Experiment 20000087 PARAMETER Experiment Name: At_100uM_ABA_Mutants_cDNA_P Parameter: Timepoint (hr) Value: 6
  misc_feature: MA Experiment 20000087 PARAMETER Experiment Name: At_100uM_ABA_Mutants_cDNA_P Parameter: Tissue Value: Aerial
  misc_feature: MA Experiment 20000087 PARAMETER Experiment Name: At_100uM_ABA_Mutants_cDNA_P Parameter: Treatment Value: 100uM ABA vs. No Treatment
  misc_feature: MA Experiment ID: 20000090 Result: Up-regulated in Transcription
  misc_feature: MA Experiment ID: 20000111 Result: Down-regulated in Transcription
  misc_feature: MA Experiment 20000111 PARAMETER Experiment Name: At_42deg_Heat_cDNA_P Parameter: Temperature (deg C) Value: 42 vs. 22
  misc_feature: MA Experiment 20000111 PARAMETER Experiment Name: At_42deg_Heat_cDNA_P Parameter: Timepoint (hr) Value: 6
  misc_feature: MA Experiment 20000111 PARAMETER Experiment Name: At_42deg_Heat_cDNA_P Parameter: Tissue Value: Aerial
  misc_feature: MA Experiment ID: 20000113 Result: Down-regulated in Transcription
  misc_feature: MA Experiment 20000113 PARAMETER Experiment Name: At_42deg_Heat_cDNA_P Parameter: Temperature (deg C) Value: 42 vs. 22
  misc_feature: MA Experiment 20000113 PARAMETER Experiment Name: At_42deg_Heat_cDNA_P Parameter: Timepoint (hr) Value: 8
  misc_feature: MA Experiment 20000113 PARAMETER Experiment Name: At_42deg_Heat_cDNA_P Parameter: Tissue Value: Aerial
  misc_feature: MA Experiment ID: 20000117 Result: Up-regulated in Transcription
  misc_feature: MA Experiment 20000117 PARAMETER Experiment Name: At_100uM_ABA_Mutants_cDNA_P Parameter: Plant Line Value: Columbia
  misc_feature: MA Experiment 20000117 PARAMETER Experiment Name: At_100uM_ABA_Mutants_cDNA_P Parameter: Timepoint (hr) Value: 6
  misc_feature: MA Experiment 20000117 PARAMETER Experiment Name: At_100uM_ABA_Mutants_cDNA_P Parameter: Tissue Value: Aerial
  misc_feature: MA Experiment 20000117 PARAMETER Experiment Name: At_100uM_ABA_Mutants_cDNA_P Parameter: Treatment Value: 100uM ABA vs. No Treatment
  misc_feature: MA Experiment ID: 20000144 Result: Down-regulated in Transcription
  misc_feature: MA Experiment 20000144 PARAMETER Experiment Name: At_42deg_Heat_cDNA_P Parameter: Temperature (deg C) Value: 42 vs. 22
  misc_feature: MA Experiment 20000144 PARAMETER Experiment Name: At_42deg_Heat_cDNA_P Parameter: Timepoint (hr) Value: 1
  misc_feature: MA Experiment 20000144 PARAMETER Experiment Name: At_42deg_Heat_cDNA_P Parameter: Tissue Value: Aerial
  misc_feature: MA Experiment ID: 20000171 Result: Down-regulated in Transcription
  misc_feature: MA Experiment 20000171 PARAMETER Experiment Name: At_42deg_Heat_P Parameter: Age (day) Value: 14
  misc_feature: MA Experiment 20000171 PARAMETER Experiment Name: At_42deg_Heat_P Parameter: Organism Value: A. thaliana
  misc_feature: MA Experiment 20000171 PARAMETER Experiment Name: At_42deg_Heat_P Parameter: Plant Line Value: WS
  misc_feature: MA Experiment 20000171 PARAMETER Experiment Name: At_42deg_Heat_P Parameter: Temperature (deg C) Value: 42 vs. 22
  misc_feature: MA Experiment 20000171 PARAMETER Experiment Name: At_42deg_Heat_P Parameter: Timepoint (hr) Value: 1
  misc_feature: MA Experiment 20000171 PARAMETER Experiment Name: At_42deg_Heat_P Parameter: Tissue Value: Aerial
  misc_feature: MA Experiment ID: 20000173 Result: Down-regulated in Transcription
  misc_feature: MA Experiment 20000173 PARAMETER Experiment Name: At_42deg_Heat_P Parameter: Age (day) Value: 14
  misc_feature: MA Experiment 20000173 PARAMETER Experiment Name: At_42deg_Heat_P Parameter: Organism Value: A. thaliana
  misc_feature: MA Experiment 20000173 PARAMETER Experiment Name: At_42deg_Heat_P Parameter: Plant Line Value: WS
  misc_feature: MA Experiment 20000173 PARAMETER Experiment Name: At_42deg_Heat_P Parameter: Temperature (deg C) Value: 42 vs. 22
  misc_feature: MA Experiment 20000173 PARAMETER Experiment Name: At_42deg_Heat_P Parameter: Timepoint (hr) Value: 6
  misc_feature: MA Experiment 20000173 PARAMETER Experiment Name: At_42deg_Heat_P Parameter: Tissue Value: Aerial
  misc_feature: MA Experiment ID: 20000180 Result: Down-regulated in Transcription
  misc_feature: MA Experiment 20000180 PARAMETER Experiment Name: At_Germinating_Seeds_P Parameter: Age (hr) Value: 24 vs. 0
  misc_feature: MA Experiment 20000180 PARAMETER Experiment Name: At_Germinating_Seeds_P Parameter: Tissue Value: Germinating Seeds
  misc_feature: MA Experiment ID: 20000182 Result: Up-regulated in Transcription
  misc_feature: MA Experiment 20000182 PARAMETER Experiment Name: At_2mM_SA_P Parameter: Age (day) Value: 14
  misc_feature: MA Experiment 20000182 PARAMETER Experiment Name: At_2mM_SA_P Parameter: Organism Value: A. thaliana
  misc_feature: MA Experiment 20000182 PARAMETER Experiment Name: At_2mM_SA_P Parameter: Plant Line Value: WS
  misc_feature: MA Experiment 20000182 PARAMETER Experiment Name: At_2mM_SA_P Parameter: Timepoint (hr) Value: 6
  misc_feature: MA Experiment 20000182 PARAMETER Experiment Name: At_2mM_SA_P Parameter: Tissue Value: Aerial
  misc_feature: MA Experiment 20000182 PARAMETER Experiment Name: At_2mM_SA_P Parameter: Treatment Value: 2mM SA vs. No Treatment
  misc_feature: MA Experiment ID: 20000185 Result: Up-regulated in Transcription
  misc_feature: MA Experiment 20000185 PARAMETER Experiment Name: At_Roots__P Parameter: Age (day) Value: 7 vs. 21
  misc_feature: MA Experiment 20000185 PARAMETER Experiment Name: At_Roots__P Parameter: Organism Value: A. thaliana
  misc_feature: MA Experiment 20000185 PARAMETER Experiment Name: At_Roots__P Parameter: Tissue Value: Roots vs. Whole Plant
  misc_feature: MA Experiment ID: 20000213 Result: Up-regulated in Transcription
  misc_feature: MA Experiment 20000213 PARAMETER Experiment Name: At_4deg_Cold_P Parameter: Timepoint (hr) Value: 2
  misc_feature: MA Experiment ID: 20000227 Result: Down-regulated in Transcription
  misc_feature: MA Experiment 20000227 PARAMETER Experiment Name: At_Root-Tips-vs-Tops_P Parameter: Tissue Value: Root Tips vs. Root Tops
  misc_feature: MA Experiment ID: 20000234 Result: Down-regulated in Transcription
  misc_feature: MA Experiment 20000234 PARAMETER Experiment Name: At_Siliques_P Parameter: Age (day) Value: 21
  misc_feature: MA Experiment 20000234 PARAMETER Experiment Name: At_Siliques_P Parameter: Organism Value: A. thaliana
  misc_feature: MA Experiment 20000234 PARAMETER Experiment Name: At_Siliques_P Parameter: Plant Line Value: WS
  misc_feature: MA Experiment 20000234 PARAMETER Experiment Name: At_Siliques_P Parameter: Tissue Value: Less Than 5mm Siliques vs. Whole Plant
  misc_feature: MA Experiment ID: 20000235 Result: Down-regulated in Transcription
  misc_feature: MA Experiment 20000235 PARAMETER Experiment Name: At_Siliques_P Parameter: Age (day) Value: 21
  misc_feature: MA Experiment 20000235 PARAMETER Experiment Name: At_Siliques_P Parameter: Organism Value: A. thaliana
  misc_feature: MA Experiment 20000235 PARAMETER Experiment Name: At_Siliques_P Parameter: Plant Line Value: WS
  misc_feature: MA Experiment 20000235 PARAMETER Experiment Name: At_Siliques_P Parameter: Tissue Value: 5-10mm Siliques vs. Whole Plant
  misc_feature: MA Experiment ID: 20000269 Result: Up-regulated in Transcription
  misc_feature: MA Experiment 20000269 PARAMETER Experiment Name: At_1mM_KNO3_L-vs-H_Roots_P Parameter: Age (day) Value: 7,10,12
  misc_feature: MA Experiment 20000269 PARAMETER Experiment Name: At_1mM_KNO3_L-vs-H_Roots_P Parameter: Organism Value: A. thaliana
  misc_feature: MA Experiment 20000269 PARAMETER Experiment Name: At_1mM_KNO3_L-vs-H_Roots_P Parameter: Plant Line Value: WS
  misc_feature: MA Experiment 20000269 PARAMETER Experiment Name: At_1mM_KNO3_L-vs-H_Roots_P Parameter: Timepoint (day) Value: 7,10,12
  misc_feature: MA Experiment 20000269 PARAMETER Experiment Name: At_1mM_KNO3_L-vs-H_Roots_P Parameter: Tissue Value: Roots
  misc_feature: MA Experiment 20000269 PARAMETER Experiment Name: At_1mM_KNO3_L-vs-H_Roots_P Parameter: Treatment Value: 1mM KNO3 vs. 50mM KNO3
  misc_feature: MA Experiment ID: 20000286 Result: Down-regulated in Transcription
  misc_feature: MA Experiment 20000286 PARAMETER Experiment Name: At_Open_Flower_P Parameter: Age (day) Value: 21
  misc_feature: MA Experiment 20000286 PARAMETER Experiment Name: At_Open_Flower_P Parameter: Plant Line Value: WS
  misc_feature: MA Experiment 20000286 PARAMETER Experiment Name: At_Open_Flower_P Parameter: Tissue Value: Half Open vs. Whole Plant
  misc_feature: MA Experiment ID: 20000438 Result: Down-regulated in Transcription
  misc_feature: MA Experiment 20000438 PARAMETER Experiment Name: At_Shoots__P Parameter: Age (day) Value: 14
  misc_feature: MA Experiment 20000438 PARAMETER Experiment Name: At_Shoots__P Parameter: Tissue Value: Shoots vs. Whole Plant
  misc_feature: MA Experiment ID: 20000453 Result: Up-regulated in Transcription
  misc_feature: MA Experiment 20000453 PARAMETER Experiment Name: At_100uM_ABA_P Parameter: Age (day) Value: 15
  misc_feature: MA Experiment 20000453 PARAMETER Experiment Name: At_100uM_ABA_P Parameter: Organism Value: A. thaliana
  misc_feature: MA Experiment 20000453 PARAMETER Experiment Name: At_100uM_ABA_P Parameter: Plant Line Value: WS
  misc_feature: MA Experiment 20000453 PARAMETER Experiment Name: At_100uM_ABA_P Parameter: Timepoint (hr) Value: 24
  misc_feature: MA Experiment 20000453 PARAMETER Experiment Name: At_100uM_ABA_P Parameter: Tissue Value: Aerial
  misc_feature: MA Experiment 20000453 PARAMETER Experiment Name: At_100uM_ABA_P Parameter: Treatment Value: 100uM ABA vs. No Treatment
  misc_feature: MA Experiment ID: 20000460 Result: Down-regulated in Transcription
  misc_feature: MA Experiment 20000460 PARAMETER Experiment Name: At_10percent_PEG_P Parameter: Age (day) Value: 12
  misc_feature: MA Experiment 20000460 PARAMETER Experiment Name: At_10percent_PEG_P Parameter: Organism Value: A. thaliana
  misc_feature: MA Experiment 20000460 PARAMETER Experiment Name: At_10percent_PEG_P Parameter: Plant Line Value: WS
  misc_feature: MA Experiment 20000460 PARAMETER Experiment Name: At_10percent_PEG_P Parameter: Timepoint (day) Value: 12
  misc_feature: MA Experiment 20000460 PARAMETER Experiment Name: At_10percent_PEG_P Parameter: Tissue Value: Whole Plant
  misc_feature: MA Experiment 20000460 PARAMETER Experiment Name: At_10percent_PEG_P Parameter: Treatment Value: 10percent PEG vs. No Treatment
  misc_feature: MA Experiment ID: 20000527 Result: Down-regulated in Transcription
  misc_feature: MA Experiment 20000527 PARAMETER Experiment Name: At_10percent_PEG_P Parameter: Age (day) Value: 20
  misc_feature: MA Experiment 20000527 PARAMETER Experiment Name: At_10percent_PEG_P Parameter: Organism Value: A. thaliana
  misc_feature: MA Experiment 20000527 PARAMETER Experiment Name: At_10percent_PEG_P Parameter: Plant Line Value: WS
  misc_feature: MA Experiment 20000527 PARAMETER Experiment Name: At_10percent_PEG_P Parameter: Timepoint (day) Value: 20
  misc_feature: MA Experiment 20000527 PARAMETER Experiment Name: At_10percent_PEG_P Parameter: Tissue Value: Whole Plant
  misc_feature: MA Experiment 20000527 PARAMETER Experiment Name: At_10percent_PEG_P Parameter: Treatment Value: 10percent PEG vs. No Treatment
  misc_feature: MA Experiment ID: 20000794 Result: Down-regulated in Transcription
  misc_feature: MA Experiment 20000794 PARAMETER Experiment Name: At_Petals_P Parameter: Age (day) Value: 23-25 days
  misc_feature: MA Experiment 20000794 PARAMETER Experiment Name: At_Petals_P Parameter: Plant Line Value: WS
  misc_feature: MA Experiment 20000794 PARAMETER Experiment Name: At_Petals_P Parameter: Tissue Value: Petals vs. Whole plant
  misc_feature: MA Experiment ID: 20001557 Result: Up-regulated in Transcription
  misc_feature: MA Experiment 20001557 PARAMETER Experiment Name: At_Drought_Soil_Dry_P Parameter: Age (day) Value: 27
  misc_feature: MA Experiment 20001557 PARAMETER Experiment Name: At_Drought_Soil_Dry_P Parameter: Organism Value: A. thaliana
  misc_feature: MA Experiment 20001557 PARAMETER Experiment Name: At_Drought_Soil_Dry_P Parameter: Plant Line Value: WS
  misc_feature: MA Experiment 20001557 PARAMETER Experiment Name: At_Drought_Soil_Dry_P Parameter: Post Timepoint (hr) Value: 3
  misc_feature: MA Experiment 20001557 PARAMETER Experiment Name: At_Drought_Soil_Dry_P Parameter: Post-Treatment Value: Re-Water vs. No Drought
  misc_feature: MA Experiment 20001557 PARAMETER Experiment Name: At_Drought_Soil_Dry_P Parameter: Timepoint (day) Value: 13
  misc_feature: MA Experiment 20001557 PARAMETER Experiment Name: At_Drought_Soil_Dry_P Parameter: Treatment Value: Drought vs. No Drought
  misc_feature: MA Experiment ID: 20001757 Result: Up-regulated in Transcription
  misc_feature: MA Experiment 20001757 PARAMETER Experiment Name: At_50mM_NH4NO3_L-to-H_P Parameter: Timepoint (hr) Value: 6
  misc_feature: MA Experiment 20001757 PARAMETER Experiment Name: At_50mM_NH4NO3_L-to-H_P Parameter: Tissue Value: Leaf
  misc_feature: MA Experiment 20001757 PARAMETER Experiment Name: At_50mM_NH4NO3_L-to-H_P Parameter: Treatment Value: 50mM NH4NO3 vs 100mM Mannitol
  misc_feature: MA Experiment ID: 20001905 Result: Up-regulated in Transcription
  misc_feature: MA Experiment 20001905 PARAMETER Experiment Name: At_Drought_Reproduction_P Parameter: Age (day) Value: 40
  misc_feature: MA Experiment 20001905 PARAMETER Experiment Name: At_Drought_Reproduction_P Parameter: Organism Value: A. thaliana
  misc_feature: MA Experiment 20001905 PARAMETER Experiment Name: At_Drought_Reproduction_P Parameter: Plant Line Value: WS
  misc_feature: MA Experiment 20001905 PARAMETER Experiment Name: At_Drought_Reproduction_P Parameter: Timepoint (day) Value: 10
  misc_feature: MA Experiment 20001905 PARAMETER Experiment Name: At_Drought_Reproduction_P Parameter: Tissue Value: Rosettes
  misc_feature: MA Experiment 20001905 PARAMETER Experiment Name: At_Drought_Reproduction_P Parameter: Treatment Value: Drought vs. No Drought
gatacaattacaatatgtagagtatcttataggtgacgtaaccatgaaatatagaattctttggaatctgaaactgaattattcagttgataaatgataaaacaaatactcatatctcatcctttggcatggcgatccagaagatcctctttgcttcacttctcatatgctcactgatccaatccatccacggggcggaaaaagtaagactcttcaaagagctggacaaaggtgcacttgatgtcaccactaaacccagccgagaaggaccaggtgttgttttggatgccggcaaggatacgttgaacattacatggacgctaagctcgattgggtctaaaagagaggctgaatttaagatcatcaaagttaagctatgctacgctccacctagccaagttgaccgaccatggcgcaaaacccatgacgagctcttcaaagacaagacctgcccacacaagatcatagccaagccttatgacaaaacacttcaatcaactacttggactcttgagcgtgacatccccaccggaacctacttcgttcgtgcctacgcggttgatgccattggccatgaagttgcctatggacagagcaccgacgatgccaagaaaaccaatctcttcagcgttcaggctatcagtggccgccacgcgtccctagatattgcctccatctgtttcagtgtcttctccgtcgtggctcttgtcgtcttctttgtcaatgagaagaggaaggccaagatagagcaaagcaaatgagtcgtttactttgcgtatttgtgacgttgaacccaaaaaaagttgactttgaactttcttgtttaccaattccttttgtcttgttgcacactt

SEQ ID NO: 77734 - protein, 210 aa, Arabidopsis thaliana
  peptide (1)..(210): Ceres Seq. ID no. 12577363
  misc_feature (1)..(210): Homolog of NCBI NO: 15240632 NR Description: putative protein; protein id: At5g50200.1, by cDNA: 158397. [Arabidopsis thaliana] gene_id:K6A12.6~pir||T05562~similar to unknown protein
  misc_feature (1)..(210): Homolog of NCBI NO: 13624657 NR Description: putative component of high affinity nitrate
  misc_feature (1)..(210): Homolog of NCBI NO: 21553714 NR Description: putative component of high affinity nitrate
  misc_feature (1)..(208): Homolog of NCBI NO: 15233944 NR Description: hypothetical protein; protein id: At4g24720.1
  misc_feature (6)..(205): Homolog of NCBI NO: 20149062 NR Description: unknown [Capsicum annuum]
  misc_feature (1)..(203): Homolog of NCBI NO: 32488147 NR Description: OSJNBa0044K18.32 [Oryza sativa (japonica
MAIQKILFASLLICSLIQSIHGAEKVRLFKELDKGALDVTTKPSREGPGVVLDAGKDTLNITWTLSSIGSKREAEFKIIKVKLCYAPPSQVDRPWRKTHDELFKDKTCPHKIIAKPYDKTLQSTTWTLERDIPTGTYFVRAYAVDAIGHEVAYGQSTDDAKKTNLFSVQAISGRHASLDIASICFSVFSVVALVVFFVNEKRKAKIEQSK

SEQ ID NO: 77735 - DNA, 1312 bp, Arabidopsis thaliana
  misc_feature (1)..(1312): Ceres Seq. ID no. 12577381
  misc_feature: MA Experiment ID: 20000314 Result: Up-regulated in Transcription
  misc_feature: MA Experiment 20000314 PARAMETER Experiment Name: At_14day_Shoots-Roots_Sub_P Parameter: Age (day) Value: 14
  misc_feature: MA Experiment 20000314 PARAMETER Experiment Name: At_14day_Shoots-Roots_Sub_P Parameter: Organism Value: A. thaliana
  misc_feature: MA Experiment 20000314 PARAMETER Experiment Name: At_14day_Shoots-Roots_Sub_P Parameter: Plant Line Value: WS
  misc_feature: MA Experiment 20000314 PARAMETER Experiment Name: At_14day_Shoots-Roots_Sub_P Parameter: Tissue Value: Roots vs. Whole Plant
aaaatgggttacataggagctcatggtgtagctgctcttaagaaacacaaatacagtggtgttgatcactcttatcttgccaaatatgttctccaacctttttggaaccgttttgtcaaaatcttccctctatggatgccccccaacatgataacacttatggggttcatgtttcttctcacatctgctctcttaggctatatatactcacctaagttggattctccacctcctcgatgggtccactttgcacacggcttacttctgtttttatatcagacatttgatgcggttgatgggaagcaagcacgaagaacaaattcatctagcccactaggagagctttttgaccatggttgcgatgcacttggctgtgcgttagaaacaatggcatatgggagtactgctatgtgtggaagagatactttctggttttgggttatttctgctgttccattttttggagcaacatgggaacactattttaccaatacgcttactcttccggtagtcaatggtcctacagaaggtcttgcacttatatactgtggccatttcttcacagccattgttggtgcggagtggtgggctcagccgtttgggaagtcgattcctttgtttagttgggttccgtttttgaacgagatgcaaatgtccagaataatactattctccatgattttctttgctgttataccaacccttgcaatcaacacgtctaatgtttacaaagttgtacattcaagaaatggaagcatgcttctagcattagctatgctatatcccttagtcacgttaattgcaggagttctgatttgggattacttgtctccaattgatctcataagaaactaccctcacttagttgtgttgggaactggtcttgcatttggattccttgtgggaagaatgattctagctcacttatgtgacgaaccaaaaggattgaaaacaaacatgtgtatgtcactgctttaccttccatttgcactagcaaatgctctaaccgctagactcaacgacggggttcctcttgtggatgagttttgggttcttcttggatattgtatattcacattgtcactatatgcgcattttgcaacttcagtcattcatgagatcacaactgcacttggaatctactgcttcaggattactcggaaagaagcttgaatttttgttttagtgttttttttcttgttcggttgaaatagggtaattcatgtagaacctttttgtgtaacgtttctaagaaaaaaaaatatgggattgttctagatttttttttttaatttaaacctcgttattgatc

SEQ ID NO: 77736 - protein, 390 aa, Arabidopsis thaliana
  peptide (1)..(390): Ceres Seq. ID no. 12577382
  misc_feature (87)..(232): Pfam Name: CDP-alcohol phosphatidyltransferase Pfam Description: CDP-alcohol phosphatidyltransferase
  misc_feature (2)..(390): Homolog of NCBI NO: 15229490 NR Description: hypothetical protein; protein id: At3g25585.1, by cDNA: gi_13430477, supported by cDNA: gi_15810001, supported cDNA: gi_3661594, supported by cDNA: gi_13430477, supported by
  misc_feature (2)..(390): Homolog of NCBI NO: 7488522 NR Description: ethanolaminephosphotransferase homolog - turnip
  misc_feature (2)..(390): Homolog of NCBI NO: 15222885 NR Description: aminoalcoholphosphotransferase; protein id: supported by cDNA: gi_19347829, supported by cDNA: gi_21280904, by cDNA: gi_3661592 [Arabidopsis thaliana]
  misc_feature (2)..(388): Homolog of NCBI NO: 30313359 NR Description: aminoalcoholphosphotransferase [Brassica rapa
  misc_feature (2)..(390): Homolog of NCBI NO: 5917787 NR Description: aminoalcoholphosphotransferase [Brassica rapa]
  misc_feature (2)..(390): Homolog of NCBI NO: 3927806 NR Description: aminoalcoholphosphotransferase [Pimpinella
  misc_feature (2)..(390): Homolog of NCBI NO: 7488701 NR Description: probable ethanolaminephosphotransferase (EC - soybean >gi|530088|gb|AAA67719.1|
  misc_feature (2)..(329): Homolog of NCBI NO: 18390098 NR Description: aminoalcoholphosphotransferase [Sorghum bicolor]
  misc_feature (2)..(390): Homolog of NCBI NO: 27762264 NR Description: aminoalcoholphosphotransferase [Brassica napus]
  misc_feature (13)..(388): Homolog of NCBI NO: 2425056 NR Description: LipB [Dictyostelium discoideum]
KMGYIGAHGVAALKKHKYSGVDHSYLAKYVLQPFWNRFVKIFPLWMPPNMITLMGFMFLLTSALLGYIYSPKLDSPPPRWVHFAHGLLLFLYQTFDAVDGKQARRTNSSSPLGELFDHGCDALGCALETMAYGSTAMCGRDTFWFWVISAVPFFGATWEHYFTNTLTLPVVNGPTEGLALIYCGHFFTAIVGAEWWAQPFGKSIPLFSWVPFLNEMQMSRIILFSMIFFAVIPTLAINTSNVYKVVHSRNGSMLLALAMLYPLVTLIAGVLIWDYLSPIDLIRNYPHLVVLGTGLAFGFLVGRMILAHLCDEPKGLKTNMCMSLLYLPFALANALTARLNDGVPLVDEFWVLLGYCIFTLSLYAHFATSVIHEITTALGIYCFRITRKEA

SEQ ID NO: 77737 - protein, 389 aa, Arabidopsis thaliana; identical to SEQ ID NO: 44528
  peptide (1)..(389): Ceres Seq. ID no. 12577383
  misc_feature (86)..(231): Pfam Name: CDP-alcohol phosphatidyltransferase Pfam Description: CDP-alcohol phosphatidyltransferase
  misc_feature (1)..(389): Homolog of NCBI NO: 15229490 NR Description: hypothetical protein; protein id: At3g25585.1, by cDNA: gi_13430477, supported by cDNA: gi_15810001, supported cDNA: gi_3661594, supported by cDNA: gi_13430477, supported by
  misc_feature (1)..(389): Homolog of NCBI NO: 7488522 NR Description: ethanolaminephosphotransferase homolog - turnip
  misc_feature (1)..(389): Homolog of NCBI NO: 15222885 NR Description: aminoalcoholphosphotransferase; protein id: supported by cDNA: gi_19347829, supported by cDNA: gi_21280904, by cDNA: gi_3661592 [Arabidopsis thaliana]
  misc_feature (1)..(387): Homolog of NCBI NO: 30313359 NR Description: aminoalcoholphosphotransferase [Brassica rapa
  misc_feature (1)..(389): Homolog of NCBI NO: 5917787 NR Description: aminoalcoholphosphotransferase [Brassica rapa]
  misc_feature (1)..(389): Homolog of NCBI NO: 3927806 NR Description: aminoalcoholphosphotransferase [Pimpinella
  misc_feature (1)..(389): Homolog of NCBI NO: 7488701 NR Description: probable ethanolaminephosphotransferase (EC - soybean >gi|530088|gb|AAA67719.1|
  misc_feature (1)..(328): Homolog of NCBI NO: 18390098 NR Description: aminoalcoholphosphotransferase [Sorghum bicolor]
  misc_feature (1)..(389): Homolog of NCBI NO: 27762264 NR Description: aminoalcoholphosphotransferase [Brassica napus]
  misc_feature (12)..(387): Homolog of NCBI NO: 2425056 NR Description: LipB [Dictyostelium discoideum]

SEQ ID NO: 77738 - protein, 345 aa, Arabidopsis thaliana; identical to SEQ ID NO: 44529
  peptide (1)..(345): Ceres Seq. ID no. 12577384
  misc_feature (42)..(187): Pfam Name: CDP-alcohol phosphatidyltransferase Pfam Description: CDP-alcohol phosphatidyltransferase
  misc_feature (1)..(345): Homolog of NCBI NO: 15229490 NR Description: hypothetical protein; protein id: At3g25585.1, by cDNA: gi_13430477, supported by cDNA: gi_15810001, supported cDNA: gi_3661594, supported by cDNA: gi_13430477, supported by
  misc_feature (1)..(345): Homolog of NCBI NO: 7488522 NR Description: ethanolaminephosphotransferase homolog - turnip
  misc_feature (1)..(345): Homolog of NCBI NO: 15222885 NR Description: aminoalcoholphosphotransferase; protein id: supported by cDNA: gi_19347829, supported by cDNA: gi_21280904, by cDNA: gi_3661592 [Arabidopsis thaliana]
  misc_feature (1)..(343): Homolog of NCBI NO: 30313359 NR Description: aminoalcoholphosphotransferase [Brassica rapa
  misc_feature (1)..(345): Homolog of NCBI NO: 5917787 NR Description: aminoalcoholphosphotransferase [Brassica rapa]
  misc_feature (1)..(345): Homolog of NCBI NO: 3927806 NR Description: aminoalcoholphosphotransferase [Pimpinella
  misc_feature (1)..(345): Homolog of NCBI NO: 7488701 NR Description: probable ethanolaminephosphotransferase (EC - soybean >gi|530088|gb|AAA67719.1|
  misc_feature (1)..(284): Homolog of NCBI NO: 18390098 NR Description: aminoalcoholphosphotransferase [Sorghum bicolor]
  misc_feature (1)..(345): Homolog of NCBI NO: 27762264 NR Description: aminoalcoholphosphotransferase [Brassica napus]
  misc_feature (1)..(343): Homolog of NCBI NO: 2425056 NR Description: LipB [Dictyostelium discoideum]

SEQ ID NO: 77739 - DNA, 1374 bp, Arabidopsis thaliana
  misc_feature (1)..(1374): Ceres Seq. ID no. 12577389
  misc_feature: MA Experiment ID: 20000185 Result: Down-regulated in Transcription
  misc_feature: MA Experiment 20000185 PARAMETER Experiment Name: At_Roots__P Parameter: Age (day) Value: 7 vs. 21
  misc_feature: MA Experiment 20000185 PARAMETER Experiment Name: At_Roots__P Parameter: Organism Value: A. thaliana
  misc_feature: MA Experiment 20000185 PARAMETER Experiment Name: At_Roots__P Parameter: Tissue Value: Roots vs. Whole Plant
  misc_feature: MA Experiment ID: 20000234 Result: Down-regulated in Transcription
  misc_feature: MA Experiment 20000234 PARAMETER Experiment Name: At_Siliques_P Parameter: Age (day) Value: 21
  misc_feature: MA Experiment 20000234 PARAMETER Experiment Name: At_Siliques_P Parameter: Organism Value: A. thaliana
  misc_feature: MA Experiment 20000234 PARAMETER Experiment Name: At_Siliques_P Parameter: Plant Line Value: WS
  misc_feature: MA Experiment 20000234 PARAMETER Experiment Name: At_Siliques_P Parameter: Tissue Value: Less Than 5mm Siliques vs. Whole Plant
  misc_feature: MA Experiment ID: 20000235 Result: Down-regulated in Transcription
  misc_feature: MA Experiment 20000235 PARAMETER Experiment Name: At_Siliques_P Parameter: Age (day) Value: 21
  misc_feature: MA Experiment 20000235 PARAMETER Experiment Name: At_Siliques_P Parameter: Organism Value: A. thaliana
  misc_feature: MA Experiment 20000235 PARAMETER Experiment Name: At_Siliques_P Parameter: Plant Line Value: WS
  misc_feature: MA Experiment 20000235 PARAMETER Experiment Name: At_Siliques_P Parameter: Tissue Value: 5-10mm Siliques vs. Whole Plant
  misc_feature: MA Experiment ID: 20000264 Result: Down-regulated in Transcription
  misc_feature: MA Experiment 20000264 PARAMETER Experiment Name: At_Open_Flower_P Parameter: Age (day) Value: 21
  misc_feature: MA Experiment 20000264 PARAMETER Experiment Name: At_Open_Flower_P Parameter: Plant Line Value: WS
  misc_feature: MA Experiment 20000264 PARAMETER Experiment Name: At_Open_Flower_P Parameter: Tissue Value: Open Flower vs. Whole Plant
  misc_feature: MA Experiment ID: 20000438 Result: Down-regulated in Transcription
  misc_feature: MA Experiment 20000438 PARAMETER Experiment Name: At_Shoots__P Parameter: Age (day) Value: 14
  misc_feature: MA Experiment 20000438 PARAMETER Experiment Name: At_Shoots__P Parameter: Tissue Value: Shoots vs. Whole Plant
  misc_feature: MA Experiment ID: 20000439 Result: Down-regulated in Transcription
  misc_feature: MA Experiment 20000439 PARAMETER Experiment Name: At_Roots__P Parameter: Age (day) Value: 14 vs. 21
  misc_feature: MA Experiment 20000439 PARAMETER Experiment Name: At_Roots__P Parameter: Organism Value: A. thaliana
  misc_feature: MA Experiment 20000439 PARAMETER Experiment Name: At_Roots__P Parameter: Tissue Value: Roots vs. Whole Plant
  misc_feature: MA Experiment ID: 20001906 Result: Up-regulated in Transcription
  misc_feature: MA Experiment 20001906 PARAMETER Experiment Name: At_Drought_Reproduction_P Parameter: Age (day) Value: 35
  misc_feature: MA Experiment 20001906 PARAMETER Experiment Name: At_Drought_Reproduction_P Parameter: Organism Value: A. thaliana
  misc_feature: MA Experiment 20001906 PARAMETER Experiment Name: At_Drought_Reproduction_P Parameter: Plant Line Value: WS
  misc_feature: MA Experiment 20001906 PARAMETER Experiment Name: At_Drought_Reproduction_P Parameter: Timepoint (day) Value: 5
  misc_feature: MA Experiment 20001906 PARAMETER Experiment Name: At_Drought_Reproduction_P Parameter: Tissue Value: Siliques
  misc_feature: MA Experiment 20001906 PARAMETER Experiment Name: At_Drought_Reproduction_P Parameter: Treatment Value: Drought vs. No Drought
  misc_feature: MA Experiment ID: 20001910 Result: Down-regulated in Transcription
  misc_feature: MA Experiment 20001910 PARAMETER Experiment Name: At_Drought_Reproduction_P Parameter: Age (day) Value: 37
  misc_feature: MA Experiment 20001910 PARAMETER Experiment Name: At_Drought_Reproduction_P Parameter: Organism Value: A. thaliana
  misc_feature: MA Experiment 20001910 PARAMETER Experiment Name: At_Drought_Reproduction_P Parameter: Plant Line Value: WS
  misc_feature: MA Experiment 20001910 PARAMETER Experiment Name: At_Drought_Reproduction_P Parameter: Timepoint (day) Value: 7
  misc_feature: MA Experiment 20001910 PARAMETER Experiment Name: At_Drought_Reproduction_P Parameter: Tissue Value: Flowers
  misc_feature: MA Experiment 20001910 PARAMETER Experiment Name: At_Drought_Reproduction_P Parameter: Treatment Value: Drought vs. No Drought
actctttcttccttgtcgtttcaaatggcgcaattgtattcttccgtgaaacccacgccaatgttgaaagatgagctagacattgtgatacctacgattcgaaacctcgacttccttgagatgtggcgacctttctttgagcagtatcatttgatcattgttcaagatggtgatccttcgaaagtcatcaacattccagtagggtttgactacgagctctacaacaggaacgacatcaatcgaatcttgggtcccaaggcctcttgcatttccttcaaggactctgcttgtcgttgcttcggttacatggtctccaaaaagaagtacatctacaccattgatgatgattgctttgttgcaaaggatccaacagggaaagagatcaatgcgcttgagcagcatatcaagaacctcttatctccatcaactccgcatttctttaacacactttatgatccatacagagatggggcagactttgttcgtggataccctttcagtatgcgcgaaggtgccataaccgcggtctctcatggcctctggctcaacattcctgactatgatgctcccactcagcttgtgaaacctcttgagaaaaattccaggtatgttgatgcagtcatgaccattcccaaaggaactctttttcctatgtgtggtatgaaccttgcttttgaccgtgagctgattggtccggctatgtactttgggcttatgggtgatggacagccaattggacgctatgacgacatgtgggctggttggtgtgtcaaggtgatatgtgaccacatgggatggggagtgaagacgggtttgccttacatatggcacagcaaagccagcaacccattcgtgaacctgaaaaaggaatacaacggaatattttggcaggaagaggcgattccgttctttcaatccgtgactcttcctaaagagtgcacttcggtgcagcaatgctacctcgagctggccaagctcgtgagagagaaacttgggaaggttgatccttacttcatcacacttgcaactggaatggtcacctggatcgaagcttgggaggagcttaactccgcggagggaactgaggctgaggcaccaaaaggcaaaaattagtaaagagaaggtcactgaataaggcaaatggtattgtttactaggagaaaagggtttgagtcacatgtgcaaccctctctgtttttcttaatcataatttgatttgcttctgtctttaatttcttgtcatcagtatttgtgttctcagtgcattgtcagtttgtcacaaaaagagaaggtgtaatgtgctctatgcattttgttttctttaaggtttctaaactctttatctatgaaatatctatcattcctattttcctt

SEQ ID NO: 77740 - protein, 370 aa, Arabidopsis thaliana
  peptide (1)..(370): Ceres Seq. ID no. 12577390
  misc_feature (17)..(360): Pfam Name: Reversibly glycosylated polypeptide Pfam Description: Reversibly glycosylated polypeptide
  misc_feature (9)..(370): Homolog of NCBI NO: 30680679 NR Description: reversibly glycosylatable polypeptide -related
  misc_feature (9)..(370): Homolog of NCBI NO: 6403494 NR Description: putative reversibly glycosylatable polypeptide
  misc_feature (14)..(366): Homolog of NCBI NO: 34582499 NR Description: Alpha-1,4-glucan-protein synthase [UDP-forming] 2
  misc_feature (14)..(368): Homolog of NCBI NO: 18077708 NR Description: reversibly glycosylated polypeptide [Gossypium
  misc_feature (14)..(369): Homolog of NCBI NO: 34915190 NR Description: reversibly glycosylated polypeptide [Oryza sativa
  misc_feature (15)..(369): Homolog of NCBI NO: 4158221 NR Description: reversibly glycosylated polypeptide [Oryza sativa
  misc_feature (14)..(369): Homolog of NCBI NO: 4158232 NR Description: reversibly glycosylated polypeptide [Triticum
  misc_feature (103)..(338): Homolog of NCBI NO: 7488888 NR Description: type IIIa membrane protein cp-wap11 - cowpea
  misc_feature (1)..(353): Homolog of NCBI NO: 19387283 NR Description: putative amylogenin [Oryza sativa (japonica
TLSSLSFQMAQLYSSVKPTPMLKDELDIVIPTIRNLDFLEMWRPFFEQYHLIIVQDGDPSKVINIPVGFDYELYNRNDINRILGPKASCISFKDSACRCFGYMVSKKKYIYTIDDDCFVAKDPTGKEINALEQHIKNLLSPSTPHFFNTLYDPYRDGADFVRGYPFSMREGAITAVSHGLWLNIPDYDAPTQLVKPLEKNSRYVDAVMTIPKGTLFPMCGMNLAFDRELIGPAMYFGLMGDGQPIGRYDDMWAGWCVKVICDHMGWGVKTGLPYIWHSKASNPFVNLKKEYNGIFWQEEAIPFFQSVTLPKECTSVQQCYLELAKLVREKLGKVDPYFITLATGMVTWIEAWEELNSAEGTEAEAPKGKN

SEQ ID NO: 77741 - protein, 362 aa, Arabidopsis thaliana
  peptide (1)..(362): Ceres Seq. ID no. 12577391
  misc_feature (9)..(352): Pfam Name: Reversibly glycosylated polypeptide Pfam Description: Reversibly glycosylated polypeptide
  misc_feature (1)..(362): Homolog of NCBI NO: 30680679 NR Description: reversibly glycosylatable polypeptide -related
  misc_feature (1)..(362): Homolog of NCBI NO: 6403494 NR Description: putative reversibly glycosylatable polypeptide
  misc_feature (6)..(358): Homolog of NCBI NO: 34582499 NR Description: Alpha-1,4-glucan-protein synthase [UDP-forming] 2
  misc_feature (6)..(360): Homolog of NCBI NO: 18077708 NR Description: reversibly glycosylated polypeptide [Gossypium
  misc_feature (6)..(361): Homolog of NCBI NO: 34915190 NR Description: reversibly glycosylated polypeptide [Oryza sativa
  misc_feature (7)..(361): Homolog of NCBI NO: 4158221 NR Description: reversibly glycosylated polypeptide [Oryza sativa
  misc_feature (6)..(361): Homolog of NCBI NO: 4158232 NR Description: reversibly glycosylated polypeptide [Triticum
  misc_feature (95)..(330): Homolog of NCBI NO: 7488888 NR Description: type IIIa membrane protein cp-wap11 - cowpea
  misc_feature (1)..(345): Homolog of NCBI NO: 19387283 NR Description: putative amylogenin [Oryza sativa (japonica
MAQLYSSVKPTPMLKDELDIVIPTIRNLDFLEMWRPFFEQYHLIIVQDGDPSKVINIPVGFDYELYNRNDINRILGPKASCISFKDSACRCFGYMVSKKKYIYTIDDDCFVAKDPTGKEINALEQHIKNLLSPSTPHFFNTLYDPYRDGADFVRGYPFSMREGAITAVSHGLWLNIPDYDAPTQLVKPLEKNSRYVDAVMTIPKGTLFPMCGMNLAFDRELIGPAMYFGLMGDGQPIGRYDDMWAGWCVKVICDHMGWGVKTGLPYIWHSKASNPFVNLKKEYNGIFWQEEAIPFFQSVTLPKECTSVQQCYLELAKLVREKLGKVDPYFITLATGMVTWIEAWEELNSAEGTEAEAPKGKN

SEQ ID NO: 77742 - protein, 350 aa, Arabidopsis thaliana
  peptide (1)..(350): Ceres Seq. ID no. 12577392
  misc_feature (1)..(340): Pfam Name: Reversibly glycosylated polypeptide Pfam Description: Reversibly glycosylated polypeptide
  misc_feature (1)..(350): Homolog of NCBI NO: 30680679 NR Description: reversibly glycosylatable polypeptide -related
  misc_feature (1)..(350): Homolog of NCBI NO: 6403494 NR Description: putative reversibly glycosylatable polypeptide
  misc_feature (1)..(346): Homolog of NCBI NO: 34582499 NR Description: Alpha-1,4-glucan-protein synthase [UDP-forming] 2
  misc_feature (1)..(348): Homolog of NCBI NO: 18077708 NR Description: reversibly glycosylated polypeptide [Gossypium
  misc_feature (1)..(349): Homolog of NCBI NO: 34915190 NR Description: reversibly glycosylated polypeptide [Oryza sativa
  misc_feature (1)..(349): Homolog of NCBI NO: 4158221 NR Description: reversibly glycosylated polypeptide [Oryza sativa
  misc_feature (1)..(349): Homolog of NCBI NO: 4158232 NR Description: reversibly glycosylated polypeptide [Triticum
  misc_feature (83)..(318): Homolog of NCBI NO: 7488888 NR Description: type IIIa membrane protein cp-wap11 - cowpea
  misc_feature (1)..(333): Homolog of NCBI NO: 19387283 NR Description: putative amylogenin [Oryza sativa (japonica
MLKDELDIVIPTIRNLDFLEMWRPFFEQYHLIIVQDGDPSKVINIPVGFDYELYNRNDINRILGPKASCISFKDSACRCFGYMVSKKKYIYTIDDDCFVAKDPTGKEINALEQHIKNLLSPSTPHFFNTLYDPYRDGADFVRGYPFSMREGAITAVSHGLWLNIPDYDAPTQLVKPLEKNSRYVDAVMTIPKGTLFPMCGMNLAFDRELIGPAMYFGLMGDGQPIGRYDDMWAGWCVKVICDHMGWGVKTGLPYIWHSKASNPFVNLKKEYNGIFWQEEAIPFFQSVTLPKECTSVQQCYLELAKLVREKLGKVDPYFITLATGMVTWIEAWEELNSAEGTEAEAPKGKN

SEQ ID NO: 77743 - DNA, 2093 bp, Arabidopsis thaliana
  misc_feature (1)..(2093): Ceres Seq. ID no. 12577416
  misc_feature: MA Experiment ID: 20000171 Result: Up-regulated in Transcription
  misc_feature: MA Experiment 20000171 PARAMETER Experiment Name: At_42deg_Heat_P Parameter: Age (day) Value: 14
  misc_feature: MA Experiment 20000171 PARAMETER Experiment Name: At_42deg_Heat_P Parameter: Organism Value: A. thaliana
  misc_feature: MA Experiment 20000171 PARAMETER Experiment Name: At_42deg_Heat_P Parameter: Plant Line Value: WS
  misc_feature: MA Experiment 20000171 PARAMETER Experiment Name: At_42deg_Heat_P Parameter: Temperature (deg C) Value: 42 vs. 22
  misc_feature: MA Experiment 20000171 PARAMETER Experiment Name: At_42deg_Heat_P Parameter: Timepoint (hr) Value: 1
  misc_feature: MA Experiment 20000171 PARAMETER Experiment Name: At_42deg_Heat_P Parameter: Tissue Value: Aerial
aacttcaatggagactggagagagagaagggacgtaattaaacaccaaagcgtttttatatttcggagaatcaactacgtgtcgtttgacatcctaaattggcagatagtagaaaggaaatgttgagactggagagtttgatagtaacagtgtggggaccagcgacgcttctagctcgaaaagctccgttgggtcagatatggatggccgctacattgcacgcgaagatcaaccggaagaaactagataagctcgatatcattcaaatctgcgaagagattttgaatccgtcggttccgatggctcttagactctccgggattcttatgggtggtgttgtgattgtttatgagaggaaagtgaagctcctattcgatgatgttaatcgctttctggttgaaattaatggagcttggcgcacaaaatctgttccggatcccactttactacctaaaggaaaaacccatgccaggaaagaggctgttacattgcctgagaacgaagaagctgattttggagattttgaacagactcgtaatgttcctaaatttggcaattacatggattttcagcagacttttatttccatgcggttagatgaatcccatgttaacaataaccccgagccagaagatcttggacagcagttccatcaagctgatgccgagaatatcacactctttgagtatcatggttcattccagaccaacaatgaaacatatgatcgttttgaaagatttgacatcgaaggagatgatgaaacacagatgaactccaatccaagagaaggcgctgaaatacctacaactctcatcccatcaccacctcgtcatcatgacattcccgaaggagtcaaccccacaagccctcagcgccaggagcaacaggagaatcgtagggacggatttgctgagcagatggaggaacaaaacataccggacaaagaggaacacgatagaccacaaccagcgaaaaagagagcaagaaagacagctacttcagcgatggattatgagcaaactattatcgctggtcatgtttaccagtcatggctccaggatacttctgacattctctgtaggggggaaaagagaaaggttcgaggaactatccggccagacatggaaagtttcaaacgtgcgaatatgccacctacacaactctttgaaaaggacagttcttacccgcctcagctttaccagctttggtcaaagaatactcaagttcttcaaacctcatcatctgaatctcgacatcctgatctccgtgcggaacaatctccagggtttgttcaggagagaatgcataaccaccatcaaacagaccatcatgagcgcagtgacacaagctcccaaaatcttgatagtcccgcagaaatactccggacagttcgtactgggaaaggtgcttcagtagaaagcatgatggctggatctcgagcaagccctgaaactattaaccgccaggctgctgatattaatgtcacgccattctattctggagatgatgtgagatccatgcctagtacaccatccgcacgtggagcagcttcaattaacaacatagagatcagctctaaaagtcgcatgcccaatagaaaaagaccaaattcctcaccaagaagaggactcgaaccagtggcggaagagagaccgtgggagcaccgtgaatatgagtttgagttttcaatgttacctgaaaaacgcttcacagccgataaagaaatactatttgaaactgcatctacacagactcaaaagccagtgtgcaatcaatcagacgagatgataacagatagcatcaaaagtcacctgaagacacactttgaaacacctggagctcctcaagtggaatctcttaacaagctcgctgttggaatggacagaaacgctgcagctaaactcttcttccaatcctgtgtgttagctactcgcggagtcatcaaggtaaaccaagcagagccttatggggacattctcattgcaagaggacccaacatgtaaggtttgatttctaaattataaaagattctggtgaaccgattatccatagttgttttgcttttcatattctagcagagagagttcgtagac

SEQ ID NO: 77744 - protein, 627 aa, Arabidopsis thaliana
  peptide (1)..(627): Ceres Seq. ID no. 12577417
  misc_feature (17)..(627): Homolog of NCBI NO: 34558723 NR Description: Rad21-4 protein [Oryza sativa (japonica
  misc_feature (120)..(391): Homolog of NCBI NO: 5091612 NR Description: 10A19I.14 [Oryza sativa]
  misc_feature (451)..(602): Homolog of NCBI NO: 5091612 NR Description: 10A19I.14 [Oryza sativa]
  misc_feature (29)..(86): Homolog of NCBI NO: 5091612 NR Description: 10A19I.14 [Oryza sativa]
  misc_feature (387)..(627): Homolog of NCBI NO: 22326839 NR Description: putative protein; protein id: At5g16270.1, by cDNA: gi_18157648 [Arabidopsis thaliana]
  misc_feature (17)..(149): Homolog of NCBI NO: 22326839 NR Description: putative protein; protein id: At5g16270.1, by cDNA: gi_18157648 [Arabidopsis thaliana]
  misc_feature (281)..(627): Homolog of NCBI NO: 12006362 NR Description: cohesion family protein SYN3 [Arabidopsis
  misc_feature (281)..(627): Homolog of NCBI NO: 15231707 NR Description: putative protein; protein id: At3g59550.1, by cDNA: gi_12006361, supported by cDNA: gi_18157646 [Arabidopsis
  misc_feature (16)..(147): Homolog of NCBI NO: 12006362 NR Description: cohesion family protein SYN3 [Arabidopsis
  misc_feature (16)..(147): Homolog of NCBI NO: 15231707 NR Description: putative protein; protein id: At3g59550.1, by cDNA: gi_12006361, supported by cDNA: gi_18157646 [Arabidopsis
MLRLESLIVTVWGPATLLARKAPLGQIWMAATLHAKINRKKLDKLDIIQICEEILNPSVPMALRLSGILMGGVVIVYERKVKLLFDDVNRFLVEINGAWRTKSVPDPTLLPKGKTHARKEAVTLPENEEADFGDFEQTRNVPKFGNYMDFQQTFISMRLDESHVNNNPEPEDLGQQFHQADAENITLFEYHGSFQTNNETYDRFERFDIEGDDETQMNSNPREGAEIPTTLIPSPPRHHDIPEGVNPTSPQRQEQQENRRDGFAEQMEEQNIPDKEEHDRPQPAKKRARKTATSAMDYEQTIIAGHVYQSWLQDTSDILCRGEKRKVRGTIRPDMESFKRANMPPTQLFEKDSSYPPQLYQLWSKNTQVLQTSSSESRHPDLRAEQSPGFVQERMHNHHQTDHHERSDTSSQNLDSPAEILRTVRTGKGASVESMMAGSRASPETINRQAADINVTPFYSGDDVRSMPSTPSARGAASINNIEISSKSRMPNRKRPNSSPRRGLEPVAEERPWEHREYEFEFSMLPEKRFTADKEILFETASTQTQKPVCNQSDEMITDSIKSHLKTHFETPGAPQVESLNKLAVGMDRNAAAKLFFQSCVLATRGVIKVNQAEPYGDILIARGPNM

SEQ ID NO: 77745 - protein, 599 aa, Arabidopsis thaliana
  peptide (1)..(599): Ceres Seq. ID no. 12577418
  misc_feature (1)..(599): Homolog of NCBI NO: 34558723 NR Description: Rad21-4 protein [Oryza sativa (japonica
  misc_feature (92)..(363): Homolog of NCBI NO: 5091612 NR Description: 10A19I.14 [Oryza sativa]
  misc_feature (423)..(574): Homolog of NCBI NO: 5091612 NR Description: 10A19I.14 [Oryza sativa]
  misc_feature (1)..(58): Homolog of NCBI NO: 5091612 NR Description: 10A19I.14 [Oryza sativa]
  misc_feature (359)..(599): Homolog of NCBI NO: 22326839 NR Description: putative protein; protein id: At5g16270.1, by cDNA: gi_18157648 [Arabidopsis thaliana]
  misc_feature (1)..(121): Homolog of NCBI NO: 22326839 NR Description: putative protein; protein id: At5g16270.1, by cDNA: gi_18157648 [Arabidopsis thaliana]
  misc_feature (253)..(599): Homolog of NCBI NO: 12006362 NR Description: cohesion family protein SYN3 [Arabidopsis
  misc_feature (253)..(599): Homolog of NCBI NO: 15231707 NR Description: putative protein; protein id: At3g59550.1, by cDNA: gi_12006361, supported by cDNA: gi_18157646 [Arabidopsis
  misc_feature (1)..(119): Homolog of NCBI NO: 12006362 NR Description: cohesion family protein SYN3 [Arabidopsis
  misc_feature (1)..(119): Homolog of NCBI NO: 15231707 NR Description: putative protein; protein id: At3g59550.1, by cDNA: gi_12006361, supported by cDNA: gi_18157646 [Arabidopsis
MAATLHAKINRKKLDKLDIIQICEEILNPSVPMALRLSGILMGGVVIVYERKVKLLFDDVNRFLVEINGAWRTKSVPDPTLLPKGKTHARKEAVTLPENEEADFGDFEQTRNVPKFGNYMDFQQTFISMRLDESHVNNNPEPEDLGQQFHQADAENITLFEYHGSFQTNNETYDRFERFDIEGDDETQMNSNPREGAEIPTTLIPSPPRHHDIPEGVNPTSPQRQEQQENRRDGFAEQMEEQNIPDKEEHDRPQPAKKRARKTATSAMDYEQTIIAGHVYQSWLQDTSDILCRGEKRKVRGTIRPDMESFKRANMPPTQLFEKDSSYPPQLYQLWSKNTQVLQTSSSESRHPDLRAEQSPGFVQERMHNHHQTDHHERSDTSSQNLDSPAEILRTVRTGKGASVESMMAGSRASPETINRQAADINVTPFYSGDDVRSMPSTPSARGAASINNIEISSKSRMPNRKRPNSSPRRGLEPVAEERPWEHREYEFEFSMLPEKRFTADKEILFETASTQTQKPVCNQSDEMITDSIKSHLKTHFETPGAPQVESLNKLAVGMDRNAAAKLFFQSCVLATRGVIKVNQAEPYGDILIARGPNM

SEQ ID NO: 77746 - protein, 567 aa, Arabidopsis thaliana
  peptide (1)..(567): Ceres Seq. ID no. 12577419
  misc_feature (1)..(567): Homolog of NCBI NO: 34558723 NR Description: Rad21-4 protein [Oryza sativa (japonica
  misc_feature (60)..(331): Homolog of NCBI NO: 5091612 NR Description: 10A19I.14 [Oryza sativa]
  misc_feature (391)..(542): Homolog of NCBI NO: 5091612 NR Description: 10A19I.14 [Oryza sativa]
  misc_feature (1)..(26): Homolog of NCBI NO: 5091612 NR Description: 10A19I.14 [Oryza sativa]
  misc_feature (327)..(567): Homolog of NCBI NO: 22326839 NR Description: putative protein; protein id: At5g16270.1, by cDNA: gi_18157648 [Arabidopsis thaliana]
  misc_feature (1)..(89): Homolog of NCBI NO: 22326839 NR Description: putative protein; protein id: At5g16270.1, by cDNA: gi_18157648 [Arabidopsis thaliana]
  misc_feature (221)..(567): Homolog of NCBI NO: 12006362 NR Description: cohesion family protein SYN3 [Arabidopsis
  misc_feature (221)..(567): Homolog of NCBI NO: 15231707 NR Description: putative protein; protein id: At3g59550.1, by cDNA: gi_12006361, supported by cDNA: gi_18157646 [Arabidopsis
  misc_feature (1)..(87): Homolog of NCBI NO: 12006362 NR Description: cohesion family protein SYN3 [Arabidopsis
  misc_feature (1)..(87): Homolog of NCBI NO: 15231707 NR Description: putative protein; protein id: At3g59550.1, by cDNA: gi_12006361, supported by cDNA: gi_18157646 [Arabidopsis
MALRLSGILMGGVVIVYERKVKLLFDDVNRFLVEINGAWRTKSVPDPTLLPKGKTHARKEAVTLPENEEADFGDFEQTRNVPKFGNYMDFQQTFISMRLDESHVNNNPEPEDLGQQFHQADAENITLFEYHGSFQTNNETYDRFERFDIEGDDETQMNSNPREGAEIPTTLIPSPPRHHDIPEGVNPTSPQRQEQQENRRDGFAEQMEEQNIPDKEEHDRPQPAKKRARKTATSAMDYEQTIIAGHVYQSWLQDTSDILCRGEKRKVRGTIRPDMESFKRANMPPTQLFEKDSSYPPQLYQLWSKNTQVLQTSSSESRHPDLRAEQSPGFVQERMHNHHQTDHHERSDTSSQNLDSPAEILRTVRTGKGASVESMMAGSRASPETINRQAADINVTPFYSGDDVRSMPSTPSARGAASINNIEISSKSRMPNRKRPNSSPRRGLEPVAEERPWEHREYEFEFSMLPEKRFTADKEILFETASTQTQKPVCNQSDEMITDSIKSHLKTHFETPGAPQVESLNKLAVGMDRNAAAKLFFQSCVLATRGVIKVNQAEPYGDILIARGPNM

SEQ ID NO: 77747 - DNA, 1071 bp, Arabidopsis thaliana
  misc_feature (1)..(1071): Ceres Seq. ID no. 12577439
  misc_feature: MA Experiment ID: 20001807 Result: Up-regulated in Transcription
  misc_feature: MA Experiment 20001807 PARAMETER Experiment Name: At_50mM_NH4NO3_L-to-H_Sub_P Parameter: Timepoint (hr) Value: 6
  misc_feature: MA Experiment 20001807 PARAMETER Experiment Name: At_50mM_NH4NO3_L-to-H_Sub_P Parameter: Tissue Value: Leaf
  misc_feature: MA Experiment 20001807 PARAMETER Experiment Name: At_50mM_NH4NO3_L-to-H_Sub_P Parameter: Treatment Value: 50mM NH4NO3 vs 100mM Mannitol
acttcatcgaaaatggcggaaagaggaggagaaagcggcgcagagcgtggcggtgaccgtggtgacttcgggcgtggattcggcggtggacgtggaggtggccgtggccgtgatcgtggtccaagaggccgtggaagacgtggaggccgtgcctcggaagaaacgaaatgggttccagtgaccaaactaggtcgtctagtggctgacaataaaataacgaagctagagcagatctatcttcattctctcccagtaaaggagtaccaaatcatagatcatcttgttggtcctacgttgaaagacgaggttatgaagatcatgcctgttcagaaacaaaccagagctggtcaaaggactagattcaaggcctttgttgttgttggtgatggaaatggtcatgttggtttgggtgtcaagtgttctaaggaagttgctactgccattagaggagctattattcttgctaagctatcagtggttccggtgaggagaggttattgggggaataagattgggaagccacacactgtgccttgtaaggttactggtaaatgtggttctgttactgtgagaatggttcctgctccgagaggttctggtattgttgctgctagggttcctaagaaggttcttcagttcgctggtattgatgatgtctttacttcttcaagaggatctaccaaaacccttggaaactttgtcaaggctacattcgattgcttacagaagacatatgggttccttacaccagagttctggaaagagactagattctccagatcgccgtaccaagagcacactgatttcctgtcgactaaggctgtttctgcaaccaaggttatcactgagggtgaagaccaagcttaagaccttcatgagatgagtttggtttataggttttggttatcgcaaatatttatctttccggtcttgtttcttggttgtcttttatcagtttttgatattggagtttcagttacaaggataatcataatttagttatgtttggcttttgttagatatttgcttccatgaaatgacattttgcaataatgcatgtctatttctaag

SEQ ID NO: 77748 - protein, 288 aa, Arabidopsis thaliana
  peptide (1)..(288): Ceres Seq. ID no. 12577440
  misc_feature (181)..(254): Pfam Name: Ribosomal protein S5, C-terminal domain Pfam Description: Ribosomal protein S5, C-terminal domain
  misc_feature (5)..(288): Homolog of NCBI NO: 18406325 NR Description: ribosomal protein S2, putative; protein id: supported by cDNA: gi_18086425 [Arabidopsis thaliana] ribosomal protein S2, putative; protein id: At1g59359.1
  misc_feature (5)..(288): Homolog of NCBI NO: 15217951 NR Description: ribosomal protein S2, putative; protein id: [Arabidopsis thaliana] >gi|11276533|pir||T50673 ribosomal protein
  misc_feature (5)..(288): Homolog of NCBI NO: 21539457 NR Description: ribosomal protein S2, putative [Arabidopsis
  misc_feature (5)..(288): Homolog of NCBI NO: 21618011 NR Description: ribosomal protein S2, putative [Arabidopsis
  misc_feature (7)..(288): Homolog of NCBI NO: 25294520 NR Description: hypothetical protein RF12 [imported] - thaliana (fragment) >gi|6566279|dbj|BAA88264.1| similar to
  misc_feature (5)..(288): Homolog of NCBI NO: 15227443 NR Description: 40S ribosomal protein S2; protein id: supported by cDNA: 17415., supported by cDNA: gi_15081714 thaliana] >gi|3915847|sp|P49688|RS2_ARATH 40S ribosomal protein
  misc_feature (5)..(288): Homolog of NCBI NO: 21553851 NR Description: 40S ribosomal protein S2 [Arabidopsis thaliana]
  misc_feature (11)..(283): Homolog of NCBI NO: 15230312 NR Description: 40S ribosomal protein S2 homolog; protein id: supported by cDNA: 101250. [Arabidopsis thaliana]
  misc_feature (5)..(235): Homolog of NCBI NO: 8979936 NR Description: Identical to gene XW6 from Arabidopsis thaliana and contains a Ribosomal protein S5 PF|00333 domain. ESTs
  misc_feature (5)..(271): Homolog of NCBI NO: 34393314 NR Description: putative 40S ribosomal protein S2 [Oryza sativa
TSSKMAERGGESGAERGGDRGDFGRGFGGGRGGGRGRDRGPRGRGRRGGRASEETKWVPVTKLGRLVADNKITKLEQIYLHSLPVKEYQIIDHLVGPTLKDEVMKIMPVQKQTRAGQRTRFKAFVVVGDGNGHVGLGVKCSKEVATAIRGAIILAKLSVVPVRRGYWGNKIGKPHTVPCKVTGKCGSVTVRMVPAPRGSGIVAARVPKKVLQFAGIDDVFTSSRGSTKTLGNFVKATFDCLQKTYGFLTPEFWKETRFSRSPYQEHTDFLSTKAVSATKVITEGEDQA

SEQ ID NO: 77749 - protein, 284 aa, Arabidopsis thaliana [sequence omitted]

SEQ ID NO: 77750 - protein, 185 aa, Arabidopsis thaliana; identical to SEQ ID NO: 38083
  peptide (1)..(185): Ceres Seq. ID no. 12577442
  misc_feature (78)..(151): Pfam Name: Ribosomal protein S5, C-terminal domain Pfam Description: Ribosomal protein S5, C-terminal domain
  misc_feature (1)..(185): Homolog of NCBI NO: 18406325 NR Description: ribosomal protein S2, putative; protein id: supported by cDNA: gi_18086425 [Arabidopsis thaliana] ribosomal protein S2, putative; protein id: At1g59359.1
  misc_feature (1)..(185): Homolog of NCBI NO: 15217951 NR Description: ribosomal protein S2, putative; protein id: [Arabidopsis thaliana] >gi|11276533|pir||T50673 ribosomal protein
  misc_feature (1)..(185): Homolog of NCBI NO: 21539457 NR Description: ribosomal protein S2, putative [Arabidopsis
  misc_feature (1)..(185): Homolog of NCBI NO: 21618011 NR Description: ribosomal protein S2, putative [Arabidopsis
  misc_feature (1)..(185): Homolog of NCBI NO: 25294520 NR Description: hypothetical protein RF12 [imported] - thaliana (fragment) >gi|6566279|dbj|BAA88264.1| similar to
  misc_feature (1)..(185): Homolog of NCBI NO: 15227443 NR Description: 40S ribosomal protein S2; protein id: supported by cDNA: 17415., supported by cDNA: gi_15081714 thaliana] >gi|3915847|sp|P49688|RS2_ARATH 40S ribosomal protein
  misc_feature (1)..(185): Homolog of NCBI NO: 21553851 NR Description: 40S ribosomal protein S2 [Arabidopsis thaliana]
  misc_feature (1)..(180): Homolog of NCBI NO: 15230312 NR Description: 40S ribosomal protein S2 homolog; protein id: supported by cDNA: 101250. [Arabidopsis thaliana]
  misc_feature (1)..(132): Homolog of NCBI NO: 8979936 NR Description: Identical to gene XW6 from Arabidopsis thaliana and contains a Ribosomal protein S5 PF|00333 domain. ESTs
  misc_feature (1)..(168): Homolog of NCBI NO: 34393314 NR Description: putative 40S ribosomal protein S2 [Oryza sativa

SEQ ID NO: 77751 - DNA, 1828 bp, Arabidopsis thaliana
  misc_feature (1)..(1828): Ceres Seq. ID no. 12577447
  misc_feature: MA Experiment ID: 108434 Result: Down-regulated in Transcription
  misc_feature: MA Experiment 108434 PARAMETER Experiment Name: At_Root_Tips_cDNA_P Parameter: Tissue Value: Root Tips
  misc_feature: MA Experiment ID: 108577 Result: Down-regulated in Transcription
  misc_feature: MA Experiment 108577 PARAMETER Experiment Name: At_42deg_Heat_cDNA_P Parameter: Temperature (deg C) Value: 42 vs. 22
  misc_feature: MA Experiment 108577 PARAMETER Experiment Name: At_42deg_Heat_cDNA_P Parameter: Timepoint (hr) Value: 6
  misc_feature: MA Experiment 108577 PARAMETER Experiment Name: At_42deg_Heat_cDNA_P Parameter: Tissue Value: Aerial
  misc_feature: MA Experiment ID: 20000070 Result: Up-regulated in Transcription
  misc_feature: MA Experiment 20000070 PARAMETER Experiment Name: At_100uM_ABA_Mutants_cDNA_P Parameter: Plant Line Value: CS24
  misc_feature: MA Experiment 20000070 PARAMETER Experiment Name: At_100uM_ABA_Mutants_cDNA_P Parameter: Timepoint (hr) Value: 6
  misc_feature: MA Experiment 20000070 PARAMETER Experiment Name: At_100uM_ABA_Mutants_cDNA_P Parameter: Tissue Value: Aerial
  misc_feature: MA Experiment 20000070 PARAMETER Experiment Name: At_100uM_ABA_Mutants_cDNA_P Parameter: Treatment Value: 100uM ABA vs. No Treatment
  misc_feature: MA Experiment ID: 20000086 Result: Up-regulated in Transcription
  misc_feature: MA Experiment 20000086 PARAMETER Experiment Name: At_100uM_ABA_Mutants_cDNA_P Parameter: Plant Line Value: CS22
  misc_feature: MA Experiment 20000086 PARAMETER Experiment Name: At_100uM_ABA_Mutants_cDNA_P Parameter: Timepoint (hr) Value: 6
  misc_feature: MA Experiment 20000086 PARAMETER Experiment Name: At_100uM_ABA_Mutants_cDNA_P Parameter: Tissue Value: Aerial
  misc_feature: MA Experiment 20000086 PARAMETER Experiment Name: At_100uM_ABA_Mutants_cDNA_P Parameter: Treatment Value: 100uM ABA vs. No Treatment
  misc_feature: MA Experiment ID: 20000089 Result: Up-regulated in Transcription
  misc_feature: MA Experiment ID: 20000117 Result: Up-regulated in Transcription
  misc_feature: MA Experiment 20000117 PARAMETER Experiment Name: At_100uM_ABA_Mutants_cDNA_P Parameter: Plant Line Value: Columbia
  misc_feature: MA Experiment 20000117 PARAMETER Experiment Name: At_100uM_ABA_Mutants_cDNA_P Parameter: Timepoint (hr) Value: 6
  misc_feature: MA Experiment 20000117 PARAMETER Experiment Name: At_100uM_ABA_Mutants_cDNA_P Parameter: Tissue Value: Aerial
  misc_feature: MA Experiment 20000117 PARAMETER Experiment Name: At_100uM_ABA_Mutants_cDNA_P Parameter: Treatment Value: 100uM ABA vs. No Treatment
  misc_feature: MA Experiment ID: 20001247 Result: Down-regulated in Transcription
  misc_feature: MA Experiment 20001247 PARAMETER Experiment Name: At_Far-red-induction_P Parameter: Age (day) Value: 7
  misc_feature: MA Experiment 20001247 PARAMETER Experiment Name: At_Far-red-induction_P Parameter: Light Value: Far-red vs. White
  misc_feature: MA Experiment 20001247 PARAMETER Experiment Name: At_Far-red-induction_P Parameter: Organism Value: A. thaliana
  misc_feature: MA Experiment 20001247 PARAMETER Experiment Name: At_Far-red-induction_P Parameter: Plant Line Value: Columbia
  misc_feature: MA Experiment 20001247 PARAMETER Experiment Name: At_Far-red-induction_P Parameter: Timepoint (hr) Value: 1
  misc_feature: MA Experiment 20001247 PARAMETER Experiment Name: At_Far-red-induction_P Parameter: Tissue Value: Whole Plant
tttggttagagtgttaaaaaactattggaagatgggttctggtcaatggcatatggagaagaggtctactttaaagaatgattcgtttgtaaaagaatacaatccagtcacggaaactgggagtctctctatcattgttcttggtgcttctggtgatcttgctaagaagaagacttttcctgcacttttcaatctatttcatcagggatttcttaatccagatgaagttcatatatttggatatgcaaggagtaagattactgatgaggagcttagagataaaatccgcggatatcttgttgatgagaagaatgcatctaagaaaacagaagctttgtccaagtttctaaagctgattaagtatgtgagtggaccttatgattctgaggaagggtttaagagattagacaaggcgattttggagcacgagatatctaaaaagactgctgaaggatcttcgaggagattgttttatcttgcacttcctccgtctgtataccctcctgtaagcaagatgatcaaggcatggtgcactaacaaatctgatcttggtggatggactaggattgttgttgagaaaccatttggaaaggatttggaatctgcagagcagctgagttctcagattggagccttgtttgaagaaccacagatttatcgtattgatcactatctgggaaaagagttagttcaaaacatgttggttcttcggtttgccaatcgcttgtttttgccactatggaaccgcgacaatattgcaaacgtacagatcgttttcagagaagattttggaactgaaggtcgcggtggatattttgatgaatacggaatcattcgtgatattattcaaaaccacttgctccaggttctttgccttgtcgccatggagaaaccaatctctcttaaacccgagcacatccgggatgagaaagtgaaggttcttcaatctgtgattcccataaaagatgaagaggtggttcttggacaatatgaaggatatagagatgatccaactgttccaaatgactcaaacactccaacgtttgccacaacaattcttcgcattaacaatgaaagatgggaaggtgttccttttatactgaaggccggaaaggcaatgagttcaaagaaggcagatattcgcattcagtttaaagatgttcctggcgacatattcaaatgtcaaaaccaagggaggaacgagtttgttatacgcttgcagccttcagaggccatgtacatgaagctaactgtgaagcaaccgggtctggagatgcaaaccgtgcagagtgaactagacctatcgtacaagcagcgttaccaagatgtctcaattccagaggcttacgaacgccttattcttgacacaatcagaggcgaccaacaacactttgttcgcagagacgaattaaaggcagcttgggaaatcttcactccactgcttcacaggatcgacaagggagaagtgaaatcggtcccatacaaacaaggtagccgtggcccagcggaagcagatcagctacttaagaaagctggttatatgcagactcatggctacatttggatccctcctacattgtaaatggtataatcatagagatgatgatgatgagtacacacaaaataagagggttttttttcttttttttccttgcttgctgaataaaaactcttcaccagtttggagtttgtttaagtgaatcttatgtatactagtgatcttcactaggacattgtttgtttatgccttgtagtttttgttgtactagtcccttgttttctttttttacataatgcaaaacagctttgtggaaaagctaattaaatt

SEQ ID NO: 77752 - protein, 526 aa, Arabidopsis thaliana
  peptide (1)..(526): Ceres Seq. ID no. 12577448
  misc_feature (234)..(518): Pfam Name: Glucose-6-phosphate dehydrogenase, C-terminal domain Pfam Description: Glucose-6-phosphate dehydrogenase, C-terminal
  misc_feature (11)..(526): Homolog of NCBI NO: 15232132 NR Description: glucose-6-phosphate 1-dehydrogenase, putative; id: At3g27300.1, supported by cDNA: gi_18086469 [Arabidopsis
  misc_feature (11)..(526): Homolog of NCBI NO: 25283728 NR Description: glucose-6-phosphate 1-dehydrogenase (EC 1.1.1.49)
  misc_feature (11)..(526): Homolog of NCBI NO: 18086470 NR Description: AT3g27300/K17E12_12 [Arabidopsis thaliana]
  misc_feature (11)..(526): Homolog of NCBI NO: 15237485 NR Description: glucose-6-phosphate dehydrogenase; protein id:
  misc_feature (11)..(526): Homolog of NCBI NO: 25283727 NR Description: glucose-6-phosphate 1-dehydrogenase (EC 1.1.1.49)
  misc_feature (13)..(526): Homolog of NCBI NO: 585165 NR Description: Glucose-6-phosphate 1-dehydrogenase, cytoplasmic
  misc_feature (11)..(526): Homolog of NCBI NO: 3023815 NR Description: Glucose-6-phosphate 1-dehydrogenase, cytoplasmic
  misc_feature (10)..(526): Homolog of NCBI NO: 7431269 NR Description: glucose-6-phosphate 1-dehydrogenase (EC 1.1.1.49)
  misc_feature (13)..(526): Homolog of NCBI NO: 3021508 NR Description: glucose-6-phosphate dehydrogenase [Nicotiana
  misc_feature (13)..(526): Homolog of NCBI NO: 3021510 NR Description: glucose-6-phosphate dehydrogenase [Nicotiana
LVRVLKNYWKMGSGQWHMEKRSTLKNDSFVKEYNPVTETGSLSIIVLGASGDLAKKKTFPALFNLFHQGFLNPDEVHIFGYARSKITDEELRDKIRGYLVDEKNASKKTEALSKFLKLIKYVSGPYDSEEGFKRLDKAILEHEISKKTAEGSSRRLFYLALPPSVYPPVSKMIKAWCTNKSDLGGWTRIVVEKPFGKDLESAEQLSSQIGALFEEPQIYRIDHYLGKELVQNMLVLRFANRLFLPLWNRDNIANVQIVFREDFGTEGRGGYFDEYGIIRDIIQNHLLQVLCLVAMEKPISLKPEHIRDEKVKVLQSVIPIKDEEVVLGQYEGYRDDPTVPNDSNTPTFATTILRINNERWEGVPFILKAGKAMSSKKADIRIQFKDVPGDIFKCQNQGRNEFVIRLQPSEAMYMKLTVKQPGLEMQTVQSELDLSYKQRYQDVSIPEAYERLILDTIRGDQQHFVRRDELKAAWEIFTPLLHRIDKGEVKSVPYKQGSRGPAEADQLLKKAGYMQTHGYIWIPPTL

SEQ ID NO: 77753 - protein, 516 aa, Arabidopsis thaliana; identical to SEQ ID NO: 77428
  peptide (1)..(516): Ceres Seq. ID no. 12577449
  misc_feature (224)..(508): Pfam Name: Glucose-6-phosphate dehydrogenase, C-terminal domain Pfam Description: Glucose-6-phosphate dehydrogenase, C-terminal
  misc_feature (1)..(516): Homolog of NCBI NO: 15232132 NR Description: glucose-6-phosphate 1-dehydrogenase, putative; id: At3g27300.1, supported by cDNA: gi_18086469 [Arabidopsis
  misc_feature (1)..(516): Homolog of NCBI NO: 25283728 NR Description: glucose-6-phosphate 1-dehydrogenase (EC 1.1.1.49)
  misc_feature (1)..(516): Homolog of NCBI NO: 18086470 NR Description: AT3g27300/K17E12_12 [Arabidopsis thaliana]
  misc_feature (1)..(516): Homolog of NCBI NO: 15237485 NR Description: glucose-6-phosphate dehydrogenase; protein id:
  misc_feature (1)..(516): Homolog of NCBI NO: 25283727 NR Description: glucose-6-phosphate 1-dehydrogenase (EC 1.1.1.49)
  misc_feature (3)..(516): Homolog of NCBI NO: 585165 NR Description: Glucose-6-phosphate 1-dehydrogenase, cytoplasmic
  misc_feature (1)..(516): Homolog of NCBI NO: 3023815 NR Description: Glucose-6-phosphate 1-dehydrogenase, cytoplasmic
  misc_feature (1)..(516): Homolog of NCBI NO: 7431269 NR Description: glucose-6-phosphate 1-dehydrogenase (EC 1.1.1.49)
  misc_feature (3)..(516): Homolog of NCBI NO: 3021508 NR Description: glucose-6-phosphate dehydrogenase [Nicotiana
  misc_feature (3)..(516): Homolog of NCBI NO: 3021510 NR Description: glucose-6-phosphate dehydrogenase [Nicotiana

SEQ ID NO: 77754 - protein, 509 aa, Arabidopsis thaliana; identical to SEQ ID NO: 77429
  peptide (1)..(509): Ceres Seq. ID no. 12577450
  misc_feature (217)..(501): Pfam Name: Glucose-6-phosphate dehydrogenase, C-terminal domain Pfam Description: Glucose-6-phosphate dehydrogenase, C-terminal
  misc_feature (1)..(509): Homolog of NCBI NO: 15232132 NR Description: glucose-6-phosphate 1-dehydrogenase, putative; id: At3g27300.1, supported by cDNA: gi_18086469 [Arabidopsis
  misc_feature (1)..(509): Homolog of NCBI NO: 25283728 NR Description: glucose-6-phosphate 1-dehydrogenase (EC 1.1.1.49)
  misc_feature (1)..(509): Homolog of NCBI NO: 18086470 NR Description: AT3g27300/K17E12_12 [Arabidopsis thaliana]
  misc_feature (1)..(509): Homolog of NCBI NO: 15237485 NR Description: glucose-6-phosphate dehydrogenase; protein id:
  misc_feature (1)..(509): Homolog of NCBI NO: 25283727 NR Description: glucose-6-phosphate 1-dehydrogenase (EC 1.1.1.49)
  misc_feature (1)..(509): Homolog of NCBI NO: 585165 NR Description: Glucose-6-phosphate 1-dehydrogenase, cytoplasmic
  misc_feature (1)..(509): Homolog of NCBI NO: 3023815 NR Description: Glucose-6-phosphate 1-dehydrogenase, cytoplasmic
  misc_feature (1)..(509): Homolog of NCBI NO: 7431269 NR Description: glucose-6-phosphate 1-dehydrogenase (EC 1.1.1.49)
  misc_feature (1)..(509): Homolog of NCBI NO: 3021508 NR Description: glucose-6-phosphate dehydrogenase [Nicotiana
  misc_feature (1)..(509): Homolog of NCBI NO: 3021510 NR Description: glucose-6-phosphate dehydrogenase [Nicotiana

SEQ ID NO: 77755 - DNA, 703 bp, Arabidopsis thaliana
  misc_feature (1)..(703): Ceres Seq. ID no. 12577459
  misc_feature: MA Experiment ID: 108434 Result: Down-regulated in Transcription
  misc_feature: MA Experiment 108434 PARAMETER Experiment Name: At_Root_Tips_cDNA_P Parameter: Tissue Value: Root Tips
  misc_feature: MA Experiment ID: 108461 Result: Down-regulated in Transcription
  misc_feature: MA Experiment 108461 PARAMETER Experiment Name: At_Germinating_Seeds_cDNA_P Parameter: Age (day) Value: 1 vs. 0
  misc_feature: MA Experiment 108461 PARAMETER Experiment Name: At_Germinating_Seeds_cDNA_P Parameter: Tissue Value: Germinating Seeds
  misc_feature: MA Experiment ID: 108462 Result: Down-regulated in Transcription
  misc_feature: MA Experiment 108462 PARAMETER Experiment Name: At_Germinating_Seeds_cDNA_P Parameter: Age (day) Value: 2 vs. 0
  misc_feature: MA Experiment 108462 PARAMETER Experiment Name: At_Germinating_Seeds_cDNA_P Parameter: Tissue Value: Germinating Seeds
  misc_feature: MA Experiment ID: 108463 Result: Down-regulated in Transcription
  misc_feature: MA Experiment 108463 PARAMETER Experiment Name: At_Germinating_Seeds_cDNA_P Parameter: Age (day) Value: 3 vs. 0
  misc_feature: MA Experiment 108463 PARAMETER Experiment Name: At_Germinating_Seeds_cDNA_P Parameter: Tissue Value: Germinating Seeds
  misc_feature: MA Experiment ID: 108464 Result: Down-regulated in Transcription
  misc_feature: MA Experiment 108464 PARAMETER Experiment Name: At_Germinating_Seeds_cDNA_P Parameter: Age (day) Value: 4 vs. 0
  misc_feature: MA Experiment 108464 PARAMETER Experiment Name: At_Germinating_Seeds_cDNA_P Parameter: Tissue Value: Germinating Seeds
  misc_feature: MA Experiment ID: 108469 Result: Up-regulated in Transcription
  misc_feature: MA Experiment ID: 108488 Result: Down-regulated in Transcription
  misc_feature: MA Experiment ID: 108489 Result: Up-regulated in Transcription
  misc_feature: MA Experiment ID: 108561 Result: Up-regulated in Transcription
  misc_feature: MA Experiment 108561 PARAMETER Experiment Name: At_100uM_ABA_cDNA_P Parameter: Timepoint (hr) Value: 6
  misc_feature: MA Experiment 108561 PARAMETER Experiment Name: At_100uM_ABA_cDNA_P Parameter: Tissue Value: Aerial
  misc_feature: MA Experiment 108561 PARAMETER Experiment Name: At_100uM_ABA_cDNA_P Parameter: Treatment Value: 100uM ABA vs. No Treatment
  misc_feature: MA Experiment ID: 108573 Result: Up-regulated in Transcription
  misc_feature: MA Experiment 108573 PARAMETER Experiment Name: At_Drought_cDNA_P Parameter: Timepoint (hr) Value: 6
  misc_feature: MA Experiment 108573 PARAMETER Experiment Name: At_Drought_cDNA_P Parameter: Tissue Value: Aerial
  misc_feature: MA Experiment 108573 PARAMETER Experiment Name: At_Drought_cDNA_P Parameter: Treatment Value: Drought vs. No Drought
  misc_feature: MA Experiment ID: 108574 Result: Up-regulated in Transcription
  misc_feature: MA Experiment 108574 PARAMETER Experiment Name: At_Wounding__cDNA_P Parameter: Timepoint (hr) Value: 1
  misc_feature: MA Experiment 108574 PARAMETER Experiment Name: At_Wounding__cDNA_P Parameter: Tissue Value: Aerial
  misc_feature: MA Experiment 108574 PARAMETER Experiment Name: At_Wounding__cDNA_P Parameter: Treatment Value: Wounding vs. No Wounding
  misc_feature: MA Experiment ID: 108576 Result: Up-regulated in Transcription
  misc_feature: MA Experiment 108576 PARAMETER Experiment Name: At_42deg_Heat_cDNA_P Parameter: Temperature (deg C) Value: 42 vs. 22
  misc_feature: MA Experiment 108576 PARAMETER Experiment Name: At_42deg_Heat_cDNA_P Parameter: Timepoint (hr) Value: 1
  misc_feature: MA Experiment 108576 PARAMETER Experiment Name: At_42deg_Heat_cDNA_P Parameter: Tissue Value: Aerial
  misc_feature: MA Experiment ID: 108577 Result: Up-regulated in Transcription
  misc_feature: MA Experiment 108577 PARAMETER Experiment Name: At_42deg_Heat_cDNA_P Parameter: Temperature (deg C) Value: 42 vs. 22
  misc_feature: MA Experiment 108577 PARAMETER Experiment Name: At_42deg_Heat_cDNA_P Parameter: Timepoint (hr) Value: 6
  misc_feature: MA Experiment 108577 PARAMETER Experiment Name: At_42deg_Heat_cDNA_P Parameter: Tissue Value: Aerial
  misc_feature: MA Experiment ID: 108585 Result: Up-regulated in Transcription
  misc_feature: MA Experiment 108585 PARAMETER Experiment Name: At_5mM_NaNP_cDNA_P Parameter: Timepoint (hr) Value: 6
  misc_feature: MA Experiment 108585 PARAMETER Experiment Name: At_5mM_NaNP_cDNA_P Parameter: Tissue Value: Aerial
  misc_feature: MA Experiment 108585 PARAMETER Experiment Name: At_5mM_NaNP_cDNA_P Parameter: Treatment Value: null
  misc_feature: MA Experiment ID: 108595 Result: Up-regulated in Transcription
  misc_feature: MA Experiment 108595 PARAMETER Experiment Name: At_Ler-pi_Ovule_cDNA_P Parameter: Plant Line Value: null
  misc_feature: MA Experiment ID: 108607 Result: Up-regulated in Transcription
  misc_feature: MA Experiment 108607 PARAMETER Experiment Name: At_100uM_ABA_cDNA_P Parameter: Timepoint (hr) Value: 4
  misc_feature: MA Experiment 108607 PARAMETER Experiment Name: At_100uM_ABA_cDNA_P Parameter: Tissue Value: Aerial
  misc_feature: MA Experiment 108607 PARAMETER Experiment Name: At_100uM_ABA_cDNA_P Parameter: Treatment Value: 100uM ABA vs. No Treatment
  misc_feature: MA Experiment ID: 108608 Result: Up-regulated in Transcription
  misc_feature: MA Experiment 108608 PARAMETER Experiment Name: At_100uM_ABA_cDNA_P Parameter: Timepoint (hr) Value: 1
  misc_feature: MA Experiment 108608 PARAMETER Experiment Name: At_100uM_ABA_cDNA_P Parameter: Tissue Value: Aerial
  misc_feature: MA Experiment 108608 PARAMETER Experiment Name: At_100uM_ABA_cDNA_P Parameter: Treatment Value: 100uM ABA vs. No Treatment
  misc_feature: MA Experiment ID: 108667 Result: Up-regulated in Transcription
  misc_feature: MA Experiment 108667 PARAMETER Experiment Name: At_2mM_SA_cDNA_P Parameter: Plant Line Value: WS
  misc_feature: MA Experiment 108667 PARAMETER Experiment Name: At_2mM_SA_cDNA_P Parameter: Timepoint (hr) Value: 1
  misc_feature: MA Experiment 108667 PARAMETER Experiment Name: At_2mM_SA_cDNA_P Parameter: Treatment Value: 2mM SA vs. No Treatment
  misc_feature: MA Experiment ID: 108668 Result: Up-regulated in Transcription
  misc_feature: MA Experiment 108668 PARAMETER Experiment Name: At_2mM_SA_cDNA_P Parameter: Plant Line Value: WS
  misc_feature: MA Experiment 108668 PARAMETER Experiment Name: At_2mM_SA_cDNA_P Parameter: Timepoint (hr) Value: 6
  misc_feature: MA Experiment 108668 PARAMETER Experiment Name: At_2mM_SA_cDNA_P Parameter: Treatment Value: 2mM SA vs. No Treatment
  misc_feature: MA Experiment ID: 20000069 Result: Up-regulated in Transcription
  misc_feature: MA Experiment 20000069 PARAMETER Experiment Name: At_100uM_ABA_Mutants_cDNA_P Parameter: Plant Line Value: CS23
  misc_feature: MA Experiment 20000069 PARAMETER Experiment Name: At_100uM_ABA_Mutants_cDNA_P Parameter: Timepoint (hr) Value: 6
  misc_feature: MA Experiment 20000069 PARAMETER Experiment Name: At_100uM_ABA_Mutants_cDNA_P Parameter: Tissue Value: Aerial
  misc_feature: MA Experiment 20000069 PARAMETER Experiment Name: At_100uM_ABA_Mutants_cDNA_P Parameter: Treatment Value: 100uM ABA vs. No Treatment
  misc_feature: MA Experiment ID: 20000070 Result: Up-regulated in Transcription
  misc_feature: MA Experiment 20000070 PARAMETER Experiment Name: At_100uM_ABA_Mutants_cDNA_P Parameter: Plant Line Value: CS24
  misc_feature: MA Experiment 20000070 PARAMETER Experiment Name: At_100uM_ABA_Mutants_cDNA_P Parameter: Timepoint (hr) Value: 6
  misc_feature: MA Experiment 20000070 PARAMETER Experiment Name: At_100uM_ABA_Mutants_cDNA_P Parameter: Tissue Value: Aerial
  misc_feature: MA Experiment 20000070 PARAMETER Experiment Name: At_100uM_ABA_Mutants_cDNA_P Parameter: Treatment Value: 100uM ABA vs. No Treatment
  misc_feature: MA Experiment ID: 20000071 Result: Up-regulated in Transcription
  misc_feature: MA Experiment 20000071 PARAMETER Experiment Name: At_100uM_ABA_Mutants_cDNA_P Parameter: Plant Line Value: CS8104
  misc_feature: MA Experiment 20000071 PARAMETER Experiment Name: At_100uM_ABA_Mutants_cDNA_P Parameter: Timepoint (hr) Value: 6
  misc_feature: MA Experiment 20000071 PARAMETER Experiment Name: At_100uM_ABA_Mutants_cDNA_P Parameter: Tissue Value: Aerial
  misc_feature: MA Experiment 20000071 PARAMETER Experiment Name: At_100uM_ABA_Mutants_cDNA_P Parameter: Treatment Value: 100uM ABA vs. No Treatment
  misc_feature: MA Experiment ID: 20000072 Result: Up-regulated in Transcription
  misc_feature: MA Experiment 20000072 PARAMETER Experiment Name: At_100uM_ABA_Mutants_cDNA_P Parameter: Plant Line Value: CS8105
  misc_feature: MA Experiment 20000072 PARAMETER Experiment Name: At_100uM_ABA_Mutants_cDNA_P Parameter: Timepoint (hr) Value: 6
  misc_feature: MA Experiment 20000072 PARAMETER Experiment Name: At_100uM_ABA_Mutants_cDNA_P Parameter: Tissue Value: Aerial
  misc_feature: MA Experiment 20000072 PARAMETER Experiment Name: At_100uM_ABA_Mutants_cDNA_P Parameter: Treatment Value: 100uM ABA vs. No Treatment
  misc_feature: MA Experiment ID: 20000086 Result: Up-regulated in Transcription
  misc_feature: MA Experiment 20000086 PARAMETER Experiment Name: At_100uM_ABA_Mutants_cDNA_P Parameter: Plant Line Value: CS22
  misc_feature: MA Experiment 20000086 PARAMETER Experiment Name: At_100uM_ABA_Mutants_cDNA_P Parameter: Timepoint (hr) Value: 6
  misc_feature: MA Experiment 20000086 PARAMETER Experiment Name: At_100uM_ABA_Mutants_cDNA_P Parameter: Tissue Value: Aerial
  misc_feature: MA Experiment 20000086 PARAMETER Experiment Name: At_100uM_ABA_Mutants_cDNA_P Parameter: Treatment Value: 100uM ABA vs. No Treatment
  misc_feature: MA Experiment ID: 20000087 Result: Up-regulated in Transcription
  misc_feature: MA Experiment 20000087 PARAMETER Experiment Name: At_100uM_ABA_Mutants_cDNA_P Parameter: Plant Line Value: WS
  misc_feature: MA Experiment 20000087 PARAMETER Experiment Name: At_100uM_ABA_Mutants_cDNA_P Parameter: Timepoint (hr) Value: 6
  misc_feature: MA Experiment 20000087 PARAMETER Experiment Name: At_100uM_ABA_Mutants_cDNA_P Parameter: Tissue Value: Aerial
  misc_feature: MA Experiment 20000087 PARAMETER Experiment Name: At_100uM_ABA_Mutants_cDNA_P Parameter: Treatment Value: 100uM ABA vs. No Treatment
  misc_feature: MA Experiment ID: 20000112 Result: Up-regulated in Transcription
  misc_feature: MA Experiment 20000112 PARAMETER Experiment Name: At_42deg_Heat_cDNA_P Parameter: Temperature (deg C) Value: 42 vs. 22
  misc_feature: MA Experiment 20000112 PARAMETER Experiment Name: At_42deg_Heat_cDNA_P Parameter: Timepoint (hr) Value: 2
  misc_feature: MA Experiment 20000112 PARAMETER Experiment Name: At_42deg_Heat_cDNA_P Parameter: Tissue Value: Aerial
  misc_feature: MA Experiment ID: 20000113 Result: Up-regulated in Transcription
  misc_feature: MA Experiment 20000113 PARAMETER Experiment Name: At_42deg_Heat_cDNA_P Parameter: Temperature (deg C) Value: 42 vs. 22
  misc_feature: MA Experiment 20000113 PARAMETER Experiment Name: At_42deg_Heat_cDNA_P Parameter: Timepoint (hr) Value: 8
  misc_feature: MA Experiment 20000113 PARAMETER Experiment Name: At_42deg_Heat_cDNA_P Parameter: Tissue Value: Aerial
  misc_feature: MA Experiment ID: 20000117 Result: Up-regulated in Transcription
  misc_feature: MA Experiment 20000117 PARAMETER Experiment Name: At_100uM_ABA_Mutants_cDNA_P Parameter: Plant Line Value: Columbia
  misc_feature: MA Experiment 20000117 PARAMETER Experiment Name: At_100uM_ABA_Mutants_cDNA_P Parameter: Timepoint (hr) Value: 6
  misc_feature: MA Experiment 20000117 PARAMETER Experiment Name: At_100uM_ABA_Mutants_cDNA_P Parameter: Tissue Value: Aerial
  misc_feature: MA Experiment 20000117 PARAMETER Experiment Name: At_100uM_ABA_Mutants_cDNA_P Parameter: Treatment Value: 100uM ABA vs. No Treatment
  misc_feature: MA Experiment ID: 20000144 Result: Up-regulated in Transcription
  misc_feature: MA Experiment 20000144 PARAMETER Experiment Name: At_42deg_Heat_cDNA_P Parameter: Temperature (deg C) Value: 42 vs. 22
  misc_feature: MA Experiment 20000144 PARAMETER Experiment Name: At_42deg_Heat_cDNA_P Parameter: Timepoint (hr) Value: 1
  misc_feature: MA Experiment 20000144 PARAMETER Experiment Name: At_42deg_Heat_cDNA_P Parameter: Tissue Value: Aerial
  misc_feature: MA Experiment ID: 20000166 Result: Up-regulated in Transcription
  misc_feature: MA Experiment 20000166 PARAMETER Experiment Name: At_100uM_ABA_P Parameter: Age (day) Value: 14
  misc_feature: MA Experiment 20000166 PARAMETER Experiment Name: At_100uM_ABA_P Parameter: Organism Value: A. thaliana
  misc_feature: MA Experiment 20000166 PARAMETER Experiment Name: At_100uM_ABA_P Parameter: Plant Line Value: WS
  misc_feature: MA Experiment 20000166 PARAMETER Experiment Name: At_100uM_ABA_P Parameter: Timepoint (hr) Value: 1
  misc_feature: MA Experiment 20000166 PARAMETER Experiment Name: At_100uM_ABA_P Parameter: Tissue Value: Aerial
  misc_feature: MA Experiment 20000166 PARAMETER Experiment Name: At_100uM_ABA_P Parameter: Treatment Value: 100uM ABA vs. No Treatment
  misc_feature: MA Experiment ID: 20000171 Result: Up-regulated in Transcription
  misc_feature: MA Experiment 20000171 PARAMETER Experiment Name: At_42deg_Heat_P Parameter: Age (day) Value: 14
  misc_feature: MA Experiment 20000171 PARAMETER Experiment Name: At_42deg_Heat_P Parameter: Organism Value: A. thaliana
  misc_feature: MA Experiment 20000171 PARAMETER Experiment Name: At_42deg_Heat_P Parameter: Plant Line Value: WS
  misc_feature: MA Experiment 20000171 PARAMETER Experiment Name: At_42deg_Heat_P Parameter: Temperature (deg C) Value: 42 vs. 22
  misc_feature: MA Experiment 20000171 PARAMETER Experiment Name: At_42deg_Heat_P Parameter: Timepoint (hr) Value: 1
  misc_feature: MA Experiment 20000171 PARAMETER Experiment Name: At_42deg_Heat_P Parameter: Tissue Value: Aerial
  misc_feature: MA Experiment ID: 20000173 Result: Up-regulated in Transcription
  misc_feature: MA Experiment 20000173 PARAMETER Experiment Name: At_42deg_Heat_P Parameter: Age (day) Value: 14
  misc_feature: MA Experiment 20000173 PARAMETER Experiment Name: At_42deg_Heat_P Parameter: Organism Value: A. thaliana
  misc_feature: MA Experiment 20000173 PARAMETER Experiment Name: At_42deg_Heat_P Parameter: Plant Line Value: WS
  misc_feature: MA Experiment 20000173 PARAMETER Experiment Name: At_42deg_Heat_P Parameter: Temperature (deg C) Value: 42 vs. 22
  misc_feature: MA Experiment 20000173 PARAMETER Experiment Name: At_42deg_Heat_P Parameter: Timepoint (hr) Value: 6
  misc_feature: MA Experiment 20000173 PARAMETER Experiment Name: At_42deg_Heat_P Parameter: Tissue Value: Aerial
  misc_feature: MA Experiment ID: 20000179 Result: Down-regulated in Transcription
  misc_feature: MA Experiment 20000179 PARAMETER Experiment Name: At_Germinating_Seeds_P Parameter: Age (hr) Value: 6 vs. 0
  misc_feature: MA Experiment 20000179 PARAMETER Experiment Name: At_Germinating_Seeds_P Parameter: Tissue Value: Germinating Seeds
  misc_feature: MA Experiment ID: 20000180 Result: Down-regulated in Transcription
  misc_feature: MA Experiment 20000180 PARAMETER Experiment Name: At_Germinating_Seeds_P Parameter: Age (hr) Value: 24 vs. 0
  misc_feature: MA Experiment 20000180 PARAMETER Experiment Name: At_Germinating_Seeds_P Parameter: Tissue Value: Germinating Seeds
  misc_feature: MA Experiment ID: 20000182 Result: Up-regulated in Transcription
  misc_feature: MA Experiment 20000182 PARAMETER Experiment Name: At_2mM_SA_P Parameter: Age (day) Value: 14
  misc_feature: MA Experiment 20000182 PARAMETER Experiment Name: At_2mM_SA_P Parameter: Organism Value: A. thaliana
  misc_feature: MA Experiment 20000182 PARAMETER Experiment Name: At_2mM_SA_P Parameter: Plant Line Value: WS
  misc_feature: MA Experiment 20000182 PARAMETER Experiment Name: At_2mM_SA_P Parameter: Timepoint (hr) Value: 6
  misc_feature: MA Experiment 20000182 PARAMETER Experiment Name: At_2mM_SA_P Parameter: Tissue Value: Aerial
  misc_feature: MA Experiment 20000182 PARAMETER Experiment Name: At_2mM_SA_P Parameter: Treatment Value: 2mM SA vs. No Treatment
  misc_feature: MA Experiment ID: 20000184 Result: Down-regulated in Transcription
  misc_feature: MA Experiment 20000184 PARAMETER Experiment Name: At_Shoots__P Parameter: Age (day) Value: 7
  misc_feature: MA Experiment 20000184 PARAMETER Experiment Name: At_Shoots__P Parameter: Tissue Value: Shoots vs. Whole Plant
  misc_feature: MA Experiment ID: 20000234 Result: Down-regulated in Transcription
  misc_feature: MA Experiment 20000234 PARAMETER Experiment Name: At_Siliques_P Parameter: Age (day) Value: 21
  misc_feature: MA Experiment 20000234 PARAMETER Experiment Name: At_Siliques_P Parameter: Organism Value: A. thaliana
  misc_feature: MA Experiment 20000234 PARAMETER Experiment Name: At_Siliques_P Parameter: Plant Line Value: WS
  misc_feature: MA Experiment 20000234 PARAMETER Experiment Name: At_Siliques_P Parameter: Tissue Value: Less Than 5mm Siliques vs. Whole Plant
  misc_feature: MA Experiment ID: 20000235 Result: Down-regulated in Transcription
  misc_feature: MA Experiment 20000235 PARAMETER Experiment Name: At_Siliques_P Parameter: Age (day) Value: 21
  misc_feature: MA Experiment 20000235 PARAMETER Experiment Name: At_Siliques_P Parameter: Organism Value: A. thaliana
  misc_feature: MA Experiment 20000235 PARAMETER Experiment Name: At_Siliques_P Parameter: Plant Line Value: WS
  misc_feature: MA Experiment 20000235 PARAMETER Experiment Name: At_Siliques_P Parameter: Tissue Value: 5-10mm Siliques vs. Whole Plant
  misc_feature: MA Experiment ID: 20000264 Result: Down-regulated in Transcription
  misc_feature: MA Experiment 20000264 PARAMETER Experiment Name: At_Open_Flower_P Parameter: Age (day) Value: 21
  misc_feature: MA Experiment 20000264 PARAMETER Experiment Name: At_Open_Flower_P Parameter: Plant Line Value: WS
  misc_feature: MA Experiment 20000264 PARAMETER Experiment Name: At_Open_Flower_P Parameter: Tissue Value: Open Flower vs. Whole Plant
  misc_feature: MA Experiment ID: 20000265 Result: Down-regulated in Transcription
  misc_feature: MA Experiment 20000265 PARAMETER Experiment Name: At_Open_Flower_P Parameter: Age (day) Value: 21
  misc_feature: MA Experiment 20000265 PARAMETER Experiment Name: At_Open_Flower_P Parameter: Plant Line Value: WS
  misc_feature: MA Experiment 20000265 PARAMETER Experiment Name: At_Open_Flower_P Parameter: Tissue Value: Closed Flower vs. Whole Plant
  misc_feature: MA Experiment ID: 20000286 Result: Down-regulated in Transcription
  misc_feature: MA Experiment 20000286 PARAMETER Experiment Name: At_Open_Flower_P Parameter: Age (day) Value: 21
  misc_feature: MA Experiment 20000286 PARAMETER Experiment Name: At_Open_Flower_P Parameter: Plant Line Value: WS
  misc_feature: MA Experiment 20000286 PARAMETER Experiment Name: At_Open_Flower_P Parameter: Tissue Value: Half Open vs. Whole Plant
  misc_feature: MA Experiment ID: 20000437 Result: Up-regulated in Transcription
  misc_feature: MA Experiment 20000437 PARAMETER Experiment Name: At_Drought_P Parameter: Age (day) Value: 8
  misc_feature: MA Experiment 20000437 PARAMETER Experiment Name: At_Drought_P Parameter: Organism Value: A. thaliana
  misc_feature: MA Experiment 20000437 PARAMETER Experiment Name: At_Drought_P Parameter: Plant Line Value: WS
  misc_feature: MA Experiment 20000437 PARAMETER Experiment Name: At_Drought_P Parameter: Timepoint (hr) Value: 24
  misc_feature: MA Experiment 20000437 PARAMETER Experiment Name: At_Drought_P Parameter: Tissue Value: Whole Plant
  misc_feature: MA Experiment 20000437 PARAMETER Experiment Name: At_Drought_P Parameter: Treatment Value: Drought vs. No Drought
  misc_feature: MA Experiment ID: 20000438 Result: Down-regulated in Transcription
  misc_feature: MA Experiment 20000438 PARAMETER Experiment Name: At_Shoots__P Parameter: Age (day) Value: 14
  misc_feature: MA Experiment 20000438 PARAMETER Experiment Name: At_Shoots__P Parameter: Tissue Value: Shoots vs. Whole Plant
  misc_feature: MA Experiment ID: 20000453 Result: Up-regulated in Transcription
  misc_feature: MA Experiment 20000453 PARAMETER Experiment Name: At_100uM_ABA_P Parameter: Age (day) Value: 15
  misc_feature: MA Experiment 20000453 PARAMETER Experiment Name: At_100uM_ABA_P Parameter: Organism Value: A. thaliana
  misc_feature: MA Experiment 20000453 PARAMETER Experiment Name: At_100uM_ABA_P Parameter: Plant Line Value: WS
  misc_feature: MA Experiment 20000453 PARAMETER Experiment Name: At_100uM_ABA_P Parameter: Timepoint (hr) Value: 24
  misc_feature: MA Experiment 20000453 PARAMETER Experiment Name: At_100uM_ABA_P Parameter: Tissue Value: Aerial
  misc_feature: MA Experiment 20000453 PARAMETER Experiment Name: At_100uM_ABA_P Parameter: Treatment Value: 100uM ABA vs. No Treatment
  misc_feature: MA Experiment ID: 20000456 Result: Up-regulated in Transcription
  misc_feature: MA Experiment 20000456 PARAMETER Experiment Name: At_100uM_BA_P Parameter: Age (day) Value: 14
  misc_feature: MA Experiment 20000456 PARAMETER Experiment Name: At_100uM_BA_P Parameter: Organism Value: A. thaliana
  misc_feature: MA Experiment 20000456 PARAMETER Experiment Name: At_100uM_BA_P Parameter: Plant Line Value: WS
  misc_feature: MA Experiment 20000456 PARAMETER Experiment Name: At_100uM_BA_P Parameter: Timepoint (hr) Value: 6
  misc_feature: MA Experiment 20000456 PARAMETER Experiment Name: At_100uM_BA_P Parameter: Tissue Value: Aerial
  misc_feature: MA Experiment 20000456 PARAMETER Experiment Name: At_100uM_BA_P Parameter: Treatment Value: 100uM BA vs. No Treatment
  misc_feature: MA Experiment ID: 20000460 Result: Up-regulated in Transcription
  misc_feature: MA Experiment 20000460 PARAMETER Experiment Name: At_10percent_PEG_P Parameter: Age (day) Value: 12
  misc_feature: MA Experiment 20000460 PARAMETER Experiment Name: At_10percent_PEG_P Parameter: Organism Value: A. thaliana
  misc_feature: MA Experiment 20000460 PARAMETER Experiment Name: At_10percent_PEG_P Parameter: Plant Line Value: WS
  misc_feature: MA Experiment 20000460 PARAMETER Experiment Name: At_10percent_PEG_P Parameter: Timepoint (day) Value: 12
  misc_feature: MA Experiment 20000460 PARAMETER Experiment Name: At_10percent_PEG_P Parameter: Tissue Value: Whole Plant
  misc_feature: MA Experiment 20000460 PARAMETER Experiment Name: At_10percent_PEG_P Parameter: Treatment Value: 10percent PEG vs. No Treatment
  misc_feature: MA Experiment ID: 20000506 Result: Up-regulated in Transcription
  misc_feature: MA Experiment 20000506 PARAMETER Experiment Name: At_Wounding_P Parameter: Organism Value: A. thaliana
  misc_feature: MA Experiment 20000506 PARAMETER Experiment Name: At_Wounding_P Parameter: Plant Line Value: WS
  misc_feature: MA Experiment 20000506 PARAMETER Experiment Name: At_Wounding_P Parameter: Timepoint (hr) Value: 6
  misc_feature: MA Experiment 20000506 PARAMETER Experiment Name: At_Wounding_P Parameter: Tissue Value: Aerial
  misc_feature: MA Experiment 20000506 PARAMETER Experiment Name: At_Wounding_P Parameter: Treatment Value: Wounding vs. No Wounding
  misc_feature: MA Experiment ID: 20000527 Result: Down-regulated in Transcription
  misc_feature: MA Experiment 20000527 PARAMETER Experiment Name: At_10percent_PEG_P Parameter: Age (day) Value: 20
  misc_feature: MA Experiment 20000527 PARAMETER Experiment Name: At_10percent_PEG_P Parameter: Organism Value: A. thaliana
  misc_feature: MA Experiment 20000527 PARAMETER Experiment Name: At_10percent_PEG_P Parameter: Plant Line Value: WS
  misc_feature: MA Experiment 20000527 PARAMETER Experiment Name: At_10percent_PEG_P Parameter: Timepoint (day) Value: 20
  misc_feature: MA Experiment 20000527 PARAMETER Experiment Name: At_10percent_PEG_P Parameter: Tissue Value: Whole Plant
  misc_feature: MA Experiment 20000527 PARAMETER Experiment Name: At_10percent_PEG_P Parameter: Treatment Value: 10percent PEG vs. No Treatment
  misc_feature: MA Experiment ID: 20000574 Result: Up-regulated in Transcription
  misc_feature: MA Experiment 20000574 PARAMETER Experiment Name: At_100uM_ABA_Mutants__P Parameter: Organism Value: A. thaliana
  misc_feature: MA Experiment 20000574 PARAMETER Experiment Name: At_100uM_ABA_Mutants__P Parameter: Plant Line Value: CS23 vs. Ler wt
  misc_feature: MA Experiment 20000574 PARAMETER Experiment Name: At_100uM_ABA_Mutants__P Parameter: Timepoint (hr) Value: N/A
  misc_feature: MA Experiment 20000574 PARAMETER Experiment Name: At_100uM_ABA_Mutants__P Parameter: Tissue Value: Whole Plant
  misc_feature: MA Experiment 20000574 PARAMETER Experiment Name: At_100uM_ABA_Mutants__P Parameter: Treatment Value: None
  misc_feature: MA Experiment ID: 20000576 Result: Down-regulated in Transcription
  misc_feature: MA Experiment 20000576 PARAMETER Experiment Name: At_100uM_ABA_Mutants__P Parameter: Organism Value: A. thaliana
  misc_feature: MA Experiment 20000576 PARAMETER Experiment Name: At_100uM_ABA_Mutants__P Parameter: Plant Line Value: CS23
  misc_feature: MA Experiment 20000576 PARAMETER Experiment Name: At_100uM_ABA_Mutants__P Parameter: Timepoint (hr) Value: 6
  misc_feature: MA Experiment 20000576 PARAMETER Experiment Name: At_100uM_ABA_Mutants__P Parameter: Tissue Value: Whole Plant
  misc_feature: MA Experiment 20000576 PARAMETER Experiment Name: At_100uM_ABA_Mutants__P Parameter: Treatment Value: 1uM ABA vs. No Treatment
  misc_feature: MA Experiment ID: 20000709 Result: Up-regulated in Transcription
  misc_feature: MA Experiment 20000709 PARAMETER Experiment Name: At_15mM_NH4NO3_L-to-H_P Parameter: Age (hr) Value: 14
  misc_feature: MA Experiment 20000709 PARAMETER Experiment Name: At_15mM_NH4NO3_L-to-H_P Parameter: Organism Value: A. thaliana
  misc_feature: MA Experiment 20000709 PARAMETER Experiment Name: At_15mM_NH4NO3_L-to-H_P Parameter: Plant Line Value: WS
  misc_feature: MA Experiment 20000709 PARAMETER Experiment Name: At_15mM_NH4NO3_L-to-H_P Parameter: Timepoint (hr) Value: 4
  misc_feature: MA Experiment 20000709 PARAMETER Experiment Name: At_15mM_NH4NO3_L-to-H_P Parameter: Tissue Value: Aerial
  misc_feature: MA Experiment 20000709 PARAMETER Experiment Name: At_15mM_NH4NO3_L-to-H_P Parameter: Treatment Value: 15mM NH4NO3 vs. 30mM Mannitol
  misc_feature: MA Experiment ID: 20000794 Result: Down-regulated in Transcription
  misc_feature: MA Experiment 20000794 PARAMETER Experiment Name: At_Petals_P Parameter: Age (day) Value: 23-25 days
  misc_feature: MA Experiment 20000794 PARAMETER Experiment Name: At_Petals_P Parameter: Plant Line Value: WS
  misc_feature: MA Experiment 20000794 PARAMETER Experiment Name: At_Petals_P Parameter: Tissue Value: Petals vs. Whole plant
  misc_feature: MA Experiment ID: 20001247 Result: Up-regulated in Transcription
  misc_feature: MA Experiment 20001247 PARAMETER Experiment Name: At_Far-red-induction_P Parameter: Age (day) Value: 7
  misc_feature: MA Experiment 20001247 PARAMETER Experiment Name: At_Far-red-induction_P Parameter: Light Value: Far-red vs. White
  misc_feature: MA Experiment 20001247 PARAMETER Experiment Name: At_Far-red-induction_P Parameter: Organism Value: A. thaliana
  misc_feature: MA Experiment 20001247 PARAMETER Experiment Name: At_Far-red-induction_P Parameter: Plant Line Value: Columbia
  misc_feature: MA Experiment 20001247 PARAMETER Experiment Name: At_Far-red-induction_P Parameter: Timepoint (hr) Value: 1
  misc_feature: MA Experiment 20001247 PARAMETER Experiment Name: At_Far-red-induction_P Parameter: Tissue Value: Whole Plant
  misc_feature: MA Experiment ID: 20001557 Result: Up-regulated in Transcription
  misc_feature: MA Experiment 20001557 PARAMETER Experiment Name: At_Drought_Soil_Dry_P Parameter: Age (day) Value: 27
  misc_feature: MA Experiment 20001557 PARAMETER Experiment Name: At_Drought_Soil_Dry_P Parameter: Organism Value: A. thaliana
  misc_feature: MA Experiment 20001557 PARAMETER Experiment Name: At_Drought_Soil_Dry_P Parameter: Plant Line Value: WS
  misc_feature: MA Experiment 20001557 PARAMETER Experiment Name: At_Drought_Soil_Dry_P Parameter: Post Timepoint (hr) Value: 3
  misc_feature: MA Experiment 20001557 PARAMETER Experiment Name: At_Drought_Soil_Dry_P Parameter: Post-Treatment Value: Re-Water vs. No Drought
  misc_feature: MA Experiment 20001557 PARAMETER Experiment Name: At_Drought_Soil_Dry_P Parameter: Timepoint (day) Value: 13
  misc_feature: MA Experiment 20001557 PARAMETER Experiment Name: At_Drought_Soil_Dry_P Parameter: Treatment Value: Drought vs. No Drought
  misc_feature: MA Experiment ID: 20001558 Result: Up-regulated in Transcription
  misc_feature: MA Experiment 20001558 PARAMETER Experiment Name: At_Drought_Soil_Dry_P Parameter: Age (day) Value: 27
  misc_feature: MA Experiment 20001558 PARAMETER Experiment Name: At_Drought_Soil_Dry_P Parameter: Organism Value: A. thaliana
  misc_feature: MA Experiment 20001558 PARAMETER Experiment Name: At_Drought_Soil_Dry_P Parameter: Plant Line Value: WS
  misc_feature: MA Experiment 20001558 PARAMETER Experiment Name: At_Drought_Soil_Dry_P Parameter: Post Timepoint (hr) Value: 6
  misc_feature: MA Experiment 20001558 PARAMETER Experiment Name: At_Drought_Soil_Dry_P Parameter: Post-Treatment Value: Re-Water vs. No Drought
  misc_feature: MA Experiment 20001558 PARAMETER Experiment Name: At_Drought_Soil_Dry_P Parameter: Timepoint (day) Value: 13
  misc_feature: MA Experiment 20001558 PARAMETER Experiment Name: At_Drought_Soil_Dry_P Parameter: Treatment Value: Drought vs. No Drought
  misc_feature: MA Experiment ID: 20001560 Result: Up-regulated in Transcription
  misc_feature: MA Experiment 20001560 PARAMETER Experiment Name: At_Drought_Soil_Dry_P Parameter: Age (day) Value: 28
  misc_feature: MA Experiment 20001560 PARAMETER Experiment Name: At_Drought_Soil_Dry_P Parameter: Organism Value: A. thaliana
  misc_feature: MA Experiment 20001560 PARAMETER Experiment Name: At_Drought_Soil_Dry_P Parameter: Plant Line Value: WS
  misc_feature: MA Experiment 20001560 PARAMETER Experiment Name: At_Drought_Soil_Dry_P Parameter: Post Timepoint (hr) Value: None
  misc_feature: MA Experiment 20001560 PARAMETER Experiment Name: At_Drought_Soil_Dry_P Parameter: Post-Treatment Value: None
  misc_feature: MA Experiment 20001560 PARAMETER Experiment Name: At_Drought_Soil_Dry_P Parameter: Timepoint (day) Value: 14
  misc_feature: MA Experiment 20001560 PARAMETER Experiment Name: At_Drought_Soil_Dry_P Parameter: Treatment Value: Drought vs. No Drought
  misc_feature: MA Experiment ID: 20001772 Result: Down-regulated in Transcription
  misc_feature: MA Experiment 20001772 PARAMETER Experiment Name: At_Far-red-enriched-adult_P Parameter: Age (day) Value: 29
  misc_feature: MA Experiment 20001772 PARAMETER Experiment Name: At_Far-red-enriched-adult_P Parameter: Light Value: Far-red enriched vs. White
  misc_feature: MA Experiment 20001772 PARAMETER Experiment Name: At_Far-red-enriched-adult_P Parameter: Organism Value: A. thaliana
  misc_feature: MA Experiment 20001772 PARAMETER Experiment Name: At_Far-red-enriched-adult_P Parameter: Plant Line Value: Columbia
  misc_feature: MA Experiment 20001772 PARAMETER Experiment Name: At_Far-red-enriched-adult_P Parameter: Timepoint (hr) Value: 24
  misc_feature: MA Experiment 20001772 PARAMETER Experiment Name: At_Far-red-enriched-adult_P Parameter: Tissue Value: Aerial
  misc_feature: MA Experiment ID: 20001773 Result: Down-regulated in Transcription
  misc_feature: MA Experiment 20001773 PARAMETER Experiment Name: At_Far-red-enriched-adult_P Parameter: Age (day) Value: 30
  misc_feature: MA Experiment 20001773 PARAMETER Experiment Name: At_Far-red-enriched-adult_P Parameter: Light Value: Far-red enriched vs. White
  misc_feature: MA Experiment 20001773 PARAMETER Experiment Name: At_Far-red-enriched-adult_P Parameter: Organism Value: A. thaliana
  misc_feature: MA Experiment 20001773 PARAMETER Experiment Name: At_Far-red-enriched-adult_P Parameter: Plant Line Value: Columbia
  misc_feature: MA Experiment 20001773 PARAMETER Experiment Name: At_Far-red-enriched-adult_P Parameter: Timepoint (hr) Value: 48
  misc_feature: MA Experiment 20001773 PARAMETER Experiment Name: At_Far-red-enriched-adult_P Parameter: Tissue Value: Aerial
  misc_feature: MA Experiment ID: 20001904 Result: Up-regulated in Transcription
  misc_feature: MA Experiment 20001904 PARAMETER Experiment Name: At_Drought_Reproduction_P Parameter: Age (day) Value: 37
  misc_feature: MA Experiment 20001904 PARAMETER Experiment Name: At_Drought_Reproduction_P Parameter: Organism Value: A. thaliana
  misc_feature: MA Experiment 20001904 PARAMETER Experiment Name: At_Drought_Reproduction_P Parameter: Plant Line Value: WS
  misc_feature: MA Experiment 20001904 PARAMETER Experiment Name: At_Drought_Reproduction_P Parameter: Timepoint (day) Value: 7
  misc_feature: MA Experiment 20001904 PARAMETER Experiment Name: At_Drought_Reproduction_P Parameter: Tissue Value: Rosettes
  misc_feature: MA Experiment 20001904 PARAMETER Experiment Name: At_Drought_Reproduction_P Parameter: Treatment Value: Drought vs. No Drought
  misc_feature: MA Experiment ID: 20001911 Result: Up-regulated in Transcription
  misc_feature: MA Experiment 20001911 PARAMETER Experiment Name: At_Drought_Reproduction_P Parameter: Age (day) Value: 40
  misc_feature: MA Experiment 20001911 PARAMETER Experiment Name: At_Drought_Reproduction_P Parameter: Organism Value: A. thaliana
  misc_feature: MA Experiment 20001911 PARAMETER Experiment Name: At_Drought_Reproduction_P Parameter: Plant Line Value: WS
  misc_feature: MA Experiment 20001911 PARAMETER Experiment Name: At_Drought_Reproduction_P Parameter: Timepoint (day) Value: 10
  misc_feature: MA Experiment 20001911 PARAMETER Experiment Name: At_Drought_Reproduction_P Parameter: Tissue Value: Flowers
  misc_feature: MA Experiment 20001911 PARAMETER Experiment Name: At_Drought_Reproduction_P Parameter: Treatment Value: Drought vs. No Drought
caagaagaacacacgaataagaagaaaaagaagaagaagaagaagaagagaagcttatggcaggaggaggaacagaagcgtttcctgatcttggagagcattgccaagaccctgattgcaaattactcgattttctcccttttacttgcgacggctgcaaattggtgttttgtttggagcatagatcatacaagtcacataactgtccgaaatccgatcatgggagcagaacggtttccatctgtgaaacatgttcaatagcgattgaaacaactggttttgatgaaaaaggaatcaaatctttgcttgagaaacacgaaagatccggagattgtgatccaaacaagaaaaagaaaccaacgtgtcctgtaaaacgttgcaaagagattctgacttttgcgaataaccttacttgcaaatattgtggagtcaagttctgtttgaaacaccggtttccgacagatcatgtctgtaacaagaagatcattaataccgcgggaacaagctcgaggtggaacgagaggtttatggaagctttgagtttaagaaaccagaaagggtgtggaagagggagctctgtttcatcaaaatcttcaccatcagttagatcgttttagtttcttctcttgtaacaatagtttgcatcaaccaattccttctttatgttctcatgtattttccattgtttgcaagaaagaagatt

SEQ ID NO: 77756 - protein, 186 aa, Arabidopsis thaliana
  peptide (1)..(186): Ceres Seq. ID no. 12577460
  misc_feature (103)..(148): Pfam Name: AN1-like Zinc finger Pfam Description: AN1-like Zinc finger
  misc_feature (1)..(186): Homolog of NCBI NO: 15232930 NR Description: zinc finger protein (PMZ), putative; protein id:
  misc_feature (5)..(179): Homolog of NCBI NO: 30688811 NR Description: zinc finger protein (PMZ) -related [Arabidopsis >gi|17529076|gb|AAL38748.1| unknown protein [Arabidopsis >gi|20465575|gb|AAM20270.1| unknown protein [Arabidopsis
  misc_feature (5)..(180): Homolog of NCBI NO: 15230311 NR Description: putative protein; protein id: At3g57480.1
  misc_feature (5)..(139): Homolog of NCBI NO: 33146779 NR Description: putative arsenite inducible RNA associated
  misc_feature (9)..(174): Homolog of NCBI NO: 33416395 NR Description: Unknown (protein for MGC:66295) [Danio rerio]
  misc_feature (9)..(183): Homolog of NCBI NO: 21312112 NR Description: RIKEN cDNA 1110060O18 [Mus musculus]
  misc_feature (9)..(182): Homolog of NCBI NO: 15079311 NR Description: RIKEN cDNA 1110060O18 gene [Mus musculus]
  misc_feature (9)..(140): Homolog of NCBI NO: 34876869 NR Description: similar to RIKEN cDNA 1110060O18 [Rattus
  misc_feature (9)..(139): Homolog of NCBI NO: 34871288 NR Description: similar to arsenite inducible RNA associated
  misc_feature (9)..(140): Homolog of NCBI NO: 20270357 NR Description: hypothetical protein BC018415 [Homo sapiens]
MAGGGTEAFPDLGEHCQDPDCKLLDFLPFTCDGCKLVFCLEHRSYKSHNCPKSDHGSRTVSICETCSIAIETTGFDEKGIKSLLEKHERSGDCDPNKKKKPTCPVKRCKEILTFANNLTCKYCGVKFCLKHRFPTDHVCNKKIINTAGTSSRWNERFMEALSLRNQKGCGRGSSVSSKSSPSVRSF

SEQ ID NO: 77757 - DNA, 984 bp, Arabidopsis thaliana
  misc_feature (1)..(984): Ceres Seq. ID no. 12577478
  misc_feature: MA Experiment ID: 20000173 Result: Up-regulated in Transcription
  misc_feature: MA Experiment 20000173 PARAMETER Experiment Name: At_42deg_Heat_P Parameter: Age (day) Value: 14
  misc_feature: MA Experiment 20000173 PARAMETER Experiment Name: At_42deg_Heat_P Parameter: Organism Value: A. thaliana
  misc_feature: MA Experiment 20000173 PARAMETER Experiment Name: At_42deg_Heat_P Parameter: Plant Line Value: WS
  misc_feature: MA Experiment 20000173 PARAMETER Experiment Name: At_42deg_Heat_P Parameter: Temperature (deg C) Value: 42 vs. 22
  misc_feature: MA Experiment 20000173 PARAMETER Experiment Name: At_42deg_Heat_P Parameter: Timepoint (hr) Value: 6
  misc_feature: MA Experiment 20000173 PARAMETER Experiment Name: At_42deg_Heat_P Parameter: Tissue Value: Aerial
  misc_feature: MA Experiment ID: 20001450 Result: Up-regulated in Transcription
  misc_feature: MA Experiment 20001450 PARAMETER Experiment Name: At_Far-red-induction_P Parameter: Age (day) Value: 7
  misc_feature: MA Experiment 20001450 PARAMETER Experiment Name: At_Far-red-induction_P Parameter: Light Value: Far-red vs. White
  misc_feature: MA Experiment 20001450 PARAMETER Experiment Name: At_Far-red-induction_P Parameter: Organism Value: A. thaliana
  misc_feature: MA Experiment 20001450 PARAMETER Experiment Name: At_Far-red-induction_P Parameter: Plant Line Value: Columbia
  misc_feature: MA Experiment 20001450 PARAMETER Experiment Name: At_Far-red-induction_P Parameter: Timepoint (hr) Value: 8
  misc_feature: MA Experiment 20001450 PARAMETER Experiment Name: At_Far-red-induction_P Parameter: Tissue Value: Whole Plant
  misc_feature: MA Experiment ID: 20001451 Result: Up-regulated in Transcription
  misc_feature: MA Experiment 20001451 PARAMETER Experiment Name: At_Far-red-induction_P Parameter: Age (day) Value: 7
  misc_feature: MA Experiment 20001451 PARAMETER Experiment Name: At_Far-red-induction_P Parameter: Light Value: Far-red vs. White
  misc_feature: MA Experiment 20001451 PARAMETER Experiment Name: At_Far-red-induction_P Parameter: Organism Value: A. thaliana
  misc_feature: MA Experiment 20001451 PARAMETER Experiment Name: At_Far-red-induction_P Parameter: Plant Line Value: Columbia
  misc_feature: MA Experiment 20001451 PARAMETER Experiment Name: At_Far-red-induction_P Parameter: Timepoint (hr) Value: 24
  misc_feature: MA Experiment 20001451 PARAMETER Experiment Name: At_Far-red-induction_P Parameter: Tissue Value: Whole Plant
gaaatctattgtctatctcctcaatttggattggattttctgcatatcatcgctctagctttcgcgggttttggattcgattccttacccttctccaatcgaagtttttggctttgaattggatttgggtttcgttccaaaatcagctctttttgttaatcagggtttcatctgtgtgggtcttgttttgaagcaatttgtgtgtgtttggatgaaagtagcagatatgcaggaccagctggtgtgtcatggttgtaggaatttattgatgtatcctagaggagcatctaatgtgcgttgtgcgttatgtaacactatcaacatggttcctcctcctcctccacctcacgacatggcacacattatatgtggtggttgtagaacaatgcttatgtatacgcgtggggctagtagcgtaagatgctcttgctgtcaaactacgaaccttgtgccagcgcactccaatcaggttgcccatgctccttccagtcaggttgcgcagatcaattgtgggcattgtcggacgaccctcatgtatccttacggtgcatcatccgtcaaatgcgctgtttgtcaattcgtaactaacgttaatatgagcaatggaagggtacctctcccaactaaccggccaaatggaacagcttgtcccccctctacatcaacttcaacaccaccctctcagacccaaaccgttgttgtagaaaaccccatgtccgttgatgaaagcggaaagttggtgagcaatgttgttgttggagtgacaactgacaaaaagtaatcaagaatgagtgagatcttaaagatcaaatccaaattcttcctctattcctgcgtttggtttgtgcatattacatacgcggaaaaactgtatgttatatatctcttgactcctttttaacccaagagaaaaagcttatcagaatctcttgttactgcattattggggtttattcaaagttgaagacacaaggtttttgctcg

SEQ ID NO: 77758 - protein, 189 aa, Arabidopsis thaliana
  peptide (1)..(189): Ceres Seq. ID no. 12577479
  misc_feature (1)..(189): Homolog of NCBI NO: 30685085 NR Description: zinc-finger protein Lsd1 [Arabidopsis thaliana]
  misc_feature (6)..(189): Homolog of NCBI NO: 30685083 NR Description: zinc-finger protein Lsd1 [Arabidopsis thaliana]
  misc_feature (6)..(189): Homolog of NCBI NO: 17981378 NR Description: zinc finger protein LSD1 [Brassica oleracea]
  misc_feature (6)..(189): Homolog of NCBI NO: 17981380 NR Description: zinc finger protein LSD2 [Brassica oleracea]
  misc_feature (7)..(139): Homolog of NCBI NO: 34905200 NR Description: P0672D01.2 [Oryza sativa (japonica
  misc_feature (7)..(131): Homolog of NCBI NO: 30692719 NR Description: zinc-finger protein -related [Arabidopsis
  misc_feature (7)..(130): Homolog of NCBI NO: 18398482 NR Description: zinc-finger protein, putative; protein id: supported by cDNA: gi_16323142 [Arabidopsis thaliana]
  misc_feature (6)..(139): Homolog of NCBI NO: 29467531 NR Description: P0582D05.23 [Oryza sativa (japonica
  misc_feature (7)..(79): Homolog of NCBI NO: 25403154 NR Description: probable zinc-finger protein, 7043-7771
  misc_feature (22)..(144): Homolog of NCBI NO: 34912604 NR Description: P0046B10.19 [Oryza sativa (japonica
MKVADMQDQLVCHGCRNLLMYPRGASNVRCALCNTINMVPPPPPPHDMAHIICGGCRTMLMYTRGASSVRCSCCQTTNLVPAHSNQVAHAPSSQVAQINCGHCRTTLMYPYGASSVKCAVCQFVTNVNMSNGRVPLPTNRPNGTACPPSTSTSTPPSQTQTVVVENPMSVDESGKLVSNVVVGVTTDKK

SEQ ID NO: 77759 - protein, 184 aa, Arabidopsis thaliana; identical to SEQ ID NO: 24508
  peptide (1)..(184): Ceres Seq. ID no. 12577480
  misc_feature (1)..(184): Homolog of NCBI NO: 30685085 NR Description: zinc-finger protein Lsd1 [Arabidopsis thaliana]
  misc_feature (1)..(184): Homolog of NCBI NO: 30685083 NR Description: zinc-finger protein Lsd1 [Arabidopsis thaliana]
  misc_feature (1)..(184): Homolog of NCBI NO: 17981378 NR Description: zinc finger protein LSD1 [Brassica oleracea]
  misc_feature (1)..(184): Homolog of NCBI NO: 17981380 NR Description: zinc finger protein LSD2 [Brassica oleracea]
  misc_feature (2)..(134): Homolog of NCBI NO: 34905200 NR Description: P0672D01.2 [Oryza sativa (japonica
  misc_feature (2)..(126): Homolog of NCBI NO: 30692719 NR Description: zinc-finger protein -related [Arabidopsis
  misc_feature (2)..(125): Homolog of NCBI NO: 18398482 NR Description: zinc-finger protein, putative; protein id: supported by cDNA: gi_16323142 [Arabidopsis thaliana]
  misc_feature (1)..(134): Homolog of NCBI NO: 29467531 NR Description: P0582D05.23 [Oryza sativa (japonica
  misc_feature (2)..(74): Homolog of NCBI NO: 25403154 NR Description: probable zinc-finger protein, 7043-7771
  misc_feature (17)..(139): Homolog of NCBI NO: 34912604 NR Description: P0046B10.19 [Oryza sativa (japonica

SEQ ID NO: 77760 - protein, 170 aa, Arabidopsis thaliana; identical to SEQ ID NO: 24509
  peptide (1)..(170): Ceres Seq. ID no. 12577481
  misc_feature (1)..(170): Homolog of NCBI NO: 30685085 NR Description: zinc-finger protein Lsd1 [Arabidopsis thaliana]
  misc_feature (1)..(170): Homolog of NCBI NO: 30685083 NR Description: zinc-finger protein Lsd1 [Arabidopsis thaliana]
  misc_feature (1)..(170): Homolog of NCBI NO: 17981378 NR Description: zinc finger protein LSD1 [Brassica oleracea]
  misc_feature (1)..(170): Homolog of NCBI NO: 17981380 NR Description: zinc finger protein LSD2 [Brassica oleracea]
  misc_feature (1)..(120): Homolog of NCBI NO: 34905200 NR Description: P0672D01.2 [Oryza sativa (japonica
  misc_feature (1)..(112): Homolog of NCBI NO: 30692719 NR Description: zinc-finger protein -related [Arabidopsis
  misc_feature (1)..(111): Homolog of NCBI NO: 18398482 NR Description: zinc-finger protein, putative; protein id: supported by cDNA: gi_16323142 [Arabidopsis thaliana]
  misc_feature (1)..(120): Homolog of NCBI NO: 29467531 NR Description: P0582D05.23 [Oryza sativa (japonica
  misc_feature (1)..(60): Homolog of NCBI NO: 25403154 NR Description: probable zinc-finger protein, 7043-7771
  misc_feature (3)..(125): Homolog of NCBI NO: 34912604 NR Description: P0046B10.19 [Oryza sativa (japonica

SEQ ID NO: 77761 - DNA, 1350 bp, Arabidopsis thaliana
  misc_feature (1)..(1350): Ceres Seq. ID no. 12577482
  misc_feature: MA Experiment ID: 20000348 Result: Down-regulated in Transcription
  misc_feature: MA Experiment 20000348 PARAMETER Experiment Name: At_100uM_ABA_Sub_P Parameter: Age (day) Value: 14
  misc_feature: MA Experiment 20000348 PARAMETER Experiment Name: At_100uM_ABA_Sub_P Parameter: Organism Value: A. thaliana
  misc_feature: MA Experiment 20000348 PARAMETER Experiment Name: At_100uM_ABA_Sub_P Parameter: Plant Line Value: WS
  misc_feature: MA Experiment 20000348 PARAMETER Experiment Name: At_100uM_ABA_Sub_P Parameter: Timepoint (hr) Value: 1
  misc_feature: MA Experiment 20000348 PARAMETER Experiment Name: At_100uM_ABA_Sub_P Parameter: Tissue Value: Aerial
  misc_feature: MA Experiment 20000348 PARAMETER Experiment Name: At_100uM_ABA_Sub_P Parameter: Treatment Value: 100uM ABA vs. No Treatment
  misc_feature: MA Experiment ID: 20000355 Result: Down-regulated in Transcription
  misc_feature: MA Experiment 20000355 PARAMETER Experiment Name: At_Siliques_Sub_P Parameter: Age (day) Value: 21
  misc_feature: MA Experiment 20000355 PARAMETER Experiment Name: At_Siliques_Sub_P Parameter: Organism Value: A. thaliana
  misc_feature: MA Experiment 20000355 PARAMETER Experiment Name: At_Siliques_Sub_P Parameter: Plant Line Value: WS
  misc_feature: MA Experiment 20000355 PARAMETER Experiment Name: At_Siliques_Sub_P Parameter: Tissue Value: Less Than 5mm Siliques vs. Whole Plant
  misc_feature: MA Experiment ID: 20000440 Result: Down-regulated in Transcription
  misc_feature: MA Experiment 20000440 PARAMETER Experiment Name: At_Closed-Flower__Sub_P Parameter: Tissue Value: Closed Flower vs. Whole Plant
  misc_feature: MA Experiment ID: 20001806 Result: Up-regulated in Transcription
  misc_feature: MA Experiment 20001806 PARAMETER Experiment Name: At_50mM_NH4NO3_L-to-H_Sub_P Parameter: Timepoint (hr) Value: 4
  misc_feature: MA Experiment 20001806 PARAMETER Experiment Name: At_50mM_NH4NO3_L-to-H_Sub_P Parameter: Tissue Value: Leaf
  misc_feature: MA Experiment 20001806 PARAMETER Experiment Name: At_50mM_NH4NO3_L-to-H_Sub_P Parameter: Treatment Value: 50mM NH4NO3 vs 100mM Mannitol
  misc_feature: MA Experiment ID: 20001807 Result: Up-regulated in Transcription
  misc_feature: MA Experiment 20001807 PARAMETER Experiment Name: At_50mM_NH4NO3_L-to-H_Sub_P Parameter: Timepoint (hr) Value: 6
  misc_feature: MA Experiment 20001807 PARAMETER Experiment Name: At_50mM_NH4NO3_L-to-H_Sub_P Parameter: Tissue Value: Leaf
  misc_feature: MA Experiment 20001807 PARAMETER Experiment Name: At_50mM_NH4NO3_L-to-H_Sub_P Parameter: Treatment Value: 50mM NH4NO3 vs 100mM Mannitol
tcatcaatctcaagcgccggtggaatcggcggtggaggtttatatgttccgataatgacaatcgtggccggtctcgatctaaagacagcttcaagcttctcagcttttatggttactggtggatctatagctaacgtgggatgcaatctattcgttagaaaccctaaatctggtggcaaaaccctaatcgacttcgatttagctcttttattggaaccatgtatgcttcttggagttagtattggtgtgatctgtaatcttgtttttccgaactggttgattacgagtctcttcgctgtgtttcttgcgtggtcgacgttgaagacttttggaaatggactttattattggagattggaatcggagatggtgaagattagagaatcgaatagaattgaagaagatgatgaagaagataagattgagagtctaaagttgcctctcttggaggattatcagagaccaaagaggtttccatggattaagcttggagttttggtcattatttggctttcttacttcgcagtttatcttcttcgaggaaacaaatatggcgagggaatcatatcgatcgagccatgtggaaacgcctactggctcatttcatcgtctcaaataccactaactctcttcttcactctctggatctgcttcagtgacaatgttcaaagccaacaacaatcagattaccatgtctcagtaaaggatgtagaagatttgagatcaaatgatggagcaagatcaaacaagtgtatgttccctgtaatggctctattagctggagttttgggtggtgtttttggtattggaggtggaatgctcattagtcctcttcttctccaagttggtatcgctcccgaggtaactgcagcgacatgttctttcatggttcttttttcatcaacgatgtctgcgattcaatacttattactaggcatggaacataccggaaccgcaagtatatttgcggttatatgttttgtggcatcactcgtgggactaaaggtggttcaaaaggtaataaccgagtatggaagggcttcgatcattgtgttctcggttggtatcgtcatggcattgagtattgtgttgatgacaagctatggagctcttgatgtttggaatgattatgtctctggtcgttacatgggtttcaagttaccttgttgagaccaagtttcataatacatgtgtatatcatatcaccatgttgttgctctttcatccatttggtcatttagagttaacaagctttctatttctttcttttgtatgatttttaaatcactattcagaatgcacatctcgtgcattcgaatatatggtcaaataaaagttatgttctggacc

SEQ ID NO: 77762 - protein, 389 aa, Arabidopsis thaliana
  peptide (1)..(389): Ceres Seq. ID no. 12577483
  misc_feature (1)..(389): Homolog of NCBI NO: 11358507 NR Description: membrane protein [imported] - Arabidopsis (fragment) >gi|4079632|emb|CAA10487.1| hypothetical protein
  misc_feature (1)..(389): Homolog of NCBI NO: 15220600 NR Description: unknown protein; protein id: At1g61740.1, by cDNA: gi_13272464 [Arabidopsis thaliana]
  misc_feature (1)..(389): Homolog of NCBI NO: 6554197 NR Description: T23J18.20 [Arabidopsis thaliana]
  misc_feature (1)..(389): Homolog of NCBI NO: 15220419 NR Description: hypothetical protein; protein id: At1g11540.1
  misc_feature (3)..(349): Homolog of NCBI NO: 15233579 NR Description: hypothetical protein; protein id: At4g21250.1
  misc_feature (1)..(389): Homolog of NCBI NO: 34908754 NR Description: P0415A04.10 [Oryza sativa (japonica
  misc_feature (1)..(371): Homolog of NCBI NO: 34908752 NR Description: P0415A04.9 [Oryza sativa (japonica
  misc_feature (260)..(389): Homolog of NCBI NO: 15233581 NR Description: hypothetical protein; protein id: At4g21260.1
  misc_feature (18)..(131): Homolog of NCBI NO: 15233581 NR Description: hypothetical protein; protein id: At4g21260.1
  misc_feature (1)..(389): Homolog of NCBI NO: 40253412 NR Description: membrane protein-like [Oryza sativa (japonica
SSISSAGGIGGGGLYVPIMTIVAGLDLKTASSFSAFMVTGGSIANVGCNLFVRNPKSGGKTLIDFDLALLLEPCMLLGVSIGVICNLVFPNWLITSLFAVFLAWSTLKTFGNGLYYWRLESEMVKIRESNRIEEDDEEDKIESLKLPLLEDYQRPKRFPWIKLGVLVIIWLSYFAVYLLRGNKYGEGIISIEPCGNAYWLISSSQIPLTLFFTLWICFSDNVQSQQQSDYHVSVKDVEDLRSNDGARSNKCMFPVMALLAGVLGGVFGIGGGMLISPLLLQVGIAPEVTAATCSFMVLFSSTMSAIQYLLLGMEHTGTASIFAVICFVASLVGLKVVQKVITEYGRASIIVFSVGIVMALSIVLMTSYGALDVWNDYVSGRYMGFKLPC

SEQ ID NO: 77763 - protein, 371 aa, Arabidopsis thaliana
  peptide (1)..(371): Ceres Seq. ID no. 12577484
  misc_feature (1)..(371): Homolog of NCBI NO: 11358507 NR Description: membrane protein [imported] - Arabidopsis (fragment) >gi|4079632|emb|CAA10487.1| hypothetical protein
  misc_feature (1)..(371): Homolog of NCBI NO: 15220600 NR Description: unknown protein; protein id: At1g61740.1, by cDNA: gi_13272464 [Arabidopsis thaliana]
  misc_feature (1)..(371): Homolog of NCBI NO: 6554197 NR Description: T23J18.20 [Arabidopsis thaliana]
  misc_feature (1)..(371): Homolog of NCBI NO: 15220419 NR Description: hypothetical protein; protein id: At1g11540.1
  misc_feature (1)..(331): Homolog of NCBI NO: 15233579 NR Description: hypothetical protein; protein id: At4g21250.1
  misc_feature (1)..(371): Homolog of NCBI NO: 34908754 NR Description: P0415A04.10 [Oryza sativa (japonica
  misc_feature (1)..(353): Homolog of NCBI NO: 34908752 NR Description: P0415A04.9 [Oryza sativa (japonica
  misc_feature (242)..(371): Homolog of NCBI NO: 15233581 NR Description: hypothetical protein; protein id: At4g21260.1
  misc_feature (1)..(113): Homolog of NCBI NO: 15233581 NR Description: hypothetical protein; protein id: At4g21260.1
  misc_feature (1)..(371): Homolog of NCBI NO: 40253412 NR Description: membrane protein-like [Oryza sativa (japonica
MTIVAGLDLKTASSFSAFMVTGGSIANVGCNLFVRNPKSGGKTLIDFDLALLLEPCMLLGVSIGVICNLVFPNWLITSLFAVFLAWSTLKTFGNGLYYWRLESEMVKIRESNRIEEDDEEDKIESLKLPLLEDYQRPKRFPWIKLGVLVIIWLSYFAVYLLRGNKYGEGIISIEPCGNAYWLISSSQIPLTLFFTLWICFSDNVQSQQQSDYHVSVKDVEDLRSNDGARSNKCMFPVMALLAGVLGGVFGIGGGMLISPLLLQVGIAPEVTAATCSFMVLFSSTMSAIQYLLLGMEHTGTASIFAVICFVASLVGLKVVQKVITEYGRASIIVFSVGIVMALSIVLMTSYGALDVWNDYVSGRYMGFKLPC

SEQ ID NO: 77764 - protein, 353 aa, Arabidopsis thaliana
  peptide (1)..(353): Ceres Seq. ID no. 12577485
  misc_feature (1)..(353): Homolog of NCBI NO: 11358507 NR Description: membrane protein [imported] - Arabidopsis (fragment) >gi|4079632|emb|CAA10487.1| hypothetical protein
  misc_feature (1)..(353): Homolog of NCBI NO: 15220600 NR Description: unknown protein; protein id: At1g61740.1, by cDNA: gi_13272464 [Arabidopsis thaliana]
  misc_feature (1)..(353): Homolog of NCBI NO: 6554197 NR Description: T23J18.20 [Arabidopsis thaliana]
  misc_feature (1)..(353): Homolog of NCBI NO: 15220419 NR Description: hypothetical protein; protein id: At1g11540.1
  misc_feature (1)..(313): Homolog of NCBI NO: 15233579 NR Description: hypothetical protein; protein id: At4g21250.1
  misc_feature (1)..(353): Homolog of NCBI NO: 34908754 NR Description: P0415A04.10 [Oryza sativa (japonica
  misc_feature (1)..(335): Homolog of NCBI NO: 34908752 NR Description: P0415A04.9 [Oryza sativa (japonica
  misc_feature (224)..(353): Homolog of NCBI NO: 15233581 NR Description: hypothetical protein; protein id: At4g21260.1
  misc_feature (1)..(95): Homolog of NCBI NO: 15233581 NR Description: hypothetical protein; protein id: At4g21260.1
  misc_feature (1)..(353): Homolog of NCBI NO: 40253412 NR Description: membrane protein-like [Oryza sativa (japonica
MVTGGSIANVGCNLFVRNPKSGGKTLIDFDLALLLEPCMLLGVSIGVICNLVFPNWLITSLFAVFLAWSTLKTFGNGLYYWRLESEMVKIRESNRIEEDDEEDKIESLKLPLLEDYQRPKRFPWIKLGVLVIIWLSYFAVYLLRGNKYGEGIISIEPCGNAYWLISSSQIPLTLFFTLWICFSDNVQSQQQSDYHVSVKDVEDLRSNDGARSNKCMFPVMALLAGVLGGVFGIGGGMLISPLLLQVGIAPEVTAATCSFMVLFSSTMSAIQYLLLGMEHTGTASIFAVICFVASLVGLKVVQKVITEYGRASIIVFSVGIVMALSIVLMTSYGALDVWNDYVSGRYMGFKLPC

SEQ ID NO: 77765 - DNA, 4003 bp, Arabidopsis thaliana
  misc_feature (1)..(4003): Ceres Seq. ID no. 12577509
  misc_feature: MA Experiment ID: 20000180 Result: Up-regulated in Transcription
  misc_feature: MA Experiment 20000180 PARAMETER Experiment Name: At_Germinating_Seeds_P Parameter: Age (hr) Value: 24 vs. 0
  misc_feature: MA Experiment 20000180 PARAMETER Experiment Name: At_Germinating_Seeds_P Parameter: Tissue Value: Germinating Seeds
  misc_feature: MA Experiment ID: 20000185 Result: Up-regulated in Transcription
  misc_feature: MA Experiment 20000185 PARAMETER Experiment Name: At_Roots__P Parameter: Age (day) Value: 7 vs. 21
  misc_feature: MA Experiment 20000185 PARAMETER Experiment Name: At_Roots__P Parameter: Organism Value: A. thaliana
  misc_feature: MA Experiment 20000185 PARAMETER Experiment Name: At_Roots__P Parameter: Tissue Value: Roots vs. Whole Plant
  misc_feature: MA Experiment ID: 20000227 Result: Up-regulated in Transcription
  misc_feature: MA Experiment 20000227 PARAMETER Experiment Name: At_Root-Tips-vs-Tops_P Parameter: Tissue Value: Root Tips vs. Root Tops
  misc_feature: MA Experiment ID: 20000234 Result: Up-regulated in Transcription
  misc_feature: MA Experiment 20000234 PARAMETER Experiment Name: At_Siliques_P Parameter: Age (day) Value: 21
  misc_feature: MA Experiment 20000234 PARAMETER Experiment Name: At_Siliques_P Parameter: Organism Value: A. thaliana
  misc_feature: MA Experiment 20000234 PARAMETER Experiment Name: At_Siliques_P Parameter: Plant Line Value: WS
  misc_feature: MA Experiment 20000234 PARAMETER Experiment Name: At_Siliques_P Parameter: Tissue Value: Less Than 5mm Siliques vs. Whole Plant
  misc_feature: MA Experiment ID: 20000264 Result: Up-regulated in Transcription
  misc_feature: MA Experiment 20000264 PARAMETER Experiment Name: At_Open_Flower_P Parameter: Age (day) Value: 21
  misc_feature: MA Experiment 20000264 PARAMETER Experiment Name: At_Open_Flower_P Parameter: Plant Line Value: WS
  misc_feature: MA Experiment 20000264 PARAMETER Experiment Name: At_Open_Flower_P Parameter: Tissue Value: Open Flower vs. Whole Plant
  misc_feature: MA Experiment ID: 20000265 Result: Up-regulated in Transcription
  misc_feature: MA Experiment 20000265 PARAMETER Experiment Name: At_Open_Flower_P Parameter: Age (day) Value: 21
  misc_feature: MA Experiment 20000265 PARAMETER Experiment Name: At_Open_Flower_P Parameter: Plant Line Value: WS
  misc_feature: MA Experiment 20000265 PARAMETER Experiment Name: At_Open_Flower_P Parameter: Tissue Value: Closed Flower vs. Whole Plant
  misc_feature: MA Experiment ID: 20000286 Result: Up-regulated in Transcription
  misc_feature: MA Experiment 20000286 PARAMETER Experiment Name: At_Open_Flower_P Parameter: Age (day) Value: 21
  misc_feature: MA Experiment 20000286 PARAMETER Experiment Name: At_Open_Flower_P Parameter: Plant Line Value: WS
  misc_feature: MA Experiment 20000286 PARAMETER Experiment Name: At_Open_Flower_P Parameter: Tissue Value: Half Open vs. Whole Plant
  misc_feature: MA Experiment ID: 20000439 Result: Up-regulated in Transcription
  misc_feature: MA Experiment 20000439 PARAMETER Experiment Name: At_Roots__P Parameter: Age (day) Value: 14 vs. 21
  misc_feature: MA Experiment 20000439 PARAMETER Experiment Name: At_Roots__P Parameter: Organism Value: A. thaliana
  misc_feature: MA Experiment 20000439 PARAMETER Experiment Name: At_Roots__P Parameter: Tissue Value: Roots vs. Whole Plant
  misc_feature: MA Experiment ID: 20000495 Result: Up-regulated in Transcription
  misc_feature: MA Experiment 20000495 PARAMETER Experiment Name: At_Guard_Cells_P Parameter: Harvest Date Value: 8/2/2002
  misc_feature: MA Experiment 20000495 PARAMETER Experiment Name: At_Guard_Cells_P Parameter: Organism Value: A. thaliana
  misc_feature: MA Experiment 20000495 PARAMETER Experiment Name: At_Guard_Cells_P Parameter: Tissue Value: Guard Cells vs. Leaves
  misc_feature: MA Experiment ID: 20000794 Result: Up-regulated in Transcription
  misc_feature: MA Experiment 20000794 PARAMETER Experiment Name: At_Petals_P Parameter: Age (day) Value: 23-25 days
  misc_feature: MA Experiment 20000794 PARAMETER Experiment Name: At_Petals_P Parameter: Plant Line Value: WS
  misc_feature: MA Experiment 20000794 PARAMETER Experiment Name: At_Petals_P Parameter: Tissue Value: Petals vs. Whole plant
gggcaaatttgttcatcagatctactacaatctctctttttcttcgggtatggagggccaacgaggcagtaattcttcgttgagctctggcaatggcaccgaagtcgccaccgacgtttcttcttgcttctatgttcccaatccctctggaaccgatttcgatgccgagtcgtcttctcttcctcctctctccccagctcctcaagtggcattgtcaattcctgcggagcttgccgccgccattcccctcatcgatcgcttccaggttgaagcttttctgcggctaatgcagaaacaaatccagtctgctgggaagcgtggcttcttctattccaaaaagtcctctggctccaatgtccgcgagcgcttcacatttgaggatatgctttgctttcaaaagcttcaggatccaatccccacatctctcctcaagattaacagcgatctcgtcagccgtgctaccaagttgtttcatctcatcttaaaatatatgggtgttgattcatctgatcgatctacgcctcccagtttagatgaacgcattgacctcgttggaaagctcttcaaaaaaactttgaagcgtgttgaactcagggacgaactttttgcccaaatctccaaacagactagacataatcctgacaggcaatacttgatcaaagcttgggaattgatgtacttatgtgcctcctctatgcctcctagcaaagatatcggtggatatctatctgagtatattcataatgtcgcacacgatgcaactattgaaccggatgctcaggttcttgctgttaacactttgaaagctttaaagcgctctatcaaagctggtcctaggcacaccacacctggtcgtgaagaaattgaagcccttttgaccggtagaaagctcacaaccattgtcttctttctcgatgaaacttttgaagaaatttcatatgacatggctaccacagtgtctgatgctgttgagctagctggaacaattaaactatcagctttctctagctttagtttgtttgaatgtcgtaaagttgtttcaagttctaaatcatctgatcccggaaatgaggaatatataggattggatgataacaagtatattggagatctcctcgcagaatttaaagctattaaagatcgaaataaaggagagatactacactgcaaactggtatttaaaaaaaaattattccgagagtctgatgaagctgtaacagatctgatgtttgtgcaactttcgtatgttcaactgcaacatgactatttgctaggaaactatcctgttgggagggacgatgctgcacagctttgtgccttgcaaattcttgttgggattgggtttgtcaatagtccagagtcatgcattgattggacatcacttcttgagcggtttttgccaagacaaatagcaataacccgagcaaagcgtgaatgggaattggatatccttgctcgctaccgttcaatggagaacgtgaccaaagatgatgcaagacaacaatttctacggatactgaaggcactgccatacgggaattcagttttttttagcgtacgcaagatagatgatccgatcggtcttttacctgggcgaatcattttgggtatcaacaaacgtggggttcacttttttcgaccggttcctaaagaatatctgcactctgctgaactacgtgacatcatgcaatttggcagcagtaacactgctgtctttttcaaaatgagagtcgctggtgttcttcacatatttcagttcgagacaaaacagggagaagaaatttgtgttgctttgcaaacacatataaatgatgtcatgttgcgtcgttactccaaagctcgatctgctgccaatagcttggttaatggagatatatcttgtagttctaagccgcaaaattttgaagtgtatgaaaaacgtttgcaagatttgtctaaggcttatgaagagtcccaaaagaagattgagaagttgatggatgaacaacaagagaaaaatcagcaagaagttactctgcgtgaagagttagaagctatacacaatggtttggagcttgaaaggagaaaattgttggaggttactttagaccgagataaacttaggtcattgtgtgacgagaagggaacaactattcaatccttgatgtctgaactgcgaggaatggaagcaaggttggcaaagtcgggcaacacaaaatcaagtaaagagacaaaatcagaattagccgaaatgaataatcagatattatacaagatccaaaaggagttagaagttcgaaataaggaattgcatgtcgcagttgataattcaaagaggttgttgagtgaaaacaagatattggagcaaaatctcaatattgaaaagaagaaaaaagaggaggttgaaattcatcaaaagagatatgaacaagaaaaaaaggtgttaaagcttcgagtttctgaacttgaaaataagcttgaagtacttgctcaagacttggatagtgctgagtctacgattgaaagtaagaattctgacatgctgctgttgcaaaataacttgaaagaacttgaggagttaagagaaatgaaagaggacattgacagaaaaaatgagcaaacagctgccattttgaaaatgcaaggagcccaacttgctgagctagaaatactttataaggaagaacaagttttaaggaaaagatactataataccatagaagatatgaaagggaagattagagtttattgtcgaataagacctctaaatgaaaaagagagttcagagagggaaaaacaaatgctgacaactgtggatgagtttactgttgaacatccatggaaagacgacaaaagaaagcaacacatatatgatcgcgtatttgacatgcgtgctagtcaagatgatatctttgaagacacaaagtatttggtacagtcggctgtagatgggtataacgtttgcatctttgcatatggtcaaactggttctggaaaaactttcactatatatgggcatgagagcaatcctggactcacacctcgagctacaaaggaactgttcaacatattaaagcgagatagcaagagattttcattttctctaaaggcatatatggtggaactttatcaagacacacttgtagaccttttgttaccaaaaagtgcaagacgcttgaaactagagattaaaaaagattcaaagggaatggtctttgtagagaatgtgacaactattcctatatcaactttggaggaactgcgaatgattcttgaacggggatcggaacgacgacatgtttctggaacaaatatgaatgaagaaagctcaagatctcacctcatattatcagttgttattgaaagtattgatcttcaaacccagtctgctgcgaggggcaagctgagttttgtggatcttgctggttctgagagagttaaaaagtcgggctcagctggttgtcaactcaaagaagctcaaagtatcaacaaatcactttctgcattaggtgatgttattggtgctttatcttctggcaaccagcatattccttataggaatcacaagctaacgatgttgatgagcgattcattgggcggcaatgccaagacgttaatgtttgttaatgtgtctccagccgaatcaaatttggacgagacgtacaattctcttctatatgcatcgagagtgagaacgatcgtgaatgatcccagcaaacatatatcatccaaagagatggtgcgattgaagaagttggtagcatactggaaagagcaagccggtaaaaaaggtgaggaagaagacttggtggatattgaggaagatcgtacacgaaaagatgaggcagatagttgaagaaagctgacatgaaattcgtctaggtgaaattgagactatagtatcactggttttcaccattctttttgtaggaagttcctgctttatagtagagtttctatcgaagagtagtcctatatgtctcaaactttctctcttttgatgagatcttcattacaagaaatg

SEQ ID NO: 77766 - protein, 1277 aa, Arabidopsis thaliana
  peptide (1)..(1277): Ceres Seq. ID no. 12577510
  misc_feature (329)..(516): Pfam Name: FERM domain (Band 4.1 family) Pfam Description: FERM domain (Band 4.1 family)
  misc_feature (648)..(1262): Homolog of NCBI NO: 6166459 NR Description: kinesin-C [Strongylocentrotus purpuratus]
  misc_feature (627)..(1230): Homolog of NCBI NO: 19923321 NR Description: kinesin family member C3 [Homo sapiens]
  misc_feature (611)..(1226): Homolog of NCBI NO: 1762638 NR Description: microtubule-based motor protein
  misc_feature (644)..(1239): Homolog of NCBI NO: 18416938 NR Description: kinesin-like protein B (katB); protein id:
  misc_feature (644)..(1239): Homolog of NCBI NO: 7446304 NR Description: kinesin-related protein katB - Arabidopsis
  misc_feature (725)..(1267): Homolog of NCBI NO: 15218418 NR Description: kinesin-related protein; protein id: At1g72250.1
  misc_feature (621)..(1239): Homolog of NCBI NO: 10176794 NR Description: kinesin-like protein [Arabidopsis thaliana]
  misc_feature (638)..(1223): Homolog of NCBI NO: 19114370 NR Description: kinesin-like protein [Schizosaccharomyces pombe]
  misc_feature (740)..(1230): Homolog of NCBI NO: 14124976 NR Description: Similar to kinesin family member C3 [Homo sapiens]
  misc_feature (868)..(1226): Homolog of NCBI NO: 11245496 NR Description: C-terminal kinesin KIFC1 [Trypanosoma brucei]
GKFVHQIYYNLSFSSGMEGQRGSNSSLSSGNGTEVATDVSSCFYVPNPSGTDFDAESSSLPPLSPAPQVALSIPAELAAAIPLIDRFQVEAFLRLMQKQIQSAGKRGFFYSKKSSGSNVRERFTFEDMLCFQKLQDPIPTSLLKINSDLVSRATKLFHLILKYMGVDSSDRSTPPSLDERIDLVGKLFKKTLKRVELRDELFAQISKQTRHNPDRQYLIKAWELMYLCASSMPPSKDIGGYLSEYIHNVAHDATIEPDAQVLAVNTLKALKRSIKAGPRHTTPGREEIEALLTGRKLTTIVFFLDETFEEISYDMATTVSDAVELAGTIKLSAFSSFSLFECRKVVSSSKSSDPGNEEYIGLDDNKYIGDLLAEFKAIKDRNKGEILHCKLVFKKKLFRESDEAVTDLMFVQLSYVQLQHDYLLGNYPVGRDDAAQLCALQILVGIGFVNSPESCIDWTSLLERFLPRQIAITRAKREWELDILARYRSMENVTKDDARQQFLRILKALPYGNSVFFSVRKIDDPIGLLPGRIILGINKRGVHFFRPVPKEYLHSAELRDIMQFGSSNTAVFFKMRVAGVLHIFQFETKQGEEICVALQTHINDVMLRRYSKARSAANSLVNGDISCSSKPQNFEVYEKRLQDLSKAYEESQKKIEKLMDEQQEKNQQEVTLREELEAIHNGLELERRKLLEVTLDRDKLRSLCDEKGTTIQSLMSELRGMEARLAKSGNTKSSKETKSELAEMNNQILYKIQKELEVRNKELHVAVDNSKRLLSENKILEQNLNIEKKKKEEVEIHQKRYEQEKKVLKLRVSELENKLEVLAQDLDSAESTIESKNSDMLLLQNNLKELEELREMKEDIDRKNEQTAAILKMQGAQLAELEILYKEEQVLRKRYYNTIEDMKGKIRVYCRIRPLNEKESSEREKQMLTTVDEFTVEHPWKDDKRKQHIYDRVFDMRASQDDIFEDTKYLVQSAVDGYNVCIFAYGQTGSGKTFTIYGHESNPGLTPRATKELFNILKRDSKRFSFSLKAYMVELYQDTLVDLLLPKSARRLKLEIKKDSKGMVFVENVTTIPISTLEELRMILERGSERRHVSGTNMNEESSRSHLILSVVIESIDLQTQSAARGKLSFVDLAGSERVKKSGSAGCQLKEAQSINKSLSALGDVIGALSSGNQHIPYRNHKLTMLMSDSLGGNAKTLMFVNVSPAESNLDETYNSLLYASRVRTIVNDPSKHISSKEMVRLKKLVAYWKEQAGKKGEEEDLVDIEEDRTRKDEADS

SEQ ID NO: 77767 - protein, 1261 aa, Arabidopsis thaliana
  peptide (1)..(1261): Ceres Seq. ID no. 12577511
  misc_feature (313)..(500): Pfam Name: FERM domain (Band 4.1 family) Pfam Description: FERM domain (Band 4.1 family)
  misc_feature (632)..(1246): Homolog of NCBI NO: 6166459 NR Description: kinesin-C [Strongylocentrotus purpuratus]
  misc_feature (611)..(1214): Homolog of NCBI NO: 19923321 NR Description: kinesin family member C3 [Homo sapiens]
  misc_feature (595)..(1210): Homolog of NCBI NO: 1762638 NR Description: microtubule-based motor protein
  misc_feature (628)..(1223): Homolog of NCBI NO: 18416938 NR Description: kinesin-like protein B (katB); protein id:
  misc_feature (628)..(1223): Homolog of NCBI NO: 7446304 NR Description: kinesin-related protein katB - Arabidopsis
  misc_feature (709)..(1251): Homolog of NCBI NO: 15218418 NR Description: kinesin-related protein; protein id: At1g72250.1
  misc_feature (605)..(1223): Homolog of NCBI NO: 10176794 NR Description: kinesin-like protein [Arabidopsis thaliana]
  misc_feature (622)..(1207): Homolog of NCBI NO: 19114370 NR Description: kinesin-like protein [Schizosaccharomyces pombe]
  misc_feature (724)..(1214): Homolog of NCBI NO: 14124976 NR Description: Similar to kinesin family member C3 [Homo sapiens]
  misc_feature (852)..(1210): Homolog of NCBI NO: 11245496 NR Description: C-terminal kinesin KIFC1 [Trypanosoma brucei]
MEGQRGSNSSLSSGNGTEVATDVSSCFYVPNPSGTDFDAESSSLPPLSPAPQVALSIPAELAAAIPLIDRFQVEAFLRLMQKQIQSAGKRGFFYSKKSSGSNVRERFTFEDMLCFQKLQDPIPTSLLKINSDLVSRATKLFHLILKYMGVDSSDRSTPPSLDERIDLVGKLFKKTLKRVELRDELFAQISKQTRHNPDRQYLIKAWELMYLCASSMPPSKDIGGYLSEYIHNVAHDATIEPDAQVLAVNTLKALKRSIKAGPRHTTPGREEIEALLTGRKLTTIVFFLDETFEEISYDMATTVSDAVELAGTIKLSAFSSFSLFECRKVVSSSKSSDPGNEEYIGLDDNKYIGDLLAEFKAIKDRNKGEILHCKLVFKKKLFRESDEAVTDLMFVQLSYVQLQHDYLLGNYPVGRDDAAQLCALQILVGIGFVNSPESCIDWTSLLERFLPRQIAITRAKREWELDILARYRSMENVTKDDARQQFLRILKALPYGNSVFFSVRKIDDPIGLLPGRIILGINKRGVHFFRPVPKEYLHSAELRDIMQFGSSNTAVFFKMRVAGVLHIFQFETKQGEEICVALQTHINDVMLRRYSKARSAANSLVNGDISCSSKPQNFEVYEKRLQDLSKAYEESQKKIEKLMDEQQEKNQQEVTLREELEAIHNGLELERRKLLEVTLDRDKLRSLCDEKGTTIQSLMSELRGMEARLAKSGNTKSSKETKSELAEMNNQILYKIQKELEVRNKELHVAVDNSKRLLSENKILEQNLNIEKKKKEEVEIHQKRYEQEKKVLKLRVSELENKLEVLAQDLDSAESTIESKNSDMLLLQNNLKELEELREMKEDIDRKNEQTAAILKMQGAQLAELEILYKEEQVLRKRYYNTIEDMKGKIRVYCRIRPLNEKESSEREKQMLTTVDEFTVEHPWKDDKRKQHIYDRVFDMRASQDDIFEDTKYLVQSAVDGYNVCIFAYGQTGSGKTFTIYGHESNPGLTPRATKELFNILKRDSKRFSFSLKAYMVELYQDTLVDLLLPKSARRLKLEIKKDSKGMVFVENVTTIPISTLEELRMILERGSERRHVSGTNMNEESSRSHLILSVVIESIDLQTQSAARGKLSFVDLAGSERVKKSGSAGCQLKEAQSINKSLSALGDVIGALSSGNQHIPYRNHKLTMLMSDSLGGNAKTLMFVNVSPAESNLDETYNSLLYASRVRTIVNDPSKHISSKEMVRLKKLVAYWKEQAGKKGEEEDLVDIEEDRTRKDEADS

SEQ ID NO: 77768 - protein, 1182 aa, Arabidopsis thaliana
  peptide (1)..(1182): Ceres Seq. ID no. 12577512
  misc_feature (234)..(421): Pfam Name: FERM domain (Band 4.1 family) Pfam Description: FERM domain (Band 4.1 family)
  misc_feature (553)..(1167): Homolog of NCBI NO: 6166459 NR Description: kinesin-C [Strongylocentrotus purpuratus]
  misc_feature (532)..(1135): Homolog of NCBI NO: 19923321 NR Description: kinesin family member C3 [Homo sapiens]
  misc_feature (516)..(1131): Homolog of NCBI NO: 1762638 NR Description: microtubule-based motor protein
  misc_feature (549)..(1144): Homolog of NCBI NO: 18416938 NR Description: kinesin-like protein B (katB); protein id:
  misc_feature (549)..(1144): Homolog of NCBI NO: 7446304 NR Description: kinesin-related protein katB - Arabidopsis
  misc_feature (630)..(1172): Homolog of NCBI NO: 15218418 NR Description: kinesin-related protein; protein id: At1g72250.1
  misc_feature (526)..(1144): Homolog of NCBI NO: 10176794 NR Description: kinesin-like protein [Arabidopsis thaliana]
  misc_feature (543)..(1128): Homolog of NCBI NO: 19114370 NR Description: kinesin-like protein [Schizosaccharomyces pombe]
  misc_feature (645)..(1135): Homolog of NCBI NO: 14124976 NR Description: Similar to kinesin family member C3 [Homo sapiens]
  misc_feature (773)..(1131): Homolog of NCBI NO: 11245496 NR Description: C-terminal kinesin KIFC1 [Trypanosoma brucei]
MQKQIQSAGKRGFFYSKKSSGSNVRERFTFEDMLCFQKLQDPIPTSLLKINSDLVSRATKLFHLILKYMGVDSSDRSTPPSLDERIDLVGKLFKKTLKRVELRDELFAQISKQTRHNPDRQYLIKAWELMYLCASSMPPSKDIGGYLSEYIHNVAHDATIEPDAQVLAVNTLKALKRSIKAGPRHTTPGREEIEALLTGRKLTTIVFFLDETFEEISYDMATTVSDAVELAGTIKLSAFSSFSLFECRKVVSSSKSSDPGNEEYIGLDDNKYIGDLLAEFKAIKDRNKGEILHCKLVFKKKLFRESDEAVTDLMFVQLSYVQLQHDYLLGNYPVGRDDAAQLCALQILVGIGFVNSPESCIDWTSLLERFLPRQIAITRAKREWELDILARYRSMENVTKDDARQQFLRILKALPYGNSVFFSVRKIDDPIGLLPGRIILGINKRGVHFFRPVPKEYLHSAELRDIMQFGSSNTAVFFKMRVAGVLHIFQFETKQGEEICVALQTHINDVMLRRYSKARSAANSLVNGDISCSSKPQNFEVYEKRLQDLSKAYEESQKKIEKLMDEQQEKNQQEVTLREELEAIHNGLELERRKLLEVTLDRDKLRSLCDEKGTTIQSLMSELRGMEARLAKSGNTKSSKETKSELAEMNNQILYKIQKELEVRNKELHVAVDNSKRLLSENKILEQNLNIEKKKKEEVEIHQKRYEQEKKVLKLRVSELENKLEVLAQDLDSAESTIESKNSDMLLLQNNLKELEELREMKEDIDRKNEQTAAILKMQGAQLAELEILYKEEQVLRKRYYNTIEDMKGKIRVYCRIRPLNEKESSEREKQMLTTVDEFTVEHPWKDDKRKQHIYDRVFDMRASQDDIFEDTKYLVQSAVDGYNVCIFAYGQTGSGKTFTIYGHESNPGLTPRATKELFNILKRDSKRFSFSLKAYMVELYQDTLVDLLLPKSARRLKLEIKKDSKGMVFVENVTTIPISTLEELRMILERGSERRHVSGTNMNEESSRSHLILSVVIESIDLQTQSAARGKLSFVDLAGSERVKKSGSAGCQLKEAQSINKSLSALGDVIGALSSGNQHIPYRNHKLTMLMSDSLGGNAKTLMFVNVSPAESNLDETYNSLLYASRVRTIVNDPSKHISSKEMVRLKKLVAYWKEQAGKKGEEEDLVDIEEDRTRKDEADS

SEQ ID NO: 77769 - DNA, 1773 bp, Arabidopsis thaliana
  misc_feature (1)..(1773): Ceres Seq. ID no. 12577525
  misc_feature: MA Experiment ID: 20000315 Result: Down-regulated in Transcription
  misc_feature: MA Experiment 20000315 PARAMETER Experiment Name: At_14day_Shoots-Roots_Sub_P Parameter: Age (day) Value: 14
  misc_feature: MA Experiment 20000315 PARAMETER Experiment Name: At_14day_Shoots-Roots_Sub_P Parameter: Organism Value: A. thaliana
  misc_feature: MA Experiment 20000315 PARAMETER Experiment Name: At_14day_Shoots-Roots_Sub_P Parameter: Plant Line Value: WS
  misc_feature: MA Experiment 20000315 PARAMETER Experiment Name: At_14day_Shoots-Roots_Sub_P Parameter: Tissue Value: Shoots vs. Whole Plant
  misc_feature: MA Experiment ID: 20000328 Result: Down-regulated in Transcription
  misc_feature: MA Experiment 20000328 PARAMETER Experiment Name: At_42deg_Heat_Sub_P Parameter: Age (day) Value: 14
  misc_feature: MA Experiment 20000328 PARAMETER Experiment Name: At_42deg_Heat_Sub_P Parameter: Organism Value: A. thaliana
  misc_feature: MA Experiment 20000328 PARAMETER Experiment Name: At_42deg_Heat_Sub_P Parameter: Plant Line Value: WS
  misc_feature: MA Experiment 20000328 PARAMETER Experiment Name: At_42deg_Heat_Sub_P Parameter: Temperature (deg C) Value: 42 vs. 22
  misc_feature: MA Experiment 20000328 PARAMETER Experiment Name: At_42deg_Heat_Sub_P Parameter: Timepoint (hr) Value: 6
  misc_feature: MA Experiment 20000328 PARAMETER Experiment Name: At_42deg_Heat_Sub_P Parameter: Tissue Value: Aerial
gagagagtctctgtctctgtaaaagatatttgagcttgagaagaacagaagaaacttccaggatcaatcaatcgatcaactttagtgaactaactcttgatttttcattcgaagttatggaatcggttcccgaatccgtaccatcgccgaactcgaatacaccgtcaataccaccgccggtgaactccgtaccgcctttcttgagtaaaacctacgacatggttgatgatccgttgaccaatgaggtcgtttcgtggagcagcgggaacaacagcttcgtcgtctggagtgccccggagttctcgaaggtgctcttgcccaagtatttcaagcacaacaacttctccagcttcgtcagacagttaaatacttatggtttcagaaaagttgatcctgaccgatgggaatttgcaaatgaaggatttcttagaggccgaaaacaactactgaagagtattgtcaggagaaaaccttcgcatgtgcagcagaatcagcaacaaactcaagttcagagctcatctgttggtgcttgtgtcgaggtggggaagtttggaatagaagaagaagtggaaagacttaagcgggataagaatgttcttatgcaagaactcgtcaggttaaggcagcaacagcaagctactgaaaaccaactgcagaatgtgggacagaaagttcaggtgatggagcaaaggcaacaacaaatgatgtcgtttttagcaaaggctgttcaaagtccaggtttcttaaaccagttagtacaacagaataataatgatggcaacagacaaattccaggaagcaacaaaaagaggagacttcctgtagatgagcaggagaatcgtggtgacaatgtggctaatggtcttaaccgccagattgttagatatcagccgtcgataaacgaagcagcacaaaatatgcttcgacagttcttaaatactagtacctcacctcggtatgaatcagtttcaaacaatcctgacagtttcctattgggtgatgttcccagttctacctctgtagacaatgggaacccttcaagtagagtttctggagtaacattggccgagttttcacccaacacagttcagtcagcaacgaatcaagtacccgaagcaagtttggctcatcatcctcaagctggtctggttcagccaaatataggtcaaagtccggctcaaggagcagcacctgcagactcttggagccctgaatttgatttagttggatgcgagacagatagtggagagtgttttgatccaataatggctgttttagatgagtcagaaggcgatgcaatttctcctgaaggtgagggcaagatgaatgagttactggagggagtccctaagctgcccggaatccaagatccattctgggaacagttcttttctgttgaactcccagcgattgcagatacagacgatattctatcaggatcagtggagaataatgacttggtattggaacaagaaccaaacgagtggacccgtaatgaacaacaaatgaagtatcttactgaacaaatgggactgctttcctcagaagcacagaggaaataaagattttcaggggaggttgcaaaaggagatatgaaggaacgaggaatatatcagatggtgtgtataccctttacatttttacttaaatgaaaaaaaaacagagagaagaaacataaaagatttaccaccaagcttgtgaatagttagtagagatcggtttttgtgttgtttatattatacttttgtgtgaaaacgttcatcttgttcaatt

SEQ ID NO: 77770 - protein, 519 aa, Arabidopsis thaliana
  peptide (1)..(519): Ceres Seq. ID no. 12577526
  misc_feature (64)..(238): Pfam Name: HSF-type DNA-binding Pfam Description: HSF-type DNA-binding
  misc_feature (1)..(519): Homolog of NCBI NO: 25296101 NR Description: heat shock transcription factor HSF3 [imported] - thaliana (fragment) >gi|3256068|emb|CAA74397.1| Heat Shock Factor
  misc_feature (39)..(519): Homolog of NCBI NO: 30686034 NR Description: heat shock transcription factor 3 (HSF3) thaliana] >gi|30686038|ref|NP_850832.1| heat shock transcription
  misc_feature (73)..(519): Homolog of NCBI NO: 11357325 NR Description: Heat Shock Factor 3 - Arabidopsis thaliana
  misc_feature (39)..(421): Homolog of NCBI NO: 27261140 NR Description: HSF3 DNA-binding domain/VP16 activation domain
  misc_feature (39)..(519): Homolog of NCBI NO: 15228440 NR Description: putative heat shock transcription factor; protein At3g02990.1 [Arabidopsis thaliana] Heat shock factor protein 2 (HSF 2) (Heat shock transcription
  misc_feature (39)..(519): Homolog of NCBI NO: 6624612 NR Description: heat shock factor 2 [Arabidopsis thaliana]
  misc_feature (64)..(514): Homolog of NCBI NO: 29126355 NR Description: putative heat shock transcription factor [Oryza
  misc_feature (43)..(367): Homolog of NCBI NO: 729775 NR Description: HEAT SHOCK FACTOR PROTEIN HSF8 (HEAT SHOCK FACTOR 8) (HSTF 8) (HEAT STRESS TRANSCRIPTION FACTOR)
  misc_feature (41)..(367): Homolog of NCBI NO: 11386827 NR Description: Heat shock factor protein HSF8 (Heat shock factor 8) (HSTF 8) (Heat stress transcription factor)
  misc_feature (31)..(515): Homolog of NCBI NO: 15223168 NR Description: heat shock transcription factor HSF8, putative; id: At1g32330.1 [Arabidopsis thaliana] >gi|25296102|pir||H86447
ESLCLCKRYLSLRRTEETSRINQSINFSELTLDFSFEVMESVPESVPSPNSNTPSIPPPVNSVPPFLSKTYDMVDDPLTNEVVSWSSGNNSFVVWSAPEFSKVLLPKYFKHNNFSSFVRQLNTYGFRKVDPDRWEFANEGFLRGRKQLLKSIVRRKPSHVQQNQQQTQVQSSSVGACVEVGKFGIEEEVERLKRDKNVLMQELVRLRQQQQATENQLQNVGQKVQVMEQRQQQMMSFLAKAVQSPGFLNQLVQQNNNDGNRQIPGSNKKRRLPVDEQENRGDNVANGLNRQIVRYQPSINEAAQNMLRQFLNTSTSPRYESVSNNPDSFLLGDVPSSTSVDNGNPSSRVSGVTLAEFSPNTVQSATNQVPEASLAHHPQAGLVQPNIGQSPAQGAAPADSWSPEFDLVGCETDSGECFDPIMAVLDESEGDAISPEGEGKMNELLEGVPKLPGIQDPFWEQFFSVELPAIADTDDILSGSVENNDLVLEQEPNEWTRNEQQMKYLTEQMGLLSSEAQRK

SEQ ID NO: 77771 - protein, 481 aa, Arabidopsis thaliana
  peptide (1)..(481): Ceres Seq. ID no. 12577527
  misc_feature (26)..(200): Pfam Name: HSF-type DNA-binding Pfam Description: HSF-type DNA-binding
  misc_feature (1)..(481): Homolog of NCBI NO: 25296101 NR Description: heat shock transcription factor HSF3 [imported] - thaliana (fragment) >gi|3256068|emb|CAA74397.1| Heat Shock Factor
  misc_feature (1)..(481): Homolog of NCBI NO: 30686034 NR Description: heat shock transcription factor 3 (HSF3) thaliana] >gi|30686038|ref|NP_850832.1| heat shock transcription
  misc_feature (35)..(481): Homolog of NCBI NO: 11357325 NR Description: Heat Shock Factor 3 - Arabidopsis thaliana
  misc_feature (1)..(383): Homolog of NCBI NO: 27261140 NR Description: HSF3 DNA-binding domain/VP16 activation domain
  misc_feature (1)..(481): Homolog of NCBI NO: 15228440 NR Description: putative heat shock transcription factor; protein At3g02990.1 [Arabidopsis thaliana] Heat shock factor protein 2 (HSF 2) (Heat shock transcription
  misc_feature (1)..(481): Homolog of NCBI NO: 6624612 NR Description: heat shock factor 2 [Arabidopsis thaliana]
  misc_feature (26)..(476): Homolog of NCBI NO: 29126355 NR Description: putative heat shock transcription factor [Oryza
  misc_feature (5)..(329): Homolog of NCBI NO: 729775 NR Description: HEAT SHOCK FACTOR PROTEIN HSF8 (HEAT SHOCK FACTOR 8) (HSTF 8) (HEAT STRESS TRANSCRIPTION FACTOR)
  misc_feature (3)..(329): Homolog of NCBI NO: 11386827 NR Description: Heat shock factor protein HSF8 (Heat shock factor 8) (HSTF 8) (Heat stress transcription factor)
  misc_feature (1)..(477): Homolog of NCBI NO: 15223168 NR Description: heat shock transcription factor HSF8, putative; id: At1g32330.1 [Arabidopsis thaliana] >gi|25296102|pir||H86447
MESVPESVPSPNSNTPSIPPPVNSVPPFLSKTYDMVDDPLTNEVVSWSSGNNSFVVWSAPEFSKVLLPKYFKHNNFSSFVRQLNTYGFRKVDPDRWEFANEGFLRGRKQLLKSIVRRKPSHVQQNQQQTQVQSSSVGACVEVGKFGIEEEVERLKRDKNVLMQELVRLRQQQQATENQLQNVGQKVQVMEQRQQQMMSFLAKAVQSPGFLNQLVQQNNNDGNRQIPGSNKKRRLPVDEQENRGDNVANGLNRQIVRYQPSINEAAQNMLRQFLNTSTSPRYESVSNNPDSFLLGDVPSSTSVDNGNPSSRVSGVTLAEFSPNTVQSATNQVPEASLAHHPQAGLVQPNIGQSPAQGAAPADSWSPEFDLVGCETDSGECFDPIMAVLDESEGDAISPEGEGKMNELLEGVPKLPGIQDPFWEQFFSVELPAIADTDDILSGSVENNDLVLEQEPNEWTRNEQQMKYLTEQMGLLSSEAQRK

SEQ ID NO: 77772 - protein, 447 aa, Arabidopsis thaliana; identical to SEQ ID NO: 72747
  peptide (1)..(447): Ceres Seq. ID no. 12577528
  misc_feature (1)..(166): Pfam Name: HSF-type DNA-binding Pfam Description: HSF-type DNA-binding
  misc_feature (1)..(447): Homolog of NCBI NO: 25296101 NR Description: heat shock transcription factor HSF3 [imported] - thaliana (fragment) >gi|3256068|emb|CAA74397.1| Heat Shock Factor
  misc_feature (1)..(447): Homolog of NCBI NO: 30686034 NR Description: heat shock transcription factor 3 (HSF3) thaliana] >gi|30686038|ref|NP_850832.1| heat shock transcription
  misc_feature (1)..(447): Homolog of NCBI NO: 11357325 NR Description: Heat Shock Factor 3 - Arabidopsis thaliana
  misc_feature (1)..(349): Homolog of NCBI NO: 27261140 NR Description: HSF3 DNA-binding domain/VP16 activation domain
  misc_feature (1)..(447): Homolog of NCBI NO: 15228440 NR Description: putative heat shock transcription factor; protein At3g02990.1 [Arabidopsis thaliana] Heat shock factor protein 2 (HSF 2) (Heat shock transcription
  misc_feature (1)..(447): Homolog of NCBI NO: 6624612 NR Description: heat shock factor 2 [Arabidopsis thaliana]
  misc_feature (1)..(442): Homolog of NCBI NO: 29126355 NR Description: putative heat shock transcription factor [Oryza
  misc_feature (1)..(295): Homolog of NCBI NO: 729775 NR Description: HEAT SHOCK FACTOR PROTEIN HSF8 (HEAT SHOCK FACTOR 8) (HSTF 8) (HEAT STRESS TRANSCRIPTION FACTOR)
  misc_feature (1)..(295): Homolog of NCBI NO: 11386827 NR Description: Heat shock factor protein HSF8 (Heat shock factor 8) (HSTF 8) (Heat stress transcription factor)
  misc_feature (1)..(443): Homolog of NCBI NO: 15223168 NR Description: heat shock transcription factor HSF8, putative; id: At1g32330.1 [Arabidopsis thaliana] >gi|25296102|pir||H86447

SEQ ID NO: 77773 - DNA, 1644 bp, Arabidopsis thaliana
  misc_feature (1)..(1644): Ceres Seq. ID no. 12577548
  misc_feature: MA Experiment ID: 20001559 Result: Up-regulated in Transcription
  misc_feature: MA Experiment 20001559 PARAMETER Experiment Name: At_Drought_Soil_Dry_P Parameter: Age (day) Value: 28
  misc_feature: MA Experiment 20001559 PARAMETER Experiment Name: At_Drought_Soil_Dry_P Parameter: Organism Value: A. thaliana
  misc_feature: MA Experiment 20001559 PARAMETER Experiment Name: At_Drought_Soil_Dry_P Parameter: Plant Line Value: WS
  misc_feature: MA Experiment 20001559 PARAMETER Experiment Name: At_Drought_Soil_Dry_P Parameter: Post Timepoint (hr) Value: 29
  misc_feature: MA Experiment 20001559 PARAMETER Experiment Name: At_Drought_Soil_Dry_P Parameter: Post-Treatment Value: Re-Water vs. No Drought
  misc_feature: MA Experiment 20001559 PARAMETER Experiment Name: At_Drought_Soil_Dry_P Parameter: Timepoint (day) Value: 14
  misc_feature: MA Experiment 20001559 PARAMETER Experiment Name: At_Drought_Soil_Dry_P Parameter: Treatment Value: Drought vs. No Drought
  misc_feature: MA Experiment ID: 20001904 Result: Up-regulated in Transcription
  misc_feature: MA Experiment 20001904 PARAMETER Experiment Name: At_Drought_Reproduction_P Parameter: Age (day) Value: 37
  misc_feature: MA Experiment 20001904 PARAMETER Experiment Name: At_Drought_Reproduction_P Parameter: Organism Value: A. thaliana
  misc_feature: MA Experiment 20001904 PARAMETER Experiment Name: At_Drought_Reproduction_P Parameter: Plant Line Value: WS
  misc_feature: MA Experiment 20001904 PARAMETER Experiment Name: At_Drought_Reproduction_P Parameter: Timepoint (day) Value: 7
  misc_feature: MA Experiment 20001904 PARAMETER Experiment Name: At_Drought_Reproduction_P Parameter: Tissue Value: Rosettes
  misc_feature: MA Experiment 20001904 PARAMETER Experiment Name: At_Drought_Reproduction_P Parameter: Treatment Value: Drought vs. No Drought
  misc_feature: MA Experiment ID: 20001905 Result: Up-regulated in Transcription
  misc_feature: MA Experiment 20001905 PARAMETER Experiment Name: At_Drought_Reproduction_P Parameter: Age (day) Value: 40
  misc_feature: MA Experiment 20001905 PARAMETER Experiment Name: At_Drought_Reproduction_P Parameter: Organism Value: A. thaliana
  misc_feature: MA Experiment 20001905 PARAMETER Experiment Name: At_Drought_Reproduction_P Parameter: Plant Line Value: WS
  misc_feature: MA Experiment 20001905 PARAMETER Experiment Name: At_Drought_Reproduction_P Parameter: Timepoint (day) Value: 10
  misc_feature: MA Experiment 20001905 PARAMETER Experiment Name: At_Drought_Reproduction_P Parameter: Tissue Value: Rosettes
  misc_feature: MA Experiment 20001905 PARAMETER Experiment Name: At_Drought_Reproduction_P Parameter: Treatment Value: Drought vs. No Drought
gtctcaccacttcctaactcttctctctcttatctcttcttgttttagctatgaagaagcaatctcaattcagatccaatcatacccttctcttctttcatctctgatcattaacaacaacaacaacgactcgggttctgtaaattcagttattggagagaaaatggcgatgttagttgagccaccaaatgggattaagcaacaagggaaacattactactccatgtggcaaacattgttcgaaatcgatacaaagtatgttccgattaaacccattggaagaggagcttatggtgtggtttgttcttctatcaatcgtgagactaatgagagagttgctattaaaaagattcacaatgtgtttgagaatcgtgttgatgctttgagaacgttgagggaacttaaacttcttaggcatgtgaggcatgagaatgtgatcgcgcttaaagatgttatgttgcctgctaatagatccagtttcaaggatgtttatttggtttatgagctaatggatactgatcttcatcagattattaaatcctctcagtctctttctgatgatcactgcaagtacttcttgtttcagttgcttagagggttgaagtatcttcattctgcaaacatacttcaccgggatttgaagcccgggaacctcttagttaatgcgaactgcgatctcaagatttgtgatttcgggttggcgagaacgagccaaggtaatgaacagttcatgactgagtatgtggttacacgttggtacagagcacctgagcttcttctttgttgtgataactatggaacctccattgatgtatggtcggttggttgcatattcgcggagattcttggtaggaaaccgatttttccaggaacagaatgcttgaatcagcttaagctaatcatcaacgttgttggtagccaacaagaatctgatattcggttcatagacaacccgaaagctcgaaggtttataaagtctcttccgtactcaagaggaactcatctctccaatctttatccacaagccaatcctctagctatagatttgttacagaggatgcttgtgtttgatccaaccaagagaatctctgtaaccgatgcgctcttacacccgtatatggcggggttgtttgatcctggatccaatccgcctgcacatgtcccaatctctctggacatagatgaaaacatggaggaaccagtgataagagagatgatgtggaatgagatgctttattaccaccctgaagctgaaatctcaaatgcctaaatcaacatcaatgatcattaagagtaagctttttccagttttttttttttttgctttctaaaatgcagctttgatgttatgttatatatagcgagtccacaaacgcgggaacagatcgataaaaagcccggtgctttgatctcgtctggtttgatttagttgcagtgagtgagtagtagtaacagagtttgaaaagtggctctcagtatctttaccactttgtaaatgtgactgtttgttactaagtaagttaaggcttgtttttgttacattatctttgagttgatgagttttactactgattttcaggccaactcttgtattttgtatagctttgccattgcccacttgctagccacacgaaataatttttt

SEQ ID NO: 77774 - protein, 422 aa, Arabidopsis thaliana
  peptide (1)..(422): Ceres Seq. ID no. 12577549
  misc_feature (86)..(373): Pfam Name: Protein kinase domain Pfam Description: Protein kinase domain
  misc_feature (55)..(422): Homolog of NCBI NO: 15224120 NR Description: MAP kinase (ATMPK7); protein id: At2g18170.1, by cDNA: gi_457405 [Arabidopsis thaliana]
  misc_feature (55)..(422): Homolog of NCBI NO: 629548 NR Description: mitogen-activated protein kinase 7 (EC 2.7.1.-) - thaliana >gi|457406|dbj|BAA04870.1| MAP kinase [Arabidopsis
  misc_feature (55)..(422): Homolog of NCBI NO: 4887127 NR Description: putative mitogen-activated protein kinase MAPK
  misc_feature (55)..(417): Homolog of NCBI NO: 15234397 NR Description: MAP kinase like protein; protein id: At4g36450.1
  misc_feature (55)..(420): Homolog of NCBI NO: 2499612 NR Description: MITOGEN-ACTIVATED PROTEIN KINASE HOMOLOG 1 (PMEK1)
  misc_feature (55)..(417): Homolog of NCBI NO: 2499614 NR Description: MITOGEN-ACTIVATED PROTEIN KINASE HOMOLOG NTF3
  misc_feature (55)..(416): Homolog of NCBI NO: 7341300 NR Description: MAP kinase MAPK2 [Oryza sativa]
  misc_feature (55)..(422): Homolog of NCBI NO: 8132347 NR Description: MAP kinase PsMAPK2 [Pisum sativum]
  misc_feature (55)..(416): Homolog of NCBI NO: 11869994 NR Description: MAP kinase 2 [Oryza sativa]
  misc_feature (55)..(421): Homolog of NCBI NO: 15218451 NR Description: putative mitogen-activated protein kinase, MAP
SHHFLTLLSLISSCFSYEEAISIQIQSYPSLLSSLIINNNNNDSGSVNSVIGEKMAMLVEPPNGIKQQGKHYYSMWQTLFEIDTKYVPIKPIGRGAYGVVCSSINRETNERVAIKKIHNVFENRVDALRTLRELKLLRHVRHENVIALKDVMLPANRSSFKDVYLVYELMDTDLHQIIKSSQSLSDDHCKYFLFQLLRGLKYLHSANILHRDLKPGNLLVNANCDLKICDFGLARTSQGNEQFMTEYVVTRWYRAPELLLCCDNYGTSIDVWSVGCIFAEILGRKPIFPGTECLNQLKLIINVVGSQQESDIRFIDNPKARRFIKSLPYSRGTHLSNLYPQANPLAIDLLQRMLVFDPTKRISVTDALLHPYMAGLFDPGSNPPAHVPISLDIDENMEEPVIREMMWNEMLYYHPEAEISNA

SEQ ID NO: 77775 - protein, 368 aa, Arabidopsis thaliana
  peptide (1)..(368): Ceres Seq. ID no. 12577550
  misc_feature (32)..(319): Pfam Name: Protein kinase domain Pfam Description: Protein kinase domain
  misc_feature (1)..(368): Homolog of NCBI NO: 15224120 NR Description: MAP kinase (ATMPK7); protein id: At2g18170.1, by cDNA: gi_457405 [Arabidopsis thaliana]
  misc_feature (1)..(368): Homolog of NCBI NO: 629548 NR Description: mitogen-activated protein kinase 7 (EC 2.7.1.-) - thaliana >gi|457406|dbj|BAA04870.1| MAP kinase [Arabidopsis
  misc_feature (1)..(368): Homolog of NCBI NO: 4887127 NR Description: putative mitogen-activated protein kinase MAPK
  misc_feature (1)..(363): Homolog of NCBI NO: 15234397 NR Description: MAP kinase like protein; protein id: At4g36450.1
  misc_feature (1)..(366): Homolog of NCBI NO: 2499612 NR Description: MITOGEN-ACTIVATED PROTEIN KINASE HOMOLOG 1 (PMEK1)
  misc_feature (1)..(363): Homolog of NCBI NO: 2499614 NR Description: MITOGEN-ACTIVATED PROTEIN KINASE HOMOLOG NTF3
  misc_feature (1)..(362): Homolog of NCBI NO: 7341300 NR Description: MAP kinase MAPK2 [Oryza sativa]
  misc_feature (1)..(368): Homolog of NCBI NO: 8132347 NR Description: MAP kinase PsMAPK2 [Pisum sativum]
  misc_feature (1)..(362): Homolog of NCBI NO: 11869994 NR Description: MAP kinase 2 [Oryza sativa]
  misc_feature (1)..(367): Homolog of NCBI NO: 15218451 NR Description: putative mitogen-activated protein kinase, MAP
MAMLVEPPNGIKQQGKHYYSMWQTLFEIDTKYVPIKPIGRGAYGVVCSSINRETNERVAIKKIHNVFENRVDALRTLRELKLLRHVRHENVIALKDVMLPANRSSFKDVYLVYELMDTDLHQIIKSSQSLSDDHCKYFLFQLLRGLKYLHSANILHRDLKPGNLLVNANCDLKICDFGLARTSQGNEQFMTEYVVTRWYRAPELLLCCDNYGTSIDVWSVGCIFAEILGRKPIFPGTECLNQLKLIINVVGSQQESDIRFIDNPKARRFIKSLPYSRGTHLSNLYPQANPLAIDLLQRMLVFDPTKRISVTDALLHPYMAGLFDPGSNPPAHVPISLDIDENMEEPVIREMMWNEMLYYHPEAEISNA

SEQ ID NO: 77776 - protein, 366 aa, Arabidopsis thaliana
  peptide (1)..(366): Ceres Seq. ID no. 12577551
  misc_feature (30)..(317): Pfam Name: Protein kinase domain Pfam Description: Protein kinase domain
  misc_feature (1)..(366): Homolog of NCBI NO: 15224120 NR Description: MAP kinase (ATMPK7); protein id: At2g18170.1, by cDNA: gi_457405 [Arabidopsis thaliana]
  misc_feature (1)..(366): Homolog of NCBI NO: 629548 NR Description: mitogen-activated protein kinase 7 (EC 2.7.1.-) - thaliana >gi|457406|dbj|BAA04870.1| MAP kinase [Arabidopsis
  misc_feature (1)..(366): Homolog of NCBI NO: 4887127 NR Description: putative mitogen-activated protein kinase MAPK
  misc_feature (1)..(361): Homolog of NCBI NO: 15234397 NR Description: MAP kinase like protein; protein id: At4g36450.1
  misc_feature (1)..(364): Homolog of NCBI NO: 2499612 NR Description: MITOGEN-ACTIVATED PROTEIN KINASE HOMOLOG 1 (PMEK1)
  misc_feature (1)..(361): Homolog of NCBI NO: 2499614 NR Description: MITOGEN-ACTIVATED PROTEIN KINASE HOMOLOG NTF3
  misc_feature (1)..(360): Homolog of NCBI NO: 7341300 NR Description: MAP kinase MAPK2 [Oryza sativa]
  misc_feature (1)..(366): Homolog of NCBI NO: 8132347 NR Description: MAP kinase PsMAPK2 [Pisum sativum]
  misc_feature (1)..(360): Homolog of NCBI NO: 11869994 NR Description: MAP kinase 2 [Oryza sativa]
  misc_feature (1)..(365): Homolog of NCBI NO: 15218451 NR Description: putative mitogen-activated protein kinase, MAP
MLVEPPNGIKQQGKHYYSMWQTLFEIDTKYVPIKPIGRGAYGVVCSSINRETNERVAIKKIHNVFENRVDALRTLRELKLLRHVRHENVIALKDVMLPANRSSFKDVYLVYELMDTDLHQIIKSSQSLSDDHCKYFLFQLLRGLKYLHSANILHRDLKPGNLLVNANCDLKICDFGLARTSQGNEQFMTEYVVTRWYRAPELLLCCDNYGTSIDVWSVGCIFAEILGRKPIFPGTECLNQLKLIINVVGSQQESDIRFIDNPKARRFIKSLPYSRGTHLSNLYPQANPLAIDLLQRMLVFDPTKRISVTDALLHPYMAGLFDPGSNPPAHVPISLDIDENMEEPVIREMMWNEMLYYHPEAEISNA

SEQ ID NO: 77777 - DNA, 1634 bp, Arabidopsis thaliana
  misc_feature (1)..(1634): Ceres Seq. ID no. 12577556
  misc_feature: MA Experiment ID: 108462 Result: Up-regulated in Transcription
  misc_feature: MA Experiment 108462 PARAMETER Experiment Name: At_Germinating_Seeds_cDNA_P Parameter: Age (day) Value: 2 vs. 0
  misc_feature: MA Experiment 108462 PARAMETER Experiment Name: At_Germinating_Seeds_cDNA_P Parameter: Tissue Value: Germinating Seeds
  misc_feature: MA Experiment ID: 108464 Result: Up-regulated in Transcription
  misc_feature: MA Experiment 108464 PARAMETER Experiment Name: At_Germinating_Seeds_cDNA_P Parameter: Age (day) Value: 4 vs. 0
  misc_feature: MA Experiment 108464 PARAMETER Experiment Name: At_Germinating_Seeds_cDNA_P Parameter: Tissue Value: Germinating Seeds
  misc_feature: MA Experiment ID: 108569 Result: Up-regulated in Transcription
  misc_feature: MA Experiment 108569 PARAMETER Experiment Name: At_0.001%_MeJA__cDNA_P Parameter: Timepoint (hr) Value: 6
  misc_feature: MA Experiment 108569 PARAMETER Experiment Name: At_0.001%_MeJA__cDNA_P Parameter: Tissue Value: Aerial
  misc_feature: MA Experiment 108569 PARAMETER Experiment Name: At_0.001%_MeJA__cDNA_P Parameter: Treatment Value: 0.001% MeJA vs. No Treatment
  misc_feature: MA Experiment ID: 108573 Result: Up-regulated in Transcription
  misc_feature: MA Experiment 108573 PARAMETER Experiment Name: At_Drought_cDNA_P Parameter: Timepoint (hr) Value: 6
  misc_feature: MA Experiment 108573 PARAMETER Experiment Name: At_Drought_cDNA_P Parameter: Tissue Value: Aerial
  misc_feature: MA Experiment 108573 PARAMETER Experiment Name: At_Drought_cDNA_P Parameter: Treatment Value: Drought vs. No Drought
  misc_feature: MA Experiment ID: 20000089 Result: Down-regulated in Transcription
attcatcatcatcaatcaatccttcattttatggatctactcatatcttgattcttccttctatctctcccttttcttccatctctttttctctgggtttccccgatttgaagagcgtgacaaaggaagaatcttttattaaaacaaattcttctgttttaatcttgggatggcctcggtgggcatagagcctagtgccgcggttagagaatctactggaaacgttactgatgctgatagattacccgaggagatgaaggacatgaaaattcaagatgataaagaaatggaagctacgattgttaatggcaatgtgactgagactggccatataatagtaactactataggaggaagaaatggccagccaaaacagacaatcagttacatggcggagcgagttgttggacatggctcctttggtgttgtgtttcaggccaaatgtttagaaacaggagaaactgttgctataaagaaagttctacaagatcggaggtacaagaatcgtgagcttcaaacaatgaggctacttgaccatccaaatgttgtgtctttgaaacattgtttcttctctacaaccgaaaaagatgagctttatctcaacttggttctggaatacgttccggaaactgtgcaccgcgtcatcaaacactacaacaaacttaaccaacgaatgcctctcgtttacgtcaaactttacacttatcagatttttaggtccttatcctacattcaccgatgtatcggcgtatgtcatcgagacatcaaacctcaaaacttgttggtaaatccacacactcatcaagtgaaactatgcgattttggaagtgcgaaagtattggttaaaggagagccaaacatttcatacatttgctcgaggtattacagagcacctgagctcatttttggagccaccgagtatactacagccattgatgtctggtctgcaggatgtgttctcgccgagcttcttctcgggcagccattgttcccgggtgagagcggtgttgatcaacttgtagagattataaaggttttgggaacaccaacaagggaagaaatcaaatgcatgaacccgaattacacagagttcaaatttcctcagattaaagctcatccatggcataagattttccacaagagaatgcctccagaagctgttgatttggtctcaaggcttcttcaatactctcccaatctccgttgtgctgctcttgattcattggtccacccattctttgacgagctaagagatccgaatgcgcgattacccaacggacgtttccttccaccgctctttaactttaagcctcatgaacttaaaggtgtgcctgtggagatggtggcgaagttagttccagaacatgcgaggaagcaatgtccgtggctcagtttgtgatttgttctcacctgcaaacacgaaaactagagcaaagcagtcgagatattcatctcttctcttctctctccttctctgtattaatattattataatgatcatatctcaatctgatgatttagtaaccctttgtttgttgtatgagtagagaaagagtgaatcatttgtgggggttatgatattgtataagccaacaaagattattttttaaagagagtttcgtgttttctgtctc

SEQ ID NO: 77778 - protein, 409 aa, Arabidopsis thaliana; identical to SEQ ID NO: 30400
  peptide (1)..(409): Ceres Seq. ID no. 12577557
  misc_feature (73)..(357): Pfam Name: Protein kinase domain Pfam Description: Protein kinase domain
  misc_feature (1)..(409): Homolog of NCBI NO: 15230058 NR Description: shaggy related protein kinase, ASK-GAMMA; protein At3g05840.1, supported by cDNA: 17739., supported by cDNA:
  misc_feature (1)..(409): Homolog of NCBI NO: 21553877 NR Description: shaggy related protein kinase ASK-GAMMA
  misc_feature (1)..(409): Homolog of NCBI NO: 18421039 NR Description: shaggy-like kinase alpha; protein id: supported by cDNA: gi_15028148, supported by cDNA: gi_16226767
  misc_feature (1)..(409): Homolog of NCBI NO: 541901 NR Description: protein kinase ASK-alpha (EC 2.7.1.-) - Arabidopsis thaliana >gi|460832|emb|CAA53181.1| shaggy related [Arabidopsis thaliana] >gi|1769889|emb|CAA48538.1| serine
  misc_feature (1)..(409): Homolog of NCBI NO: 2398519 NR Description: shaggy-like kinase alpha [Arabidopsis thaliana]
  misc_feature (69)..(409): Homolog of NCBI NO: 7434274 NR Description: hypothetical protein A_IG002P16.21 - Arabidopsis >gi|2191169|gb|AAB61055.1| Similar to shaggy related protein
  misc_feature (1)..(78): Homolog of NCBI NO: 7434274 NR Description: hypothetical protein A_IG002P16.21 - Arabidopsis >gi|2191169|gb|AAB61055.1| Similar to shaggy related protein
  misc_feature (1)..(409): Homolog of NCBI NO: 1709127 NR Description: Glycogen synthase kinase-3 homolog MsK-1
  misc_feature (1)..(409): Homolog of NCBI NO: 11133532 NR Description: Shaggy-related protein kinase NtK-1
  misc_feature (1)..(404): Homolog of NCBI NO: 481018 NR Description: protein kinase MSK-3 (EC 2.7.1.-) [similarity] -

SEQ ID NO: 77779 - protein, 381 aa, Arabidopsis thaliana; identical to SEQ ID NO: 30401
  peptide (1)..(381): Ceres Seq. ID no. 12577558
  misc_feature (45)..(329): Pfam Name: Protein kinase domain Pfam Description: Protein kinase domain
  misc_feature (1)..(381): Homolog of NCBI NO: 15230058 NR Description: shaggy related protein kinase, ASK-GAMMA; protein At3g05840.1, supported by cDNA: 17739., supported by cDNA:
  misc_feature (1)..(381): Homolog of NCBI NO: 21553877 NR Description: shaggy related protein kinase ASK-GAMMA
  misc_feature (1)..(381): Homolog of NCBI NO: 18421039 NR Description: shaggy-like kinase alpha; protein id: supported by cDNA: gi_15028148, supported by cDNA: gi_16226767
  misc_feature (1)..(381): Homolog of NCBI NO: 541901 NR Description: protein kinase ASK-alpha (EC 2.7.1.-) - Arabidopsis thaliana >gi|460832|emb|CAA53181.1| shaggy related [Arabidopsis thaliana] >gi|1769889|emb|CAA48538.1| serine
  misc_feature (1)..(381): Homolog of NCBI NO: 2398519 NR Description: shaggy-like kinase alpha [Arabidopsis thaliana]
  misc_feature (41)..(381): Homolog of NCBI NO: 7434274 NR Description: hypothetical protein A_IG002P16.21 - Arabidopsis >gi|2191169|gb|AAB61055.1| Similar to shaggy related protein
  misc_feature (1)..(50): Homolog of NCBI NO: 7434274 NR Description: hypothetical protein A_IG002P16.21 - Arabidopsis >gi|2191169|gb|AAB61055.1| Similar to shaggy related protein
  misc_feature (1)..(381): Homolog of NCBI NO: 1709127 NR Description: Glycogen synthase kinase-3 homolog MsK-1
  misc_feature (1)..(381): Homolog of NCBI NO: 11133532 NR Description: Shaggy-related protein kinase NtK-1
  misc_feature (1)..(376): Homolog of NCBI NO: 481018 NR Description: protein kinase MSK-3 (EC 2.7.1.-) [similarity] -

SEQ ID NO: 77780 - protein, 378 aa, Arabidopsis thaliana; identical to SEQ ID NO: 30402
  peptide (1)..(378): Ceres Seq. ID no. 12577559
  misc_feature (42)..(326): Pfam Name: Protein kinase domain Pfam Description: Protein kinase domain
  misc_feature (1)..(378): Homolog of NCBI NO: 15230058 NR Description: shaggy related protein kinase, ASK-GAMMA; protein At3g05840.1, supported by cDNA: 17739., supported by cDNA:
  misc_feature (1)..(378): Homolog of NCBI NO: 21553877 NR Description: shaggy related protein kinase ASK-GAMMA
  misc_feature (1)..(378): Homolog of NCBI NO: 18421039 NR Description: shaggy-like kinase alpha; protein id: supported by cDNA: gi_15028148, supported by cDNA: gi_16226767
  misc_feature (1)..(378): Homolog of NCBI NO: 541901 NR Description: protein kinase ASK-alpha (EC 2.7.1.-) - Arabidopsis thaliana >gi|460832|emb|CAA53181.1| shaggy related [Arabidopsis thaliana] >gi|1769889|emb|CAA48538.1| serine
  misc_feature (1)..(378): Homolog of NCBI NO: 2398519 NR Description: shaggy-like kinase alpha [Arabidopsis thaliana]
  misc_feature (38)..(378): Homolog of NCBI NO: 7434274 NR Description: hypothetical protein A_IG002P16.21 - Arabidopsis >gi|2191169|gb|AAB61055.1| Similar to shaggy related protein
  misc_feature (1)..(47): Homolog of NCBI NO: 7434274 NR Description: hypothetical protein A_IG002P16.21 - Arabidopsis >gi|2191169|gb|AAB61055.1| Similar to shaggy related protein
  misc_feature (1)..(378): Homolog of NCBI NO: 1709127 NR Description: Glycogen synthase kinase-3 homolog MsK-1
  misc_feature (1)..(378): Homolog of NCBI NO: 11133532 NR Description: Shaggy-related protein kinase NtK-1
  misc_feature (1)..(373): Homolog of NCBI NO: 481018 NR Description: protein kinase MSK-3 (EC 2.7.1.-) [similarity] -

SEQ ID NO: 77781 - DNA, 1586 bp, Arabidopsis thaliana
  misc_feature (1)..(1586): Ceres Seq. ID no. 12577572
  misc_feature: MA Experiment ID: 20000227 Result: Up-regulated in Transcription
  misc_feature: MA Experiment 20000227 PARAMETER Experiment Name: At_Root-Tips-vs-Tops_P Parameter: Tissue Value: Root Tips vs. Root Tops
  misc_feature: MA Experiment ID: 20001557 Result: Up-regulated in Transcription
  misc_feature: MA Experiment 20001557 PARAMETER Experiment Name: At_Drought_Soil_Dry_P Parameter: Age (day) Value: 27
  misc_feature: MA Experiment 20001557 PARAMETER Experiment Name: At_Drought_Soil_Dry_P Parameter: Organism Value: A. thaliana
  misc_feature: MA Experiment 20001557 PARAMETER Experiment Name: At_Drought_Soil_Dry_P Parameter: Plant Line Value: WS
  misc_feature: MA Experiment 20001557 PARAMETER Experiment Name: At_Drought_Soil_Dry_P Parameter: Post Timepoint (hr) Value: 3
  misc_feature: MA Experiment 20001557 PARAMETER Experiment Name: At_Drought_Soil_Dry_P Parameter: Post-Treatment Value: Re-Water vs. No Drought
  misc_feature: MA Experiment 20001557 PARAMETER Experiment Name: At_Drought_Soil_Dry_P Parameter: Timepoint (day) Value: 13
  misc_feature: MA Experiment 20001557 PARAMETER Experiment Name: At_Drought_Soil_Dry_P Parameter: Treatment Value: Drought vs. No Drought
ggcgaacgaaaccctaatcatcacttctccacttttgttcgtcatcctcttcaaaatttcttcaatttgattctgcaatttcctttatctctctctggattaagtttcaatttcttcttagcccgccatggatgctcagcgagctctgttggacgaactaatgggcgcagctcgtaatctgacagacgaagagagaagagggttcaaggaggttaagtgggacgatagagaagtatgtgcattctatatggttcgattttgtcctcatgacctctttgttaacacgaaaagcgatcttggagcatgctcgagaattcatgatccaaagttgaaagaaagcttcgagaactctccgaggcatgattcctatgtgcctaaattcgaggctgagcttgcacagttttgcgagaagttggtgaatgatcttgataggaaagttaggcgtgggcgagaacgtcttgcacaagaagttgaaccggttccaccaccttctctatcagcagagaaagctgaacaattgtctgtcttggaggagaaagttaagaaccttttggaacaagtggaagcacttggtgaagaaggcaaagtggatgaagctgaagcgctaatgaggaaggtggaagggctaaatgctgagaagacagtgttgttacaacgaccaactgacaaggtactcgcgatggctcaggagaagaagatggcattgtgtgaggtttgtggttcatttcttgtggctaatgatgcagtagaaagaacacagtctcatgtcactggaaagcaacatgttggctatggcttggttcgggattttattgctgaacaaaaagctgctaaagataaaggaaaggaagaagaaagactagtaagaggaaaagaagcagatgataagaggaaaccaagggagaaggaaagcgagagtaagaggagtggttctagtgatagagaaagatatcgtgatcgagaccgaaacagagatggtgacagacacagagaccgtggtagagattatagaaagccttatgacaggagatcgaggagtgggagagaggaccgagatcgaagcaggtcacgatctcctcatggaaggtctggtcacagaagggtgtcgagaagccccattcgccaatactagtttgagaccctcgtggaaggtctggtcacgaaagggtgttgagaagcaccatttgccagtactagtttgagataaggtgttgtcactatgtcttggggccaggaactttgcaaattaatgaggtagacaatgtgataccccctttggtttcataagcatgtgttgtcttttggaacttccttgttaaaatttatggataaaatttgtctttctaccggatcacagctattctaagagtttgagaccttaccgattctccttcatcggttatttgttaagaggtcaaaagcgttgaggtaggtattacccgtaaaacttttacattttcattgtatttctcgatacttgagatgctatagcgtcattttattttatttttgtcttttggtacaccatttcaagtttgatatacctttctgatttaaagaatacagaatcgggattgttgggatcg

SEQ ID NO: 77782 - protein, 334 aa, Arabidopsis thaliana; identical to SEQ ID NO: 46497
  peptide (1)..(334): Ceres Seq. ID no. 12577573
  misc_feature (1)..(257): Pfam Name: LUC7 N_terminus Pfam Description: LUC7 N_terminus
  misc_feature (1)..(334): Homolog of NCBI NO: 15242081 NR Description: arginine-aspartate-rich RNA binding protein-like; id: At5g51410.1, supported by cDNA: gi_1699050, supported by gi_18377713 [Arabidopsis thaliana] >gi|1699023|gb|AAB68037.1|
  misc_feature (1)..(332): Homolog of NCBI NO: 30524685 NR Description: salt tolerance protein 3 [Beta vulgaris]
  misc_feature (97)..(334): Homolog of NCBI NO: 1699053 NR Description: putative aspartate-arginine-rich mRNA binding
  misc_feature (1)..(332): Homolog of NCBI NO: 28411928 NR Description: OSJNBa0027N13.9 [Oryza sativa (japonica
  misc_feature (179)..(334): Homolog of NCBI NO: 1699055 NR Description: putative aspartate-arginine-rich mRNA binding
  misc_feature (7)..(329): Homolog of NCBI NO: 19923485 NR Description: cisplatin resistance-associated overexpressed
  misc_feature (7)..(329): Homolog of NCBI NO: 23956166 NR Description: RIKEN cDNA 3300001P08 [Mus musculus]
  misc_feature (7)..(329): Homolog of NCBI NO: 7023491 NR Description: unnamed protein product [Homo sapiens]
  misc_feature (1)..(177): Homolog of NCBI NO: 24640172 NR Description: CG3198-PA [Drosophila melanogaster]
  misc_feature (188)..(305): Homolog of NCBI NO: 24640172 NR Description: CG3198-PA [Drosophila melanogaster]

SEQ ID NO: 77783 - protein, 323 aa, Arabidopsis thaliana; identical to SEQ ID NO: 46498
  peptide (1)..(323): Ceres Seq. ID no. 12577574
  misc_feature (1)..(246): Pfam Name: LUC7 N_terminus Pfam Description: LUC7 N_terminus
  misc_feature (1)..(323): Homolog of NCBI NO: 15242081 NR Description: arginine-aspartate-rich RNA binding protein-like; id: At5g51410.1, supported by cDNA: gi_1699050, supported by gi_18377713 [Arabidopsis thaliana] >gi|1699023|gb|AAB68037.1|
  misc_feature (1)..(321): Homolog of NCBI NO: 30524685 NR Description: salt tolerance protein 3 [Beta vulgaris]
  misc_feature (86)..(323): Homolog of NCBI NO: 1699053 NR Description: putative aspartate-arginine-rich mRNA binding
  misc_feature (1)..(321): Homolog of NCBI NO: 28411928 NR Description: OSJNBa0027N13.9 [Oryza sativa (japonica
  misc_feature (168)..(323): Homolog of NCBI NO: 1699055 NR Description: putative aspartate-arginine-rich mRNA binding
  misc_feature (1)..(318): Homolog of NCBI NO: 19923485 NR Description: cisplatin resistance-associated overexpressed
  misc_feature (1)..(318): Homolog of NCBI NO: 23956166 NR Description: RIKEN cDNA 3300001P08 [Mus musculus]
  misc_feature (1)..(318): Homolog of NCBI NO: 7023491 NR Description: unnamed protein product [Homo sapiens]
  misc_feature (1)..(166): Homolog of NCBI NO: 24640172 NR Description: CG3198-PA [Drosophila melanogaster]
  misc_feature (177)..(294): Homolog of NCBI NO: 24640172 NR Description: CG3198-PA [Drosophila melanogaster]

SEQ ID NO: 77784 - protein, 294 aa, Arabidopsis thaliana; identical to SEQ ID NO: 46499
  peptide (1)..(294): Ceres Seq. ID no. 12577575
  misc_feature (1)..(217): Pfam Name: LUC7 N_terminus Pfam Description: LUC7 N_terminus
  misc_feature (1)..(294): Homolog of NCBI NO: 15242081 NR Description: arginine-aspartate-rich RNA binding protein-like; id: At5g51410.1, supported by cDNA: gi_1699050, supported by gi_18377713 [Arabidopsis thaliana] >gi|1699023|gb|AAB68037.1|
  misc_feature (1)..(292): Homolog of NCBI NO: 30524685 NR Description: salt tolerance protein 3 [Beta vulgaris]
  misc_feature (57)..(294): Homolog of NCBI NO: 1699053 NR Description: putative aspartate-arginine-rich mRNA binding
  misc_feature (1)..(292): Homolog of NCBI NO: 28411928 NR Description: OSJNBa0027N13.9 [Oryza sativa (japonica
  misc_feature (139)..(294): Homolog of NCBI NO: 1699055 NR Description: putative aspartate-arginine-rich mRNA binding
  misc_feature (1)..(289): Homolog of NCBI NO: 19923485 NR Description: cisplatin resistance-associated overexpressed
  misc_feature (1)..(289): Homolog of NCBI NO: 23956166 NR Description: RIKEN cDNA 3300001P08 [Mus musculus]
  misc_feature (1)..(289): Homolog of NCBI NO: 7023491 NR Description: unnamed protein product [Homo sapiens]
  misc_feature (1)..(137): Homolog of NCBI NO: 24640172 NR Description: CG3198-PA [Drosophila melanogaster]
  misc_feature (148)..(265): Homolog of NCBI NO: 24640172 NR Description: CG3198-PA [Drosophila melanogaster]

SEQ ID NO: 77785 - DNA, 1487 bp, Arabidopsis thaliana
  misc_feature (1)..(1487): Ceres Seq. ID no. 12577576
  misc_feature: MA Experiment ID: 20000328 Result: Down-regulated in Transcription
  misc_feature: MA Experiment 20000328 PARAMETER Experiment Name: At_42deg_Heat_Sub_P Parameter: Age (day) Value: 14
  misc_feature: MA Experiment 20000328 PARAMETER Experiment Name: At_42deg_Heat_Sub_P Parameter: Organism Value: A. thaliana
  misc_feature: MA Experiment 20000328 PARAMETER Experiment Name: At_42deg_Heat_Sub_P Parameter: Plant Line Value: WS
  misc_feature: MA Experiment 20000328 PARAMETER Experiment Name: At_42deg_Heat_Sub_P Parameter: Temperature (deg C) Value: 42 vs. 22
  misc_feature: MA Experiment 20000328 PARAMETER Experiment Name: At_42deg_Heat_Sub_P Parameter: Timepoint (hr) Value: 6
  misc_feature: MA Experiment 20000328 PARAMETER Experiment Name: At_42deg_Heat_Sub_P Parameter: Tissue Value: Aerial
ctcagatcgatgaagagaagaattaggatttttacgttttcatcggcttgaaagtttgaagagttttgtagcctgaaaaatggcgtcagtgggtatagctcctaatcctggagcaagagactctactggtgttgataaattgcctgaagaaatgaatgacatgaaaattcgtgacgataaagaaatggaagcgacagtggtagatggaaatggaacagagactggacatatcattgtgactactattggtggtagaaatggccaaccaaaacagacaattagctacatggctgagcgtgttgttggtcacggatcttttggtgttgtgttccaagcgaaatgtcttgagacaggagaaactgttgcgataaagaaagttttacaagataggaggtacaagaaccgtgagcttcaaaccatgaggctacttgaccatcctaatgttgtgtctctgaaacattgtttcttctcaaccactgaaaaagatgagctttacctcaatcttgttcttgagtacgttccagaaactgttcatcgtgttatcaaacactacaacaaactgaatcagagaatgcctcttatatacgtcaaactttacacttatcagatttttagagccttatcttacattcaccgatgcattggtgtgtgtcatcgtgacataaaacctcaaaacttgttggtaaatccgcacactcatcaagtaaagctatgtgattttggaagtgcaaaagtattggtaaaaggagaaccaaacatttcctacatctgctcgaggtattacagagcacctgaacttatttttggagcaaccgagtatacgacagccattgatgtctggtctgcaggatgtgttctagctgaactattgcttggacagcccttgttccctggtgagagcggtgttgatcaacttgtacacattatcaaggtcttgggaacgcctactagagaagaaatcaagtgcatgaacccaaactacacggaattcaaattccctcagattaaagctcatccatggcacaagattttccacaaacgcatgcctccagaagctgttgatttggtctcaagacttcttcaatactctcctaatctacgaagtgccgctctcgacacattagtccacccattctttgatgagttaagagacccaaacgcacgtctacctaatggacgtttccttccaccggcttttcacttcaagcctcacgagctgaaaggtgtaccattggagatggtagctaagttagtacctgagcatgcaaggaagcagtgtccttggctcggtttgtgatttcctcttaatgtagcatgaacacaacaaacacttcttataaattacctctctatgtatcaatatgtcacaaactgatatgcaccctttgtttgttgtatgagtagagaaaaaaagagttattactatggttggttggttcataatgtaaaagcccaccaagattttttatctagataaagagtttgct

SEQ ID NO: 77786 - protein, 405 aa, Arabidopsis thaliana
  peptide (1)..(405): Ceres Seq. ID no. 12577577
  misc_feature (69)..(353): Pfam Name: Protein kinase domain Pfam Description: Protein kinase domain
  misc_feature (1)..(405): Homolog of NCBI NO: 541901 NR Description: protein kinase ASK-alpha (EC 2.7.1.-) - Arabidopsis thaliana >gi|460832|emb|CAA53181.1| shaggy related [Arabidopsis thaliana] >gi|1769889|emb|CAA48538.1| serine
  misc_feature (1)..(405): Homolog of NCBI NO: 2398519 NR Description: shaggy-like kinase alpha [Arabidopsis thaliana]
  misc_feature (1)..(405): Homolog of NCBI NO: 18421039 NR Description: shaggy-like kinase alpha; protein id: supported by cDNA: gi_15028148, supported by cDNA: gi_16226767
  misc_feature (65)..(405): Homolog of NCBI NO: 7434274 NR Description: hypothetical protein A_IG002P16.21 - Arabidopsis >gi|2191169|gb|AAB61055.1| Similar to shaggy related protein
  misc_feature (1)..(74): Homolog of NCBI NO: 7434274 NR Description: hypothetical protein A_IG002P16.21 - Arabidopsis >gi|2191169|gb|AAB61055.1| Similar to shaggy related protein
  misc_feature (1)..(405): Homolog of NCBI NO: 21553877 NR Description: shaggy related protein kinase ASK-GAMMA
  misc_feature (1)..(405): Homolog of NCBI NO: 15230058 NR Description: shaggy related protein kinase, ASK-GAMMA; protein At3g05840.1, supported by cDNA: 17739., supported by cDNA:
  misc_feature (1)..(405): Homolog of NCBI NO: 1709127 NR Description: Glycogen synthase kinase-3 homolog MsK-1
  misc_feature (1)..(405): Homolog of NCBI NO: 11133532 NR Description: Shaggy-related protein kinase NtK-1
  misc_feature (1)..(404): Homolog of NCBI NO: 481018 NR Description: protein kinase MSK-3 (EC 2.7.1.-) [similarity] -
MASVGIAPNPGARDSTGVDKLPEEMNDMKIRDDKEMEATVVDGNGTETGHIIVTTIGGRNGQPKQTISYMAERVVGHGSFGVVFQAKCLETGETVAIKKVLQDRRYKNRELQTMRLLDHPNVVSLKHCFFSTTEKDELYLNLVLEYVPETVHRVIKHYNKLNQRMPLIYVKLYTYQIFRALSYIHRCIGVCHRDIKPQNLLVNPHTHQVKLCDFGSAKVLVKGEPNISYICSRYYRAPELIFGATEYTTAIDVWSAGCVLAELLLGQPLFPGESGVDQLVHIIKVLGTPTREEIKCMNPNYTEFKFPQIKAHPWHKIFHKRMPPEAVDLVSRLLQYSPNLRSAALDTLVHPFFDELRDPNARLPNGRFLPPAFHFKPHELKGVPLEMVAKLVPEHARKQCPWLGL

SEQ ID NO: 77787 - protein, 381 aa, Arabidopsis thaliana
  peptide (1)..(381): Ceres Seq. ID no. 12577578
  misc_feature (45)..(329): Pfam Name: Protein kinase domain Pfam Description: Protein kinase domain
  misc_feature (1)..(381): Homolog of NCBI NO: 541901 NR Description: protein kinase ASK-alpha (EC 2.7.1.-) - Arabidopsis thaliana >gi|460832|emb|CAA53181.1| shaggy related [Arabidopsis thaliana] >gi|1769889|emb|CAA48538.1| serine
  misc_feature (1)..(381): Homolog of NCBI NO: 2398519 NR Description: shaggy-like kinase alpha [Arabidopsis thaliana]
  misc_feature (1)..(381): Homolog of NCBI NO: 18421039 NR Description: shaggy-like kinase alpha; protein id: supported by cDNA: gi_15028148, supported by cDNA: gi_16226767
  misc_feature (41)..(381): Homolog of NCBI NO: 7434274 NR Description: hypothetical protein A_IG002P16.21 - Arabidopsis >gi|2191169|gb|AAB61055.1| Similar to shaggy related protein
  misc_feature (1)..(50): Homolog of NCBI NO: 7434274 NR Description: hypothetical protein A_IG002P16.21 - Arabidopsis >gi|2191169|gb|AAB61055.1| Similar to shaggy related protein
  misc_feature (1)..(381): Homolog of NCBI NO: 21553877 NR Description: shaggy related protein kinase ASK-GAMMA
  misc_feature (1)..(381): Homolog of NCBI NO: 15230058 NR Description: shaggy related protein kinase, ASK-GAMMA; protein At3g05840.1, supported by cDNA: 17739., supported by cDNA:
  misc_feature (1)..(381): Homolog of NCBI NO: 1709127 NR Description: Glycogen synthase kinase-3 homolog MsK-1
  misc_feature (1)..(381): Homolog of NCBI NO: 11133532 NR Description: Shaggy-related protein kinase NtK-1
  misc_feature (1)..(380): Homolog of NCBI NO: 481018 NR Description: protein kinase MSK-3 (EC 2.7.1.-) [similarity] -
MNDMKIRDDKEMEATVVDGNGTETGHIIVTTIGGRNGQPKQTISYMAERVVGHGSFGVVFQAKCLETGETVAIKKVLQDRRYKNRELQTMRLLDHPNVVSLKHCFFSTTEKDELYLNLVLEYVPETVHRVIKHYNKLNQRMPLIYVKLYTYQIFRALSYIHRCIGVCHRDIKPQNLLVNPHTHQVKLCDFGSAKVLVKGEPNISYICSRYYRAPELIFGATEYTTAIDVWSAGCVLAELLLGQPLFPGESGVDQLVHIIKVLGTPTREEIKCMNPNYTEFKFPQIKAHPWHKIFHKRMPPEAVDLVSRLLQYSPNLRSAALDTLVHPFFDELRDPNARLPNGRFLPPAFHFKPHELKGVPLEMVAKLVPEHARKQCPWLGL

SEQ ID NO: 77788 - protein, 378 aa, Arabidopsis thaliana
  peptide (1)..(378): Ceres Seq. ID no. 12577579
  misc_feature (42)..(326): Pfam Name: Protein kinase domain Pfam Description: Protein kinase domain
  misc_feature (1)..(378): Homolog of NCBI NO: 541901 NR Description: protein kinase ASK-alpha (EC 2.7.1.-) - Arabidopsis thaliana >gi|460832|emb|CAA53181.1| shaggy related [Arabidopsis thaliana] >gi|1769889|emb|CAA48538.1| serine
  misc_feature (1)..(378): Homolog of NCBI NO: 2398519 NR Description: shaggy-like kinase alpha [Arabidopsis thaliana]
  misc_feature (1)..(378): Homolog of NCBI NO: 18421039 NR Description: shaggy-like kinase alpha; protein id: supported by cDNA: gi_15028148, supported by cDNA: gi_16226767
  misc_feature (38)..(378): Homolog of NCBI NO: 7434274 NR Description: hypothetical protein A_IG002P16.21 - Arabidopsis >gi|2191169|gb|AAB61055.1| Similar to shaggy related protein
  misc_feature (1)..(47): Homolog of NCBI NO: 7434274 NR Description: hypothetical protein A_IG002P16.21 - Arabidopsis >gi|2191169|gb|AAB61055.1| Similar to shaggy related protein
  misc_feature (1)..(378): Homolog of NCBI NO: 21553877 NR Description: shaggy related protein kinase ASK-GAMMA
  misc_feature (1)..(378): Homolog of NCBI NO: 15230058 NR Description: shaggy related protein kinase, ASK-GAMMA; protein At3g05840.1, supported by cDNA: 17739., supported by cDNA:
  misc_feature (1)..(378): Homolog of NCBI NO: 1709127 NR Description: Glycogen synthase kinase-3 homolog MsK-1
  misc_feature (1)..(378): Homolog of NCBI NO: 11133532 NR Description: Shaggy-related protein kinase NtK-1
  misc_feature (1)..(377): Homolog of NCBI NO: 481018 NR Description: protein kinase MSK-3 (EC 2.7.1.-) [similarity] -
MKIRDDKEMEATVVDGNGTETGHIIVTTIGGRNGQPKQTISYMAERVVGHGSFGVVFQAKCLETGETVAIKKVLQDRRYKNRELQTMRLLDHPNVVSLKHCFFSTTEKDELYLNLVLEYVPETVHRVIKHYNKLNQRMPLIYVKLYTYQIFRALSYIHRCIGVCHRDIKPQNLLVNPHTHQVKLCDFGSAKVLVKGEPNISYICSRYYRAPELIFGATEYTTAIDVWSAGCVLAELLLGQPLFPGESGVDQLVHIIKVLGTPTREEIKCMNPNYTEFKFPQIKAHPWHKIFHKRMPPEAVDLVSRLLQYSPNLRSAALDTLVHPFFDELRDPNARLPNGRFLPPAFHFKPHELKGVPLEMVAKLVPEHARKQCPWLGL

SEQ ID NO: 77789 - DNA, 551 bp, Arabidopsis thaliana
  misc_feature (1)..(551): Ceres Seq. ID no. 12577992
  misc_feature: MA Experiment ID: 108595 Result: Up-regulated in Transcription
  misc_feature: MA Experiment 108595 PARAMETER Experiment Name: At_Ler-pi_Ovule_cDNA_P Parameter: Plant Line Value: null
  misc_feature: MA Experiment ID: 20000113 Result: Up-regulated in Transcription
  misc_feature: MA Experiment 20000113 PARAMETER Experiment Name: At_42deg_Heat_cDNA_P Parameter: Temperature (deg C) Value: 42 vs. 22
  misc_feature: MA Experiment 20000113 PARAMETER Experiment Name: At_42deg_Heat_cDNA_P Parameter: Timepoint (hr) Value: 8
  misc_feature: MA Experiment 20000113 PARAMETER Experiment Name: At_42deg_Heat_cDNA_P Parameter: Tissue Value: Aerial
  misc_feature: MA Experiment ID: 20001451 Result: Up-regulated in Transcription
  misc_feature: MA Experiment 20001451 PARAMETER Experiment Name: At_Far-red-induction_P Parameter: Age (day) Value: 7
  misc_feature: MA Experiment 20001451 PARAMETER Experiment Name: At_Far-red-induction_P Parameter: Light Value: Far-red vs. White
  misc_feature: MA Experiment 20001451 PARAMETER Experiment Name: At_Far-red-induction_P Parameter: Organism Value: A. thaliana
  misc_feature: MA Experiment 20001451 PARAMETER Experiment Name: At_Far-red-induction_P Parameter: Plant Line Value: Columbia
  misc_feature: MA Experiment 20001451 PARAMETER Experiment Name: At_Far-red-induction_P Parameter: Timepoint (hr) Value: 24
  misc_feature: MA Experiment 20001451 PARAMETER Experiment Name: At_Far-red-induction_P Parameter: Tissue Value: Whole Plant
aactttacgttggtattatctctggtttcacattctcttaaccctcttggtgaatgcgtcattgaaacgccattatccgccgtgctaatctgaatctcctcccccgtcggaaaaaatggccactggtggaaaagtctccttcaaagtcactctgacttcggatcctaagcttcctttcaaagttttcagcgtaccagaaggagctccgttcacggcggttctgaaattcgcagcagaagagttcaaggttcctccacaaaccagcgccatcatcactaatgatgggatcgggatcaatcctcaacagagtgcaggaaacgtttttctgaagcacggatctgaactaagattgatcccgcgtgatagagttggagctgtgtttgtgatggatccatagatgatgtgtaagcaatgattaaaaactcagttccaaaaaaaacataataatatactgaaatgcttatgtacaacttcgttgaataaatatgtaatcgtcacaattgaagtgagttgaatttggtcaagttatatgtctgttataattcatattt

SEQ ID NO: 77790 - protein, 93 aa, Arabidopsis thaliana; identical to SEQ ID NO: 26059
  peptide (1)..(93): Ceres Seq. ID no. 12577993
  misc_feature (5)..(80): Pfam Name: Uncharacterised protein family (UPF0185) Pfam Description: Uncharacterised protein family (UPF0185)
  misc_feature (1)..(93): Homolog of NCBI NO: 15217447 NR Description: unknown protein; protein id: At1g77710.1, by cDNA: gi_20260379 [Arabidopsis thaliana] Hypothetical protein At1g77710 >gi|25406525|pir||H96806 unknown
  misc_feature (2)..(88): Homolog of NCBI NO: 34905822 NR Description: P0483G10.15 [Oryza sativa (japonica >gi|20140685|sp|Q94DM8|U185_ORYSA Hypothetical protein
  misc_feature (1)..(88): Homolog of NCBI NO: 20140686 NR Description: Hypothetical protein pr46A
  misc_feature (1)..(87): Homolog of NCBI NO: 40889046 NR Description: Chain A, Solution Structure Of Mouse Hypothetical
  misc_feature (1)..(86): Homolog of NCBI NO: 39589640 NR Description: Hypothetical protein CBG12253 [Caenorhabditis
  misc_feature (4)..(86): Homolog of NCBI NO: 17557033 NR Description: Eukaryotic protein similar to human bone marrow BM- 002 (9.8 kD) [Caenorhabditis elegans] Hypothetical 9.8 kDa protein ZK652.3 in chromosome III 3H949
  misc_feature (6)..(87): Homolog of NCBI NO: 7705300 NR Description: hypothetical protein BM-002 [Homo sapiens]
  misc_feature (6)..(86): Homolog of NCBI NO: 37595394 NR Description: hypothetical protein BM-002 [Danio rerio]
  misc_feature (6)..(86): Homolog of NCBI NO: 28277496 NR Description: Similar to RIKEN cDNA 1810045K17 gene [Danio
  misc_feature (6)..(80): Homolog of NCBI NO: 1235522 NR Description: ORF is homologous to hypothetical 9.8 kD protein

SEQ ID NO: 77791 - DNA, 1569 bp, Arabidopsis thaliana
  misc_feature (1)..(1569): Ceres Seq. ID no. 12578019
  misc_feature: MA Experiment ID: 20000314 Result: Up-regulated in Transcription
  misc_feature: MA Experiment 20000314 PARAMETER Experiment Name: At_14day_Shoots-Roots_Sub_P Parameter: Age (day) Value: 14
  misc_feature: MA Experiment 20000314 PARAMETER Experiment Name: At_14day_Shoots-Roots_Sub_P Parameter: Organism Value: A. thaliana
  misc_feature: MA Experiment 20000314 PARAMETER Experiment Name: At_14day_Shoots-Roots_Sub_P Parameter: Plant Line Value: WS
  misc_feature: MA Experiment 20000314 PARAMETER Experiment Name: At_14day_Shoots-Roots_Sub_P Parameter: Tissue Value: Roots vs. Whole Plant
  misc_feature: MA Experiment ID: 20000440 Result: Up-regulated in Transcription
  misc_feature: MA Experiment 20000440 PARAMETER Experiment Name: At_Closed-Flower__Sub_P Parameter: Tissue Value: Closed Flower vs. Whole Plant
gatctcaacatctctcaatttttctctctacgttgaagaaactttcgaatttcccgttagttcttctccacgctttctctttccctttatctcttatctggttaagccaatcttgattgtttggattcgtaaccgatcagtgttgtgaggtttgaaagaatggtgttttttcgcagcgtatcagccatttcaagactacggtctcgagcagtgcaacaatcctcacttagtaactccgtcagatggctccactcttctgaattggacttgaagtcgcagatgcaagagatcattccagaacaacaggaccgtttgaagaaactgaaatcagaacaaggaaaggttccagtggggaacatcaccgttgatatggtacttggtggaatgagagggatgactggattactctgggaaacctcattgcttgatgcagatgagggaatacggtttagaggcatgtcgattcctgaatgtcagaaaatattaccttcagctgagtctggagaagagcccttgcctgagagtcttctgtggcttctattaactggaaaggtgccaactaaagagcaagctaatgctttgtcaacagagttggctcatcgtgcggctgtgccagattatatatacaaagctatagatgctttgccttcaacagctcatccaatgactcaatttgctagtggtgttatggcccttcaggttcaaagtgagtttcaaaaggcgtatgagcagggtgatatttctaagtcaaagtactgggaaccaaccttcgaagatgccctaaacttgattgctcgtgttcctgttgtagcttcatacgtttatcggaggatgtacaaggatggtagcatcattccattagatgattctttggattatggtgcaaatttttcacacatgctgggatttgatagtcctcagatgaaagagctcatgaggctttatgtcactatccacagtgatcatgaaggtggaaatgttagtgctcacgctggtcacctggttgggagtgcactttcagatccatatctttcatttgctgctgcattgaatggtttagctgggccactccatggtttggctaatcaggaagttttgctgtggatcaaattagttgttgaggaatgtggagaaagtatatcaaaggaacagctaaaagattatgtctggaaaacgttaaacagtggcaaggttgttccaggatatggccatggtgttttgcgtaaaacggatccaagatatatatgccaaagagagtttgccttgaagcatctacctgatgatcctctttttcagctggtctcaaaactttatgaagtggtgcctcctattctaaccgagctgggaaaggtcaagaacccgtggcctaacgttgatgctcatagcggagtgcttctgaactactatggtctaaccgaagcaagatactacacggtgctttttggcgtctcaagaagtcttggaatctgctcgcagctgatatgggacagggcacttggactgccacttgagagaccaaagagtgtaaacatggactggctcgataacttcacgcgcttgaaccgctaa

SEQ ID NO: 77792 - protein, 469 aa, Arabidopsis thaliana
  peptide (1)..(469): Ceres Seq. ID no. 12578020
  misc_feature (75)..(453): Pfam Name: Citrate synthase Pfam Description: Citrate synthase
  misc_feature (36)..(469): Homolog of NCBI NO: 15232248 NR Description: citrate synthase-like protein; protein id:
  misc_feature (1)..(462): Homolog of NCBI NO: 18406515 NR Description: citrate synthase; protein id: At2g44350.1, by cDNA: 16528., supported by cDNA: gi_14423561 [Arabidopsis >gi|27735166|sp|P20115|CISY_ARATH Citrate synthase, mitochondrial
  misc_feature (1)..(462): Homolog of NCBI NO: 21553775 NR Description: citrate synthase [Arabidopsis thaliana]
  misc_feature (1)..(462): Homolog of NCBI NO: 30689693 NR Description: citrate synthase [Arabidopsis thaliana]
  misc_feature (1)..(463): Homolog of NCBI NO: 8928010 NR Description: Citrate synthase, mitochondrial precursor
  misc_feature (1)..(466): Homolog of NCBI NO: 15982952 NR Description: citrate synthase [Prunus persica]
  misc_feature (1)..(462): Homolog of NCBI NO: 1352088 NR Description: Citrate synthase, mitochondrial precursor
  misc_feature (1)..(463): Homolog of NCBI NO: 1556429 NR Description: citrate synthase [Nicotiana tabacum]
  misc_feature (1)..(463): Homolog of NCBI NO: 11066954 NR Description: citrate synthase [Oryza sativa]
  misc_feature (32)..(466): Homolog of NCBI NO: 1556380 NR Description: citrate (si)-synthase [Beta vulgaris]
MVFFRSVSAISRLRSRAVQQSSLSNSVRWLHSSELDLKSQMQEIIPEQQDRLKKLKSEQGKVPVGNITVDMVLGGMRGMTGLLWETSLLDADEGIRFRGMSIPECQKILPSAESGEEPLPESLLWLLLTGKVPTKEQANALSTELAHRAAVPDYIYKAIDALPSTAHPMTQFASGVMALQVQSEFQKAYEQGDISKSKYWEPTFEDALNLIARVPVVASYVYRRMYKDGSIIPLDDSLDYGANFSHMLGFDSPQMKELMRLYVTIHSDHEGGNVSAHAGHLVGSALSDPYLSFAAALNGLAGPLHGLANQEVLLWIKLVVEECGESISKEQLKDYVWKTLNSGKVVPGYGHGVLRKTDPRYICQREFALKHLPDDPLFQLVSKLYEVVPPILTELGKVKNPWPNVDAHSGVLLNYYGLTEARYYTVLFGVSRSLGICSQLIWDRALGLPLERPKSVNMDWLDNFTRLNR

SEQ ID NO: 77793 - protein, 429 aa, Arabidopsis thaliana
  peptide (1)..(429): Ceres Seq. ID no. 12578021
  misc_feature (35)..(413): Pfam Name: Citrate synthase Pfam Description: Citrate synthase
  misc_feature (1)..(429): Homolog of NCBI NO: 15232248 NR Description: citrate synthase-like protein; protein id:
  misc_feature (1)..(422): Homolog of NCBI NO: 18406515 NR Description: citrate synthase; protein id: At2g44350.1, by cDNA: 16528., supported by cDNA: gi_14423561 [Arabidopsis >gi|27735166|sp|P20115|CISY_ARATH Citrate synthase, mitochondrial
  misc_feature (1)..(422): Homolog of NCBI NO: 21553775 NR Description: citrate synthase [Arabidopsis thaliana]
  misc_feature (1)..(422): Homolog of NCBI NO: 30689693 NR Description: citrate synthase [Arabidopsis thaliana]
  misc_feature (1)..(423): Homolog of NCBI NO: 8928010 NR Description: Citrate synthase, mitochondrial precursor
  misc_feature (1)..(426): Homolog of NCBI NO: 15982952 NR Description: citrate synthase [Prunus persica]
  misc_feature (1)..(422): Homolog of NCBI NO: 1352088 NR Description: Citrate synthase, mitochondrial precursor
  misc_feature (1)..(423): Homolog of NCBI NO: 1556429 NR Description: citrate synthase [Nicotiana tabacum]
  misc_feature (1)..(423): Homolog of NCBI NO: 11066954 NR Description: citrate synthase [Oryza sativa]
  misc_feature (1)..(426): Homolog of NCBI NO: 1556380 NR Description: citrate (si)-synthase [Beta vulgaris]
MQEIIPEQQDRLKKLKSEQGKVPVGNITVDMVLGGMRGMTGLLWETSLLDADEGIRFRGMSIPECQKILPSAESGEEPLPESLLWLLLTGKVPTKEQANALSTELAHRAAVPDYIYKAIDALPSTAHPMTQFASGVMALQVQSEFQKAYEQGDISKSKYWEPTFEDALNLIARVPVVASYVYRRMYKDGSIIPLDDSLDYGANFSHMLGFDSPQMKELMRLYVTIHSDHEGGNVSAHAGHLVGSALSDPYLSFAAALNGLAGPLHGLANQEVLLWIKLVVEECGESISKEQLKDYVWKTLNSGKVVPGYGHGVLRKTDPRYICQREFALKHLPDDPLFQLVSKLYEVVPPILTELGKVKNPWPNVDAHSGVLLNYYGLTEARYYTVLFGVSRSLGICSQLIWDRALGLPLERPKSVNMDWLDNFTRLNR

SEQ ID NO: 77794 - protein, 399 aa, Arabidopsis thaliana
  peptide (1)..(399): Ceres Seq. ID no. 12578022
  misc_feature (5)..(383): Pfam Name: Citrate synthase Pfam Description: Citrate synthase
  misc_feature (1)..(399): Homolog of NCBI NO: 15232248 NR Description: citrate synthase-like protein; protein id:
  misc_feature (1)..(392): Homolog of NCBI NO: 18406515 NR Description: citrate synthase; protein id: At2g44350.1, by cDNA: 16528., supported by cDNA: gi_14423561 [Arabidopsis >gi|27735166|sp|P20115|CISY_ARATH Citrate synthase, mitochondrial
  misc_feature (1)..(392): Homolog of NCBI NO: 21553775 NR Description: citrate synthase [Arabidopsis thaliana]
  misc_feature (1)..(392): Homolog of NCBI NO: 30689693 NR Description: citrate synthase [Arabidopsis thaliana]
  misc_feature (1)..(393): Homolog of NCBI NO: 8928010 NR Description: Citrate synthase, mitochondrial precursor
  misc_feature (1)..(396): Homolog of NCBI NO: 15982952 NR Description: citrate synthase [Prunus persica]
  misc_feature (1)..(392): Homolog of NCBI NO: 1352088 NR Description: Citrate synthase, mitochondrial precursor
  misc_feature (1)..(393): Homolog of NCBI NO: 1556429 NR Description: citrate synthase [Nicotiana tabacum]
  misc_feature (1)..(393): Homolog of NCBI NO: 11066954 NR Description: citrate synthase [Oryza sativa]
  misc_feature (1)..(396): Homolog of NCBI NO: 1556380 NR Description: citrate (si)-synthase [Beta vulgaris]
MVLGGMRGMTGLLWETSLLDADEGIRFRGMSIPECQKILPSAESGEEPLPESLLWLLLTGKVPTKEQANALSTELAHRAAVPDYIYKAIDALPSTAHPMTQFASGVMALQVQSEFQKAYEQGDISKSKYWEPTFEDALNLIARVPVVASYVYRRMYKDGSIIPLDDSLDYGANFSHMLGFDSPQMKELMRLYVTIHSDHEGGNVSAHAGHLVGSALSDPYLSFAAALNGLAGPLHGLANQEVLLWIKLVVEECGESISKEQLKDYVWKTLNSGKVVPGYGHGVLRKTDPRYICQREFALKHLPDDPLFQLVSKLYEVVPPILTELGKVKNPWPNVDAHSGVLLNYYGLTEARYYTVLFGVSRSLGICSQLIWDRALGLPLERPKSVNMDWLDNFTRLNR

SEQ ID NO: 77795 - DNA, 2051 bp, Arabidopsis thaliana
  misc_feature (1)..(2051): Ceres Seq. ID no. 12580575
  misc_feature: MA Experiment ID: 20000169 Result: Up-regulated in Transcription
  misc_feature: MA Experiment 20000169 PARAMETER Experiment Name: At_100uM_ABA_P Parameter: Age (day) Value: 14
  misc_feature: MA Experiment 20000169 PARAMETER Experiment Name: At_100uM_ABA_P Parameter: Organism Value: A. thaliana
  misc_feature: MA Experiment 20000169 PARAMETER Experiment Name: At_100uM_ABA_P Parameter: Plant Line Value: WS
  misc_feature: MA Experiment 20000169 PARAMETER Experiment Name: At_100uM_ABA_P Parameter: Timepoint (hr) Value: 6
  misc_feature: MA Experiment 20000169 PARAMETER Experiment Name: At_100uM_ABA_P Parameter: Tissue Value: Aerial
  misc_feature: MA Experiment 20000169 PARAMETER Experiment Name: At_100uM_ABA_P Parameter: Treatment Value: 100uM ABA vs. No Treatment
  misc_feature: MA Experiment ID: 20000184 Result: Up-regulated in Transcription
  misc_feature: MA Experiment 20000184 PARAMETER Experiment Name: At_Shoots__P Parameter: Age (day) Value: 7
  misc_feature: MA Experiment 20000184 PARAMETER Experiment Name: At_Shoots__P Parameter: Tissue Value: Shoots vs. Whole Plant
  misc_feature: MA Experiment ID: 20000185 Result: Down-regulated in Transcription
  misc_feature: MA Experiment 20000185 PARAMETER Experiment Name: At_Roots__P Parameter: Age (day) Value: 7 vs. 21
  misc_feature: MA Experiment 20000185 PARAMETER Experiment Name: At_Roots__P Parameter: Organism Value: A. thaliana
  misc_feature: MA Experiment 20000185 PARAMETER Experiment Name: At_Roots__P Parameter: Tissue Value: Roots vs. Whole Plant
  misc_feature: MA Experiment ID: 20000234 Result: Up-regulated in Transcription
  misc_feature: MA Experiment 20000234 PARAMETER Experiment Name: At_Siliques_P Parameter: Age (day) Value: 21
  misc_feature: MA Experiment 20000234 PARAMETER Experiment Name: At_Siliques_P Parameter: Organism Value: A. thaliana
  misc_feature: MA Experiment 20000234 PARAMETER Experiment Name: At_Siliques_P Parameter: Plant Line Value: WS
  misc_feature: MA Experiment 20000234 PARAMETER Experiment Name: At_Siliques_P Parameter: Tissue Value: Less Than 5mm Siliques vs. Whole Plant
  misc_feature: MA Experiment ID: 20000265 Result: Up-regulated in Transcription
  misc_feature: MA Experiment 20000265 PARAMETER Experiment Name: At_Open_Flower_P Parameter: Age (day) Value: 21
  misc_feature: MA Experiment 20000265 PARAMETER Experiment Name: At_Open_Flower_P Parameter: Plant Line Value: WS
  misc_feature: MA Experiment 20000265 PARAMETER Experiment Name: At_Open_Flower_P Parameter: Tissue Value: Closed Flower vs. Whole Plant
  misc_feature: MA Experiment ID: 20000439 Result: Down-regulated in Transcription
  misc_feature: MA Experiment 20000439 PARAMETER Experiment Name: At_Roots__P Parameter: Age (day) Value: 14 vs. 21
  misc_feature: MA Experiment 20000439 PARAMETER Experiment Name: At_Roots__P Parameter: Organism Value: A. thaliana
  misc_feature: MA Experiment 20000439 PARAMETER Experiment Name: At_Roots__P Parameter: Tissue Value: Roots vs. Whole Plant
  misc_feature: MA Experiment ID: 20001247 Result: Up-regulated in Transcription
  misc_feature: MA Experiment 20001247 PARAMETER Experiment Name: At_Far-red-induction_P Parameter: Age (day) Value: 7
  misc_feature: MA Experiment 20001247 PARAMETER Experiment Name: At_Far-red-induction_P Parameter: Light Value: Far-red vs. White
  misc_feature: MA Experiment 20001247 PARAMETER Experiment Name: At_Far-red-induction_P Parameter: Organism Value: A. thaliana
  misc_feature: MA Experiment 20001247 PARAMETER Experiment Name: At_Far-red-induction_P Parameter: Plant Line Value: Columbia
  misc_feature: MA Experiment 20001247 PARAMETER Experiment Name: At_Far-red-induction_P Parameter: Timepoint (hr) Value: 1
  misc_feature: MA Experiment 20001247 PARAMETER Experiment Name: At_Far-red-induction_P Parameter: Tissue Value: Whole Plant
  misc_feature: MA Experiment ID: 20001248 Result: Down-regulated in Transcription
  misc_feature: MA Experiment 20001248 PARAMETER Experiment Name: At_Far-red-induction_P Parameter: Age (day) Value: 7
  misc_feature: MA Experiment 20001248 PARAMETER Experiment Name: At_Far-red-induction_P Parameter: Light Value: Far-red vs. White
  misc_feature: MA Experiment 20001248 PARAMETER Experiment Name: At_Far-red-induction_P Parameter: Organism Value: A. thaliana
  misc_feature: MA Experiment 20001248 PARAMETER Experiment Name: At_Far-red-induction_P Parameter: Plant Line Value: Columbia
  misc_feature: MA Experiment 20001248 PARAMETER Experiment Name: At_Far-red-induction_P Parameter: Timepoint (hr) Value: 4
  misc_feature: MA Experiment 20001248 PARAMETER Experiment Name: At_Far-red-induction_P Parameter: Tissue Value: Whole Plant
  misc_feature: MA Experiment ID: 20001557 Result: Up-regulated in Transcription
  misc_feature: MA Experiment 20001557 PARAMETER Experiment Name: At_Drought_Soil_Dry_P Parameter: Age (day) Value: 27
  misc_feature: MA Experiment 20001557 PARAMETER Experiment Name: At_Drought_Soil_Dry_P Parameter: Organism Value: A. thaliana
  misc_feature: MA Experiment 20001557 PARAMETER Experiment Name: At_Drought_Soil_Dry_P Parameter: Plant Line Value: WS
  misc_feature: MA Experiment 20001557 PARAMETER Experiment Name: At_Drought_Soil_Dry_P Parameter: Post Timepoint (hr) Value: 3
  misc_feature: MA Experiment 20001557 PARAMETER Experiment Name: At_Drought_Soil_Dry_P Parameter: Post-Treatment Value: Re-Water vs. No Drought
  misc_feature: MA Experiment 20001557 PARAMETER Experiment Name: At_Drought_Soil_Dry_P Parameter: Timepoint (day) Value: 13
  misc_feature: MA Experiment 20001557 PARAMETER Experiment Name: At_Drought_Soil_Dry_P Parameter: Treatment Value: Drought vs. No Drought
  misc_feature: MA Experiment ID: 20001558 Result: Up-regulated in Transcription
  misc_feature: MA Experiment 20001558 PARAMETER Experiment Name: At_Drought_Soil_Dry_P Parameter: Age (day) Value: 27
  misc_feature: MA Experiment 20001558 PARAMETER Experiment Name: At_Drought_Soil_Dry_P Parameter: Organism Value: A. thaliana
  misc_feature: MA Experiment 20001558 PARAMETER Experiment Name: At_Drought_Soil_Dry_P Parameter: Plant Line Value: WS
  misc_feature: MA Experiment 20001558 PARAMETER Experiment Name: At_Drought_Soil_Dry_P Parameter: Post Timepoint (hr) Value: 6
  misc_feature: MA Experiment 20001558 PARAMETER Experiment Name: At_Drought_Soil_Dry_P Parameter: Post-Treatment Value: Re-Water vs. No Drought
  misc_feature: MA Experiment 20001558 PARAMETER Experiment Name: At_Drought_Soil_Dry_P Parameter: Timepoint (day) Value: 13
  misc_feature: MA Experiment 20001558 PARAMETER Experiment Name: At_Drought_Soil_Dry_P Parameter: Treatment Value: Drought vs. No Drought
  misc_feature: MA Experiment ID: 20001560 Result: Up-regulated in Transcription
  misc_feature: MA Experiment 20001560 PARAMETER Experiment Name: At_Drought_Soil_Dry_P Parameter: Age (day) Value: 28
  misc_feature: MA Experiment 20001560 PARAMETER Experiment Name: At_Drought_Soil_Dry_P Parameter: Organism Value: A. thaliana
  misc_feature: MA Experiment 20001560 PARAMETER Experiment Name: At_Drought_Soil_Dry_P Parameter: Plant Line Value: WS
  misc_feature: MA Experiment 20001560 PARAMETER Experiment Name: At_Drought_Soil_Dry_P Parameter: Post Timepoint (hr) Value: None
  misc_feature: MA Experiment 20001560 PARAMETER Experiment Name: At_Drought_Soil_Dry_P Parameter: Post-Treatment Value: None
  misc_feature: MA Experiment 20001560 PARAMETER Experiment Name: At_Drought_Soil_Dry_P Parameter: Timepoint (day) Value: 14
  misc_feature: MA Experiment 20001560 PARAMETER Experiment Name: At_Drought_Soil_Dry_P Parameter: Treatment Value: Drought vs. No Drought
  misc_feature: MA Experiment ID: 20001911 Result: Down-regulated in Transcription
  misc_feature: MA Experiment 20001911 PARAMETER Experiment Name: At_Drought_Reproduction_P Parameter: Age (day) Value: 40
  misc_feature: MA Experiment 20001911 PARAMETER Experiment Name: At_Drought_Reproduction_P Parameter: Organism Value: A. thaliana
  misc_feature: MA Experiment 20001911 PARAMETER Experiment Name: At_Drought_Reproduction_P Parameter: Plant Line Value: WS
  misc_feature: MA Experiment 20001911 PARAMETER Experiment Name: At_Drought_Reproduction_P Parameter: Timepoint (day) Value: 10
  misc_feature: MA Experiment 20001911 PARAMETER Experiment Name: At_Drought_Reproduction_P Parameter: Tissue Value: Flowers
  misc_feature: MA Experiment 20001911 PARAMETER Experiment Name: At_Drought_Reproduction_P Parameter: Treatment Value: Drought vs. No Drought
atgagaaaatatcattgattatggttgcttctgagattaaatccccggtgagtgtccccgagactccgggaagctcctctgtgcatcataggaagcagttgagtgtgttcttcatagaatcagataacagacgtcttgctcttggccgtggctataccggaggaaccactcccgttaacatccatggcaaacccatcgccaatctttccaaaaccggtggttggatcgcagctttcttcatttttggaaatgaaatggcagagagaatggcgtatttcggactctcggtgaacatggtggcgttcatgttctacgtaatgcataggccttttgaaagttcatcaaacgcagtcaacaacttccttggcatctctcaagcctcctctgttcttggaggcttcttagccgacgcttacttgggtcgatactggactattgccatcttcactaccatgtatcttgtcggtttgataggaataacattgggggcaagtttgaagatgttcgtaccagaccagagcaactgtggccagttatcattgctcttaggaaattgtgaagaagccaaatcttggcaaatgctttatctctacacggttctctacataaccggattcggagctgctggtataaggccatgtgtttcctcatttggtgctgaccagtttgatgagaagagcaaagactacaagacacatttagaccgtttcttcaacttcttctatctatcggtcactttaggcgcaatcattgccttcactttggtggtatatgttcaaatggaacttggttggggtatggcttttggcacattggccgtagccatggggatttctaatgctttgttctttgctggtacaccgctttatcggcataggttgcctggtggtagtcccttgactagggtagctcaggtcttagttgccgctttccgcaaacgaaatgcagctttcacaagcagtgagttcatcggtctttacgaagttcctggcttgaaatctgctattaatggcagtcgtaaaatccctcattccaatgatttcatatggctagacaaggcggcacttgagttgaaagaagatggattggaaccatctccatggaagctatgcacagtaacacaagtagaggaagtgaagattctgatcagattgattccaatcccaacatgcactataatgctgagtctggtcttgactgagtatcttacactctcagtgcaacaagcttacacactcaacacacacattcaacacctcaagcttccagtgacctgcatgccagttttcccaggcctaagcattttcctcattctctccctttattactctgtcttcgtccctatcaccagaagaatcactggcaatcctcatggtgcttcccagcttcaaagagtgggcatagggctagcagtttcaatcatatcagtagcttgggctgggctattcgagaactacaggagacattacgcgatacaaaatggttttgagttcaacttcttgacccaaatgcctgatctaaccgcgtactggttgttaatccagtactgtctcatcggaatcgcagaggttttctgcatagtagggctattggagttcctttacgaggaagctccggatgctatgaagagtattggttcggcttacgctgctctagccggcgggttagggtgttttgctgccaccattttgaacaatattgtcaaggctgcgactcgggactcagatgggaaatcgtggttatcgcagaacataaacacggggagattcgactgcttgtactggttgctcacacttctgagctttttgaatttctgtgtgttcctttggtcagcgcataggtacaagtaccgagctatcgagtctgaggaagacaagagtagtgctgttctttaaagacaccacttctgtgttctcttctcgttattctttttgataaaacagcagtaattgtatcatcctactttgctttcctatagctaatgtttaagggtggaaaatccgctaaacgtgattgttcgtttgtaagaagaccaataaaattaagttgtt

SEQ ID NO: 77796 - protein, 630 aa, Arabidopsis thaliana
  peptide (1)..(630): Ceres Seq. ID no. 12580576
  misc_feature (142)..(553): Pfam Name: POT family Pfam Description: POT family
  misc_feature (53)..(617): Homolog of NCBI NO: 34894042 NR Description: putative peptide transporter-like protein [Oryza
  misc_feature (51)..(617): Homolog of NCBI NO: 15240905 NR Description: oligopeptide transporter - like protein; protein At5g01180.1 [Arabidopsis thaliana] >gi|11358593|pir||T45958
  misc_feature (51)..(617): Homolog of NCBI NO: 15232435 NR Description: peptide transport - like protein; protein id: supported by cDNA: 117581., supported by cDNA: gi_13430485,
  misc_feature (51)..(626): Homolog of NCBI NO: 34895718 NR Description: putative peptide transport protein [Oryza sativa
  misc_feature (51)..(615): Homolog of NCBI NO: 15076661 NR Description: peptide transporter [Oryza sativa (japonica >gi|15076663|dbj|BAB62327.1| peptide transporter [Oryza sativa
  misc_feature (51)..(628): Homolog of NCBI NO: 7489404 NR Description: peptide transport protein - barley
  misc_feature (58)..(615): Homolog of NCBI NO: 4102839 NR Description: LeOPT1 [Lycopersicon esculentum]
  misc_feature (52)..(623): Homolog of NCBI NO: 34394155 NR Description: putative peptide transport protein [Oryza sativa
  misc_feature (58)..(621): Homolog of NCBI NO: 15226861 NR Description: histidine transport protein (PTR2-B); protein id: supported by cDNA: gi_13937184, supported by cDNA: gi_633939
  misc_feature (58)..(621): Homolog of NCBI NO: 1076331 NR Description: histidine transport protein - Arabidopsis thaliana
EKISLIMVASEIKSPVSVPETPGSSSVHHRKQLSVFFIESDNRRLALGRGYTGGTTPVNIHGKPIANLSKTGGWIAAFFIFGNEMAERMAYFGLSVNMVAFMFYVMHRPFESSSNAVNNFLGISQASSVLGGFLADAYLGRYWTIAIFTTMYLVGLIGITLGASLKMFVPDQSNCGQLSLLLGNCEEAKSWQMLYLYTVLYITGFGAAGIRPCVSSFGADQFDEKSKDYKTHLDRFFNFFYLSVTLGAIIAFTLVVYVQMELGWGMAFGTLAVAMGISNALFFAGTPLYRHRLPGGSPLTRVAQVLVAAFRKRNAAFTSSEFIGLYEVPGLKSAINGSRKIPHSNDFIWLDKAALELKEDGLEPSPWKLCTVTQVEEVKILIRLIPIPTCTIMLSLVLTEYLTLSVQQAYTLNTHIQHLKLPVTCMPVFPGLSIFLILSLYYSVFVPITRRITGNPHGASQLQRVGIGLAVSIISVAWAGLFENYRRHYAIQNGFEFNFLTQMPDLTAYWLLIQYCLIGIAEVFCIVGLLEFLYEEAPDAMKSIGSAYAALAGGLGCFAATILNNIVKAATRDSDGKSWLSQNINTGRFDCLYWLLTLLSFLNFCVFLWSAHRYKYRAIESEEDKSSAVL

SEQ ID NO: 77797 - protein, 624 aa, Arabidopsis thaliana
  peptide (1)..(624): Ceres Seq. ID no. 12580577
  misc_feature (136)..(547): Pfam Name: POT family Pfam Description: POT family
  misc_feature (47)..(611): Homolog of NCBI NO: 34894042 NR Description: putative peptide transporter-like protein [Oryza
  misc_feature (45)..(611): Homolog of NCBI NO: 15240905 NR Description: oligopeptide transporter - like protein; protein At5g01180.1 [Arabidopsis thaliana] >gi|11358593|pir||T45958
  misc_feature (45)..(611): Homolog of NCBI NO: 15232435 NR Description: peptide transport - like protein; protein id: supported by cDNA: 117581., supported by cDNA: gi_13430485,
  misc_feature (45)..(620): Homolog of NCBI NO: 34895718 NR Description: putative peptide transport protein [Oryza sativa
  misc_feature (45)..(609): Homolog of NCBI NO: 15076661 NR Description: peptide transporter [Oryza sativa (japonica >gi|15076663|dbj|BAB62327.1| peptide transporter [Oryza sativa
  misc_feature (45)..(622): Homolog of NCBI NO: 7489404 NR Description: peptide transport protein - barley
  misc_feature (52)..(609): Homolog of NCBI NO: 4102839 NR Description: LeOPT1 [Lycopersicon esculentum]
  misc_feature (46)..(617): Homolog of NCBI NO: 34394155 NR Description: putative peptide transport protein [Oryza sativa
  misc_feature (52)..(615): Homolog of NCBI NO: 15226861 NR Description: histidine transport protein (PTR2-B); protein id: supported by cDNA: gi_13937184, supported by cDNA: gi_633939
  misc_feature (52)..(615): Homolog of NCBI NO: 1076331 NR Description: histidine transport protein - Arabidopsis thaliana
MVASEIKSPVSVPETPGSSSVHHRKQLSVFFIESDNRRLALGRGYTGGTTPVNIHGKPIANLSKTGGWIAAFFIFGNEMAERMAYFGLSVNMVAFMFYVMHRPFESSSNAVNNFLGISQASSVLGGFLADAYLGRYWTIAIFTTMYLVGLIGITLGASLKMFVPDQSNCGQLSLLLGNCEEAKSWQMLYLYTVLYITGFGAAGIRPCVSSFGADQFDEKSKDYKTHLDRFFNFFYLSVTLGAIIAFTLVVYVQMELGWGMAFGTLAVAMGISNALFFAGTPLYRHRLPGGSPLTRVAQVLVAAFRKRNAAFTSSEFIGLYEVPGLKSAINGSRKIPHSNDFIWLDKAALELKEDGLEPSPWKLCTVTQVEEVKILIRLIPIPTCTIMLSLVLTEYLTLSVQQAYTLNTHIQHLKLPVTCMPVFPGLSIFLILSLYYSVFVPITRRITGNPHGASQLQRVGIGLAVSIISVAWAGLFENYRRHYAIQNGFEFNFLTQMPDLTAYWLLIQYCLIGIAEVFCIVGLLEFLYEEAPDAMKSIGSAYAALAGGLGCFAATILNNIVKAATRDSDGKSWLSQNINTGRFDCLYWLLTLLSFLNFCVFLWSAHRYKYRAIESEEDKSSAVL

SEQ ID NO: 77798 - protein, 546 aa, Arabidopsis thaliana
  peptide (1)..(546): Ceres Seq. ID no. 12580578
  misc_feature (58)..(469): Pfam Name: POT family Pfam Description: POT family
  misc_feature (1)..(533): Homolog of NCBI NO: 34894042 NR Description: putative peptide transporter-like protein [Oryza
  misc_feature (1)..(533): Homolog of NCBI NO: 15240905 NR Description: oligopeptide transporter - like protein; protein At5g01180.1 [Arabidopsis thaliana] >gi|11358593|pir||T45958
  misc_feature (1)..(533): Homolog of NCBI NO: 15232435 NR Description: peptide transport - like protein; protein id: supported by cDNA: 117581., supported by cDNA: gi_13430485,
  misc_feature (1)..(542): Homolog of NCBI NO: 34895718 NR Description: putative peptide transport protein [Oryza sativa
  misc_feature (1)..(531): Homolog of NCBI NO: 15076661 NR Description: peptide transporter [Oryza sativa (japonica >gi|15076663|dbj|BAB62327.1| peptide transporter [Oryza sativa
  misc_feature (1)..(544): Homolog of NCBI NO: 7489404 NR Description: peptide transport protein - barley
  misc_feature (1)..(531): Homolog of NCBI NO: 4102839 NR Description: LeOPT1 [Lycopersicon esculentum]
  misc_feature (1)..(539): Homolog of NCBI NO: 34394155 NR Description: putative peptide transport protein [Oryza sativa
  misc_feature (1)..(537): Homolog of NCBI NO: 15226861 NR Description: histidine transport protein (PTR2-B); protein id: supported by cDNA: gi_13937184, supported by cDNA: gi_633939
  misc_feature (1)..(537): Homolog of NCBI NO: 1076331 NR Description: histidine transport protein - Arabidopsis thaliana
MAERMAYFGLSVNMVAFMFYVMHRPFESSSNAVNNFLGISQASSVLGGFLADAYLGRYWTIAIFTTMYLVGLIGITLGASLKMFVPDQSNCGQLSLLLGNCEEAKSWQMLYLYTVLYITGFGAAGIRPCVSSFGADQFDEKSKDYKTHLDRFFNFFYLSVTLGAIIAFTLVVYVQMELGWGMAFGTLAVAMGISNALFFAGTPLYRHRLPGGSPLTRVAQVLVAAFRKRNAAFTSSEFIGLYEVPGLKSAINGSRKIPHSNDFIWLDKAALELKEDGLEPSPWKLCTVTQVEEVKILIRLIPIPTCTIMLSLVLTEYLTLSVQQAYTLNTHIQHLKLPVTCMPVFPGLSIFLILSLYYSVFVPITRRITGNPHGASQLQRVGIGLAVSIISVAWAGLFENYRRHYAIQNGFEFNFLTQMPDLTAYWLLIQYCLIGIAEVFCIVGLLEFLYEEAPDAMKSIGSAYAALAGGLGCFAATILNNIVKAATRDSDGKSWLSQNINTGRFDCLYWLLTLLSFLNFCVFLWSAHRYKYRAIESEEDKSSAVL

SEQ ID NO: 77799 - DNA, 875 bp, Arabidopsis thaliana
  misc_feature (1)..(875): Ceres Seq. ID no. 12580583
  misc_feature: MA Experiment ID: 20000314 Result: Down-regulated in Transcription
  misc_feature: MA Experiment 20000314 PARAMETER Experiment Name: At_14day_Shoots-Roots_Sub_P Parameter: Age (day) Value: 14
  misc_feature: MA Experiment 20000314 PARAMETER Experiment Name: At_14day_Shoots-Roots_Sub_P Parameter: Organism Value: A. thaliana
  misc_feature: MA Experiment 20000314 PARAMETER Experiment Name: At_14day_Shoots-Roots_Sub_P Parameter: Plant Line Value: WS
  misc_feature: MA Experiment 20000314 PARAMETER Experiment Name: At_14day_Shoots-Roots_Sub_P Parameter: Tissue Value: Roots vs. Whole Plant
  misc_feature: MA Experiment ID: 20000315 Result: Down-regulated in Transcription
  misc_feature: MA Experiment 20000315 PARAMETER Experiment Name: At_14day_Shoots-Roots_Sub_P Parameter: Age (day) Value: 14
  misc_feature: MA Experiment 20000315 PARAMETER Experiment Name: At_14day_Shoots-Roots_Sub_P Parameter: Organism Value: A. thaliana
  misc_feature: MA Experiment 20000315 PARAMETER Experiment Name: At_14day_Shoots-Roots_Sub_P Parameter: Plant Line Value: WS
  misc_feature: MA Experiment 20000315 PARAMETER Experiment Name: At_14day_Shoots-Roots_Sub_P Parameter: Tissue Value: Shoots vs. Whole Plant
  misc_feature: MA Experiment ID: 20000440 Result: Down-regulated in Transcription
  misc_feature: MA Experiment 20000440 PARAMETER Experiment Name: At_Closed-Flower__Sub_P Parameter: Tissue Value: Closed Flower vs. Whole Plant
tacatgcataacaaattaagagcgagcaataatgagggtttctcaatctcttgtcccttttgccataattgctttggtcctttcctttgtcaatgcttatgatccaagtccactccaagacttctgtgttgccattgatgacctaaaaggcgtttttgtgaatggtaggttttgtaaagacccgaagcgagtcgatgcaaaagattttttcttctcaggtctcaatatgcccgggaacaccaataatcaagttggctctaatgtgaccactgttaatgttgatcagatcccagggctaaacaccatgggaatatcattggtccgcatagactacgcaccgcatggccaaaatccacctcacacgcaccctcgtggctcagagatccttgtccttgtcgaaggaacattatacgtcggttttgtctcttccaatcaagataacaaccggttattcgccaaagtattgcaccccggtgatgttttcgtgttccccataggaatgatccattttcaggtaaatgtggggaaaattccagcagttgcttttgcgggattgagtagccagaacgcaggtgttatcacaattgcaaacactgtgtttgggtccaatcctccgatttatccagagcttcttgccagggcgttccagttggatgcaagtgttgtcaaagaacttcaggccaagtttgggtccatatgaactgatcatctaagtcgtttaagagtatttatcatcttttacaaaaaaaaagaaaaaaaagtatttatcattgaaacacttaattaaaggaatacactactatgaaatatttatgtaacaaaataaaacctggattatgtaccaagtttctatattataatatatcaacttttcc

SEQ ID NO: 77800 - protein, 222 aa, Arabidopsis thaliana
  peptide (1)..(222): Ceres Seq. ID no. 12580584
  misc_feature (62)..(213): Pfam Name: Cupin Pfam Description: Cupin
  misc_feature (1)..(222): Homolog of NCBI NO: 22327459 NR Description: germin-like protein (GLP2a) copy1; protein id:
  misc_feature (1)..(222): Homolog of NCBI NO: 15241662 NR Description: germin-like protein (GLP2a) copy2; protein id:
  misc_feature (1)..(222): Homolog of NCBI NO: 15241640 NR Description: germin - like protein; protein id: At5g39130.1, by cDNA: gi_17065441 [Arabidopsis thaliana]
  misc_feature (1)..(222): Homolog of NCBI NO: 2129594 NR Description: germin type 2 - Arabidopsis thaliana
  misc_feature (1)..(219): Homolog of NCBI NO: 18202454 NR Description: Germin-like protein subfamily 1 member 13
  misc_feature (1)..(219): Homolog of NCBI NO: 15241636 NR Description: germin -like protein; protein id: At5g39110.1
  misc_feature (1)..(219): Homolog of NCBI NO: 15241653 NR Description: germin - like protein; protein id: At5g39150.1
  misc_feature (1)..(219): Homolog of NCBI NO: 15241638 NR Description: germin - like protein; protein id: At5g39120.1
  misc_feature (1)..(219): Homolog of NCBI NO: 15241660 NR Description: germin-like protein; protein id: At5g39180.1
  misc_feature (51)..(222): Homolog of NCBI NO: 1755186 NR Description: germin-like protein [Arabidopsis thaliana]
MRVSQSLVPFAIIALVLSFVNAYDPSPLQDFCVAIDDLKGVFVNGRFCKDPKRVDAKDFFFSGLNMPGNTNNQVGSNVTTVNVDQIPGLNTMGISLVRIDYAPHGQNPPHTHPRGSEILVLVEGTLYVGFVSSNQDNNRLFAKVLHPGDVFVFPIGMIHFQVNVGKIPAVAFAGLSSQNAGVITIANTVFGSNPPIYPELLARAFQLDASVVKELQAKFGSI

SEQ ID NO: 77801 - protein, 157 aa, Arabidopsis thaliana
  peptide (1)..(157): Ceres Seq. ID no. 12580585
  misc_feature (1)..(148): Pfam Name: Cupin Pfam Description: Cupin
  misc_feature (1)..(157): Homolog of NCBI NO: 22327459 NR Description: germin-like protein (GLP2a) copy1; protein id:
  misc_feature (1)..(157): Homolog of NCBI NO: 15241662 NR Description: germin-like protein (GLP2a) copy2; protein id:
  misc_feature (1)..(157): Homolog of NCBI NO: 15241640 NR Description: germin - like protein; protein id: At5g39130.1, by cDNA: gi_17065441 [Arabidopsis thaliana]
  misc_feature (1)..(157): Homolog of NCBI NO: 2129594 NR Description: germin type 2 - Arabidopsis thaliana
  misc_feature (1)..(154): Homolog of NCBI NO: 18202454 NR Description: Germin-like protein subfamily 1 member 13
  misc_feature (1)..(154): Homolog of NCBI NO: 15241636 NR Description: germin -like protein; protein id: At5g39110.1
  misc_feature (1)..(154): Homolog of NCBI NO: 15241653 NR Description: germin - like protein; protein id: At5g39150.1
  misc_feature (1)..(154): Homolog of NCBI NO: 15241638 NR Description: germin - like protein; protein id: At5g39120.1
  misc_feature (1)..(154): Homolog of NCBI NO: 15241660 NR Description: germin-like protein; protein id: At5g39180.1
  misc_feature (1)..(157): Homolog of NCBI NO: 1755186 NR Description: germin-like protein [Arabidopsis thaliana]
MPGNTNNQVGSNVTTVNVDQIPGLNTMGISLVRIDYAPHGQNPPHTHPRGSEILVLVEGTLYVGFVSSNQDNNRLFAKVLHPGDVFVFPIGMIHFQVNVGKIPAVAFAGLSSQNAGVITIANTVFGSNPPIYPELLARAFQLDASVVKELQAKFGSI

SEQ ID NO: 77802 - protein, 131 aa, Arabidopsis thaliana
  peptide (1)..(131): Ceres Seq. ID no. 12580586
  misc_feature (1)..(122): Pfam Name: Cupin Pfam Description: Cupin
  misc_feature (1)..(131): Homolog of NCBI NO: 22327459 NR Description: germin-like protein (GLP2a) copy1; protein id:
  misc_feature (1)..(131): Homolog of NCBI NO: 15241662 NR Description: germin-like protein (GLP2a) copy2; protein id:
  misc_feature (1)..(131): Homolog of NCBI NO: 15241640 NR Description: germin - like protein; protein id: At5g39130.1, by cDNA: gi_17065441 [Arabidopsis thaliana]
  misc_feature (1)..(131): Homolog of NCBI NO: 2129594 NR Description: germin type 2 - Arabidopsis thaliana
  misc_feature (1)..(128): Homolog of NCBI NO: 18202454 NR Description: Germin-like protein subfamily 1 member 13
  misc_feature (1)..(128): Homolog of NCBI NO: 15241636 NR Description: germin -like protein; protein id: At5g39110.1
  misc_feature (1)..(128): Homolog of NCBI NO: 15241653 NR Description: germin - like protein; protein id: At5g39150.1
  misc_feature (1)..(128): Homolog of NCBI NO: 15241638 NR Description: germin - like protein; protein id: At5g39120.1
  misc_feature (1)..(128): Homolog of NCBI NO: 15241660 NR Description: germin-like protein; protein id: At5g39180.1
  misc_feature (1)..(131): Homolog of NCBI NO: 1755186 NR Description: germin-like protein [Arabidopsis thaliana]
MGISLVRIDYAPHGQNPPHTHPRGSEILVLVEGTLYVGFVSSNQDNNRLFAKVLHPGDVFVFPIGMIHFQVNVGKIPAVAFAGLSSQNAGVITIANTVFGSNPPIYPELLARAFQLDASVVKELQAKFGSI

SEQ ID NO: 77803 - DNA, 2417 bp, Arabidopsis thaliana
  misc_feature (1)..(2417): Ceres Seq. ID no. 12580591
  misc_feature: MA Experiment ID: 20000173 Result: Down-regulated in Transcription
  misc_feature: MA Experiment 20000173 PARAMETER Experiment Name: At_42deg_Heat_P Parameter: Age (day) Value: 14
  misc_feature: MA Experiment 20000173 PARAMETER Experiment Name: At_42deg_Heat_P Parameter: Organism Value: A. thaliana
  misc_feature: MA Experiment 20000173 PARAMETER Experiment Name: At_42deg_Heat_P Parameter: Plant Line Value: WS
  misc_feature: MA Experiment 20000173 PARAMETER Experiment Name: At_42deg_Heat_P Parameter: Temperature (deg C) Value: 42 vs. 22
  misc_feature: MA Experiment 20000173 PARAMETER Experiment Name: At_42deg_Heat_P Parameter: Timepoint (hr) Value: 6
  misc_feature: MA Experiment 20000173 PARAMETER Experiment Name: At_42deg_Heat_P Parameter: Tissue Value: Aerial
actgattcaacaaagaagaatcaaaatctccagaaattcgatcgtcgttgaagattcgtctcagtttgtgtagtttctagcttagtgttttggaatcgaaaatggcgggtcgagttaaagaagacgagaagaacgagaagattattaggagtcttcttaaacttcctgagaataagaggtgtataaactgtaacagccttggaccacaatatgtttgcactactttctggacttttgtttgtaccaactgcagtggaatacatcgtgagtttacacatcgtgttaaatcgatatcaatggcgaaatttacctcacaagaagttactgctttgaaagaaggtggaaatcagcatgctaaggatatttattttaaaggattggatcaacagcggcaatcagtgcctgacggaagtaatgttgagcggttaagggacttcatcagacatgtgtatgtaaataaaaggtatacgaatgagaagaatgatgataagtctccaagtgagacacgtagttctagtggttctcggagtccaccttatgaagatggatatgaccgtcgttacggcgacagatcaagtcctggtgggagaagtccagggttcgagacgggtagtaggaatgctgttaataacagaaaaagccctgctcgtcctgagatcctgaatgattggcgcagagaggataggtttgggggtagaaaaacatcagaagagggctcccagtcacctgagcaagtaaaagacttgggttcagctagccctcctgtagctcgacctgttagggaaattttgggtgacagtgttattcctcttcgtgtgggagagcctccaaaaccccctgtcagtagaaataccgatgcttcagcacatgcaaaggttttggcttcatctctttcagagtgcatgaaggatgtaaagtatataagaaccattgatgctctgcttatataatgttgttgtagcacatgcattcgttggtaataccatctaaattcttagggaggtaagtaaatgttgatgttttctgttgtgtgttatttcagtcaggtacatcattgagtagtttaatgtccacaaatgagaagccaccagaagtgaagctggagactgctttaagcctgattgattttgatactgattttgaaactcctgctccatctgttgcaattcaagcaccactatcgaccacatctcagcctgctccacagccaacaacttcatctaatgataactgggcatctttcgatgctgcacccagtgcccctagtttaaatgtatcgcaaccaccacccagtggaaacacactggattcacttctctcccagttggcagtgacttcttctgtgccaggtcaggcgtctacaccatctaacggacctgtgaatcttggtcattccacgtcacaaatctttgcaccctttcagaatgagcattcgagtgaacagccatggaacacagcacttgcatctaatgtacagaggtcaatgagtgcaccgtcattgcaacctcttcaaggagtcccttctggtggcctgcagtcttctgaagttaaaccttcgggaagatcagaattacctgcggatttattcgctgtaaactacccatcataccatgcaccagtgcctggatggcaagctggtccacctcatgctatgcactatggcatgcagcagtataataaccccgtgccgtatcagaatgttccgcagccaggcaagtcaatgaacccttttgacttcagccctgggccgccatcacaaacacaaacggaaaatatgttcccttccatggctcctctgcaaggtgcattacctccttcaggcatgatgccttctcaaggagtacacaatcaattcaatataccttctcaaggctcagcccatccatctgcaatgccaccaaggtacatgccttctcaaataccaggaagcatgccacctagcaatgtaaacccaattggcgacataaacacgtcatatgacactcaacaaacatatcaaaattttggaagctcgtttgctgctgcagttcctttgaacccaccttctttccaatcaggaggaaacccatttgggtaagaaagagcgagaatattagctcacgagagctatgttatgcatgaggattgcgtttgtgttctaaggtgtagtataagactataaggaggtattaaatcgaatacaaacatgggttaaatagggtgaacgagggaaggtacgggccatgaacctgaagaagaattgggtttgtgagagtgttagattactgtattttttataagcatcaaaatgatttgaaataggtttgatatttattctttggtgtttctatattccatttccattttgttgtttgtccttcagaaaatcttcaggctcctcctgtgttgtatgattttgtataacagtttacacattg

SEQ ID NO: 77804 - protein, 336 aa, Arabidopsis thaliana; identical to SEQ ID NO: 28388
  peptide (1)..(336): Ceres Seq. ID no. 12580592
  misc_feature (1)..(336): Homolog of NCBI NO: 7487869 NR Description: hypothetical protein T9E8.90 - Arabidopsis >gi|4584540|emb|CAB40770.1| putative protein [Arabidopsis >gi|7268038|emb|CAB78377.1| putative protein [Arabidopsis

SEQ ID NO: 77805 - protein, 282 aa, Arabidopsis thaliana
  peptide (1)..(282): Ceres Seq. ID no. 12580593
  misc_feature (12)..(130): Pfam Name: Putative GTPase activating protein for Arf Pfam Description: Putative GTPase activating protein for Arf
  misc_feature (1)..(268): Homolog of NCBI NO: 7487869 NR Description: hypothetical protein T9E8.90 - Arabidopsis >gi|4584540|emb|CAB40770.1| putative protein [Arabidopsis >gi|7268038|emb|CAB78377.1| putative protein [Arabidopsis
  misc_feature (1)..(206): Homolog of NCBI NO: 30680768 NR Description: ARF GAP-like zinc finger-containing protein
  misc_feature (1)..(206): Homolog of NCBI NO: 30680774 NR Description: ARF GAP-like zinc finger-containing protein [Arabidopsis thaliana] >gi|19698913|gb|AAL91192.1| unknown [Arabidopsis thaliana] >gi|30725470|gb|AAP37757.1| At1g08690
  misc_feature (53)..(134): Homolog of NCBI NO: 9802557 NR Description: F22O13.16 [Arabidopsis thaliana]
  misc_feature (3)..(53): Homolog of NCBI NO: 9802557 NR Description: F22O13.16 [Arabidopsis thaliana]
  misc_feature (1)..(102): Homolog of NCBI NO: 7485983 NR Description: hypothetical protein F22O13.17 - Arabidopsis
  misc_feature (9)..(146): Homolog of NCBI NO: 28850338 NR Description: hypothetical protein [Dictyostelium discoideum]
  misc_feature (6)..(141): Homolog of NCBI NO: 26325842 NR Description: unnamed protein product [Mus musculus]
  misc_feature (6)..(141): Homolog of NCBI NO: 950051 NR Description: nucleoporin-like protein [Homo sapiens]
  misc_feature (6)..(141): Homolog of NCBI NO: 38570132 NR Description: HIV-1 Rev binding protein; Rab, Rev/Rex
MAGRVKEDEKNEKIIRSLLKLPENKRCINCNSLGPQYVCTTFWTFVCTNCSGIHREFTHRVKSISMAKFTSQEVTALKEGGNQHAKDIYFKGLDQQRQSVPDGSNVERLRDFIRHVYVNKRYTNEKNDDKSPSETRSSSGSRSPPYEDGYDRRYGDRSSPGGRSPGFETGSRNAVNNRKSPARPEILNDWRREDRFGGRKTSEEGSQSPEQVKDLGSASPPVARPVREILGDSVIPLRVGEPPKPPVSRNTDASAHAKVLASSLSECMKDVKYIRTIDALLI

SEQ ID NO: 77806 - protein, 217 aa, Arabidopsis thaliana
  peptide (1)..(217): Ceres Seq. ID no. 12580594
  misc_feature (1)..(65): Pfam Name: Putative GTPase activating protein for Arf Pfam Description: Putative GTPase activating protein for Arf
  misc_feature (1)..(203): Homolog of NCBI NO: 7487869 NR Description: hypothetical protein T9E8.90 - Arabidopsis >gi|4584540|emb|CAB40770.1| putative protein [Arabidopsis >gi|7268038|emb|CAB78377.1| putative protein [Arabidopsis
  misc_feature (1)..(141): Homolog of NCBI NO: 30680768 NR Description: ARF GAP-like zinc finger-containing protein
  misc_feature (1)..(141): Homolog of NCBI NO: 30680774 NR Description: ARF GAP-like zinc finger-containing protein [Arabidopsis thaliana] >gi|19698913|gb|AAL91192.1| unknown [Arabidopsis thaliana] >gi|30725470|gb|AAP37757.1| At1g08690
  misc_feature (1)..(69): Homolog of NCBI NO: 9802557 NR Description: F22O13.16 [Arabidopsis thaliana]
  misc_feature (1)..(37): Homolog of NCBI NO: 7485983 NR Description: hypothetical protein F22O13.17 - Arabidopsis
  misc_feature (1)..(81): Homolog of NCBI NO: 28850338 NR Description: hypothetical protein [Dictyostelium discoideum]
  misc_feature (1)..(76): Homolog of NCBI NO: 26325842 NR Description: unnamed protein product [Mus musculus]
  misc_feature (1)..(76): Homolog of NCBI NO: 950051 NR Description: nucleoporin-like protein [Homo sapiens]
  misc_feature (1)..(76): Homolog of NCBI NO: 38570132 NR Description: HIV-1 Rev binding protein; Rab, Rev/Rex
  misc_feature (1)..(67): Homolog of NCBI NO: 29245305 NR Description: GLP_333_15386_14190 [Giardia lamblia ATCC 50803]
MAKFTSQEVTALKEGGNQHAKDIYFKGLDQQRQSVPDGSNVERLRDFIRHVYVNKRYTNEKNDDKSPSETRSSSGSRSPPYEDGYDRRYGDRSSPGGRSPGFETGSRNAVNNRKSPARPEILNDWRREDRFGGRKTSEEGSQSPEQVKDLGSASPPVARPVREILGDSVIPLRVGEPPKPPVSRNTDASAHAKVLASSLSECMKDVKYIRTIDALLI

SEQ ID NO: 77807 - DNA, 2190 bp, Arabidopsis thaliana
  misc_feature (1)..(2190): Ceres Seq. ID no. 12580595
  misc_feature: MA Experiment ID: 20000171 Result: Down-regulated in Transcription
  misc_feature: MA Experiment 20000171 PARAMETER Experiment Name: At_42deg_Heat_P Parameter: Age (day) Value: 14
  misc_feature: MA Experiment 20000171 PARAMETER Experiment Name: At_42deg_Heat_P Parameter: Organism Value: A. thaliana
  misc_feature: MA Experiment 20000171 PARAMETER Experiment Name: At_42deg_Heat_P Parameter: Plant Line Value: WS
  misc_feature: MA Experiment 20000171 PARAMETER Experiment Name: At_42deg_Heat_P Parameter: Temperature (deg C) Value: 42 vs. 22
  misc_feature: MA Experiment 20000171 PARAMETER Experiment Name: At_42deg_Heat_P Parameter: Timepoint (hr) Value: 1
  misc_feature: MA Experiment 20000171 PARAMETER Experiment Name: At_42deg_Heat_P Parameter: Tissue Value: Aerial
  misc_feature: MA Experiment ID: 20000173 Result: Down-regulated in Transcription
  misc_feature: MA Experiment 20000173 PARAMETER Experiment Name: At_42deg_Heat_P Parameter: Age (day) Value: 14
  misc_feature: MA Experiment 20000173 PARAMETER Experiment Name: At_42deg_Heat_P Parameter: Organism Value: A. thaliana
  misc_feature: MA Experiment 20000173 PARAMETER Experiment Name: At_42deg_Heat_P Parameter: Plant Line Value: WS
  misc_feature: MA Experiment 20000173 PARAMETER Experiment Name: At_42deg_Heat_P Parameter: Temperature (deg C) Value: 42 vs. 22
  misc_feature: MA Experiment 20000173 PARAMETER Experiment Name: At_42deg_Heat_P Parameter: Timepoint (hr) Value: 6
  misc_feature: MA Experiment 20000173 PARAMETER Experiment Name: At_42deg_Heat_P Parameter: Tissue Value: Aerial
  misc_feature: MA Experiment ID: 20000184 Result: Up-regulated in Transcription
  misc_feature: MA Experiment 20000184 PARAMETER Experiment Name: At_Shoots__P Parameter: Age (day) Value: 7
  misc_feature: MA Experiment 20000184 PARAMETER Experiment Name: At_Shoots__P Parameter: Tissue Value: Shoots vs. Whole Plant
  misc_feature: MA Experiment ID: 20000185 Result: Down-regulated in Transcription
  misc_feature: MA Experiment 20000185 PARAMETER Experiment Name: At_Roots__P Parameter: Age (day) Value: 7 vs. 21
  misc_feature: MA Experiment 20000185 PARAMETER Experiment Name: At_Roots__P Parameter: Organism Value: A. thaliana
  misc_feature: MA Experiment 20000185 PARAMETER Experiment Name: At_Roots__P Parameter: Tissue Value: Roots vs. Whole Plant
  misc_feature: MA Experiment ID: 20000234 Result: Up-regulated in Transcription
  misc_feature: MA Experiment 20000234 PARAMETER Experiment Name: At_Siliques_P Parameter: Age (day) Value: 21
  misc_feature: MA Experiment 20000234 PARAMETER Experiment Name: At_Siliques_P Parameter: Organism Value: A. thaliana
  misc_feature: MA Experiment 20000234 PARAMETER Experiment Name: At_Siliques_P Parameter: Plant Line Value: WS
  misc_feature: MA Experiment 20000234 PARAMETER Experiment Name: At_Siliques_P Parameter: Tissue Value: Less Than 5mm Siliques vs. Whole Plant
  misc_feature: MA Experiment ID: 20000235 Result: Up-regulated in Transcription
  misc_feature: MA Experiment 20000235 PARAMETER Experiment Name: At_Siliques_P Parameter: Age (day) Value: 21
  misc_feature: MA Experiment 20000235 PARAMETER Experiment Name: At_Siliques_P Parameter: Organism Value: A. thaliana
  misc_feature: MA Experiment 20000235 PARAMETER Experiment Name: At_Siliques_P Parameter: Plant Line Value: WS
  misc_feature: MA Experiment 20000235 PARAMETER Experiment Name: At_Siliques_P Parameter: Tissue Value: 5-10mm Siliques vs. Whole Plant
  misc_feature: MA Experiment ID: 20000439 Result: Down-regulated in Transcription
  misc_feature: MA Experiment 20000439 PARAMETER Experiment Name: At_Roots__P Parameter: Age (day) Value: 14 vs. 21
  misc_feature: MA Experiment 20000439 PARAMETER Experiment Name: At_Roots__P Parameter: Organism Value: A. thaliana
  misc_feature: MA Experiment 20000439 PARAMETER Experiment Name: At_Roots__P Parameter: Tissue Value: Roots vs. Whole Plant
  misc_feature: MA Experiment ID: 20001557 Result: Up-regulated in Transcription
  misc_feature: MA Experiment 20001557 PARAMETER Experiment Name: At_Drought_Soil_Dry_P Parameter: Age (day) Value: 27
  misc_feature: MA Experiment 20001557 PARAMETER Experiment Name: At_Drought_Soil_Dry_P Parameter: Organism Value: A. thaliana
  misc_feature: MA Experiment 20001557 PARAMETER Experiment Name: At_Drought_Soil_Dry_P Parameter: Plant Line Value: WS
  misc_feature: MA Experiment 20001557 PARAMETER Experiment Name: At_Drought_Soil_Dry_P Parameter: Post Timepoint (hr) Value: 3
  misc_feature: MA Experiment 20001557 PARAMETER Experiment Name: At_Drought_Soil_Dry_P Parameter: Post-Treatment Value: Re-Water vs. No Drought
  misc_feature: MA Experiment 20001557 PARAMETER Experiment Name: At_Drought_Soil_Dry_P Parameter: Timepoint (day) Value: 13
  misc_feature: MA Experiment 20001557 PARAMETER Experiment Name: At_Drought_Soil_Dry_P Parameter: Treatment Value: Drought vs. No Drought
  misc_feature: MA Experiment ID: 20001558 Result: Up-regulated in Transcription
  misc_feature: MA Experiment 20001558 PARAMETER Experiment Name: At_Drought_Soil_Dry_P Parameter: Age (day) Value: 27
  misc_feature: MA Experiment 20001558 PARAMETER Experiment Name: At_Drought_Soil_Dry_P Parameter: Organism Value: A. thaliana
  misc_feature: MA Experiment 20001558 PARAMETER Experiment Name: At_Drought_Soil_Dry_P Parameter: Plant Line Value: WS
  misc_feature: MA Experiment 20001558 PARAMETER Experiment Name: At_Drought_Soil_Dry_P Parameter: Post Timepoint (hr) Value: 6
  misc_feature: MA Experiment 20001558 PARAMETER Experiment Name: At_Drought_Soil_Dry_P Parameter: Post-Treatment Value: Re-Water vs. No Drought
  misc_feature: MA Experiment 20001558 PARAMETER Experiment Name: At_Drought_Soil_Dry_P Parameter: Timepoint (day) Value: 13
  misc_feature: MA Experiment 20001558 PARAMETER Experiment Name: At_Drought_Soil_Dry_P Parameter: Treatment Value: Drought vs. No Drought
gccaacacaactccttataagatatacacttcatcaacctatagatctcactcacataatcaacctacaaaacaaaaacaagaatgggtagatccaacgagcaagatctgctctctaccgagatcgttaatcgtgggatcgaaccatccggtcctaacgccggctcaccaacgttctcggttagggtcaggagacgtttgcctgattttcttcagtcggtgaacttgaagtacgtgaaacttggttaccactacctcataaaccatgcggtttatttggcgaccataccggttcttgtgctggtttttagtgctgaggttgggagtttaagcagagaagagatttggaagaagctttgggactatgatcttgcaactgttatcggattcttcggtgtctttgttttaaccgcttgtgtctacttcatgtctcgtcctcgctctgtttatcttattgatttcgcttgttacaagccctccgatgaacacaaggtgacaaaagaagagttcatagaactagcgagaaaatcagggaagttcgacgaagagacactcggtttcaagaagaggatcttacaagcctcaggcataggcgacgagacatacgtcccaagatccatctcttcatcagaaaacataacaacgatgaaagaaggtcgtgaagaagcctctacagtgatctttggagcactagacgaactcttcgagaagacacgtgtaaaacctaaagacgttggtgtccttgtggttaactgtagcattttcaacccgacaccgtcgttgtccgcaatggtgataaaccattacaagatgagagggaacatacttagttacaaccttggagggatgggatgttcggctggaatcatagctattgatcttgctcgtgacatgcttcagtctaaccctaatagttatgctgttgttgtgagtactgagatggttgggtataattggtacgtgggaagtgacaagtcaatggttatacctaattgtttctttaggatgggttgttctgccgttatgctctctaaccgtcgtcgtgactttcgccatgctaagtaccgtctcgagcacattgtccgaactcataaggctgctgacgaccgtagcttcaggtttcattcattttggtattaattcgttttacaatctcttgacgacctagtaactaattttgtgtggtttttaggagtgtgtaccaggaagaagatgaacaaggattcaaggggttgaagataagtagagacttaatggaagttggaggtgaagctctcaagacaaacatcactaccttaggtcctcttgtcctacctttctccgagcagcttctcttctttgctgctttgctccgccgaacattctcacctgctgccaaaacgtccacaaccacttccttctctacttccgccaccgcaaaaaccaatggaatcaagtcttcctcttccgatctgtccaagccatacatcccggactacaagctcgccttcgagcatttttgcttccacgcggcaagcaaagtagtgcttgaagagcttcaaaagaatctaggcttgagtgaagagaatatggaggcttctaggatgacacttcacaggtttggaaacacttctagcagtggaatctggtatgagttggcttacatggaggccaaggaaagtgttcgtagaggcgatagggtttggcagatcgctttcggttctggttttaagtgtaacagtgtggtgtggaaggcaatgaggaaggtgaagaagccaaccaggaacaatccttgggtggattgcatcaaccgttaccctgtgcctctctaaattatcattcttctaaattaaatcaagtaagatctctaattactccaaccaaaagatacagtttggttggatgataggagttatttactgatcattcgtatctaagtctgttataagaatggatgtggctagagtcctgttcagcttcaacttgttttattttttgtttgttctctattggatcttcataaactttgagagattaaagaaaaaaactcttctttagtttgatagaacagatggtcattgtaatttctttaatatgtcaaagtaaaacaatttctttttaaggcaatctatattcagatacataataaatttagtttacgtgtataagaagatacttgtacgaagtaataaagaaacataactttcggctg

SEQ ID NO: 77808 - protein, 351 aa, Arabidopsis thaliana
  peptide (1)..(351): Ceres Seq. ID no. 12580596
  misc_feature (134)..(285): Pfam Name: Chalcone and stilbene synthases, N-terminal domain Pfam Description: Chalcone and stilbene synthases, N-terminal
  misc_feature (1)..(345): Homolog of NCBI NO: 15225270 NR Description: beta-ketoacyl-CoA synthase (FIDDLEHEAD); protein At2g26250.1, supported by cDNA: gi_14517455 [Arabidopsis
  misc_feature (1)..(345): Homolog of NCBI NO: 8177727 NR Description: fiddlehead protein [Arabidopsis thaliana]
  misc_feature (1)..(345): Homolog of NCBI NO: 8177711 NR Description: fiddlehead protein [Arabidopsis thaliana]
  misc_feature (1)..(345): Homolog of NCBI NO: 8177723 NR Description: fiddlehead protein [Arabidopsis thaliana]
  misc_feature (1)..(345): Homolog of NCBI NO: 8177719 NR Description: fiddlehead protein [Arabidopsis thaliana]
  misc_feature (1)..(345): Homolog of NCBI NO: 18447765 NR Description: fiddlehead-like protein [Gossypium hirsutum]
  misc_feature (4)..(345): Homolog of NCBI NO: 28864534 NR Description: fiddlehead-like protein [Tropaeolum majus]
  misc_feature (1)..(345): Homolog of NCBI NO: 24960748 NR Description: Putative fiddlehead-like protein [Oryza sativa
  misc_feature (1)..(345): Homolog of NCBI NO: 8177715 NR Description: fiddlehead protein [Arabidopsis thaliana]
  misc_feature (4)..(345): Homolog of NCBI NO: 19351907 NR Description: putative beta-ketoacyl-CoA synthase [Antirrhinum
MGRSNEQDLLSTEIVNRGIEPSGPNAGSPTFSVRVRRRLPDFLQSVNLKYVKLGYHYLINHAVYLATIPVLVLVFSAEVGSLSREEIWKKLWDYDLATVIGFFGVFVLTACVYFMSRPRSVYLIDFACYKPSDEHKVTKEEFIELARKSGKFDEETLGFKKRILQASGIGDETYVPRSISSSENITTMKEGREEASTVIFGALDELFEKTRVKPKDVGVLVVNCSIFNPTPSLSAMVINHYKMRGNILSYNLGGMGCSAGIIAIDLARDMLQSNPNSYAVVVSTEMVGYNWYVGSDKSMVIPNCFFRMGCSAVMLSNRRRDFRHAKYRLEHIVRTHKAADDRSFRFHSFWY

SEQ ID NO: 77809 - protein, 237 aa, Arabidopsis thaliana
  peptide (1)..(237): Ceres Seq. ID no. 12580597
  misc_feature (20)..(171): Pfam Name: Chalcone and stilbene synthases, N-terminal domain Pfam Description: Chalcone and stilbene synthases, N-terminal
  misc_feature (1)..(231): Homolog of NCBI NO: 15225270 NR Description: beta-ketoacyl-CoA synthase (FIDDLEHEAD); protein At2g26250.1, supported by cDNA: gi_14517455 [Arabidopsis
  misc_feature (1)..(231): Homolog of NCBI NO: 8177727 NR Description: fiddlehead protein [Arabidopsis thaliana]
  misc_feature (1)..(231): Homolog of NCBI NO: 8177711 NR Description: fiddlehead protein [Arabidopsis thaliana]
  misc_feature (1)..(231): Homolog of NCBI NO: 8177723 NR Description: fiddlehead protein [Arabidopsis thaliana]
  misc_feature (1)..(231): Homolog of NCBI NO: 8177719 NR Description: fiddlehead protein [Arabidopsis thaliana]
  misc_feature (1)..(231): Homolog of NCBI NO: 18447765 NR Description: fiddlehead-like protein [Gossypium hirsutum]
  misc_feature (1)..(231): Homolog of NCBI NO: 28864534 NR Description: fiddlehead-like protein [Tropaeolum majus]
  misc_feature (1)..(231): Homolog of NCBI NO: 24960748 NR Description: Putative fiddlehead-like protein [Oryza sativa
  misc_feature (1)..(231): Homolog of NCBI NO: 8177715 NR Description: fiddlehead protein [Arabidopsis thaliana]
  misc_feature (1)..(231): Homolog of NCBI NO: 19351907 NR Description: putative beta-ketoacyl-CoA synthase [Antirrhinum
MSRPRSVYLIDFACYKPSDEHKVTKEEFIELARKSGKFDEETLGFKKRILQASGIGDETYVPRSISSSENITTMKEGREEASTVIFGALDELFEKTRVKPKDVGVLVVNCSIFNPTPSLSAMVINHYKMRGNILSYNLGGMGCSAGIIAIDLARDMLQSNPNSYAVVVSTEMVGYNWYVGSDKSMVIPNCFFRMGCSAVMLSNRRRDFRHAKYRLEHIVRTHKAADDRSFRFHSFWY

SEQ ID NO: 77810 - protein, 185 aa, Arabidopsis thaliana
  peptide (1)..(185): Ceres Seq. ID no. 12580598
  misc_feature (1)..(51): Pfam Name: Chalcone and stilbene synthases, C-terminal domain Pfam Description: Chalcone and stilbene synthases, C-terminal
  misc_feature (1)..(185): Homolog of NCBI NO: 15225270 NR Description: beta-ketoacyl-CoA synthase (FIDDLEHEAD); protein At2g26250.1, supported by cDNA: gi_14517455 [Arabidopsis
  misc_feature (1)..(185): Homolog of NCBI NO: 8177727 NR Description: fiddlehead protein [Arabidopsis thaliana]
  misc_feature (1)..(185): Homolog of NCBI NO: 8177711 NR Description: fiddlehead protein [Arabidopsis thaliana]
  misc_feature (1)..(185): Homolog of NCBI NO: 8177723 NR Description: fiddlehead protein [Arabidopsis thaliana]
  misc_feature (1)..(143): Homolog of NCBI NO: 8177719 NR Description: fiddlehead protein [Arabidopsis thaliana]
  misc_feature (61)..(183): Homolog of NCBI NO: 18447765 NR Description: fiddlehead-like protein [Gossypium hirsutum]
  misc_feature (1)..(51): Homolog of NCBI NO: 18447765 NR Description: fiddlehead-like protein [Gossypium hirsutum]
  misc_feature (1)..(185): Homolog of NCBI NO: 28864534 NR Description: fiddlehead-like protein [Tropaeolum majus]
  misc_feature (1)..(182): Homolog of NCBI NO: 24960748 NR Description: Putative fiddlehead-like protein [Oryza sativa
  misc_feature (1)..(24): Homolog of NCBI NO: 8177715 NR Description: fiddlehead protein [Arabidopsis thaliana]
MEVGGEALKTNITTLGPLVLPFSEQLLFFAALLRRTFSPAAKTSTTTSFSTSATAKTNGIKSSSSDLSKPYIPDYKLAFEHFCFHAASKVVLEELQKNLGLSEENMEASRMTLHRFGNTSSSGIWYELAYMEAKESVRRGDRVWQIAFGSGFKCNSVVWKAMRKVKKPTRNNPWVDCINRYPVPL

SEQ ID NO: 77811 - DNA, 1030 bp, Arabidopsis thaliana
  misc_feature (1)..(1030): Ceres Seq. ID no. 12580614
  misc_feature: MA Experiment ID: 108595 Result: Up-regulated in Transcription
  misc_feature: MA Experiment 108595 PARAMETER Experiment Name: At_Ler-pi_Ovule_cDNA_P Parameter: Plant Line Value: null
  misc_feature: MA Experiment ID: 20000089 Result: Down-regulated in Transcription
  misc_feature: MA Experiment ID: 20000227 Result: Up-regulated in Transcription
  misc_feature: MA Experiment 20000227 PARAMETER Experiment Name: At_Root-Tips-vs-Tops_P Parameter: Tissue Value: Root Tips vs. Root Tops
  misc_feature: MA Experiment ID: 20000264 Result: Up-regulated in Transcription
  misc_feature: MA Experiment 20000264 PARAMETER Experiment Name: At_Open_Flower_P Parameter: Age (day) Value: 21
  misc_feature: MA Experiment 20000264 PARAMETER Experiment Name: At_Open_Flower_P Parameter: Plant Line Value: WS
  misc_feature: MA Experiment 20000264 PARAMETER Experiment Name: At_Open_Flower_P Parameter: Tissue Value: Open Flower vs. Whole Plant
agaagtctttctctctcgatcaagccaagtaaaaaaaaaatcctaatctttgcgtcaccgttcgtgtttcctcttctctctagggttctccttcaacagttttccagtaaacatgagtcgtcatcctgaagtgaagtgggctgagactaccgagaagattttcctcactgtagtattagctgatactaaggataccaaggttaacctagacccagaaggagtctttgatttctctgcgaaagttggtccagaaaaccacgtttatgagctcaaactggaacttgccgataaagtcaatgttgaggaaagcaaaatcaacattggagagagaagcatattctgcataattgagaaagcagagccggaaaggtggaataagctactccgtgtgaagaagcccccacactatgtcaaggttgattgggacaagtgggttgatgaggacgatgaaggcagtgctggtgccgcagatatggatatggcaggaatggaaggaatgggaggaatgggaggcatgggcggcatgggaggaatgggtggaatgggaggaatgggtggaatgggaggaatggaaggaatggatttctcgaaattaatgggtggaatgggtggaatgggtggaatgggcggactcgaagggctcggtggaatgggaggcatgggtggaatgggaggcatgggtggtatgggaggcatggaagagtttgaagacagtgatgatgaagaagagacagcaaaatcaggagacaagaaggatgatgccgttaaggaggaaggtcttgcgacagagaaggcaccagcggcagaagaaacaacatctgttaaggaagacaagtgaagactctgttctagagatgatgaaaaaccatatggtattattagcttttcaggtttatgaaaccctctgaattacttcctcttttatatgaatgttgttggtactctgttttctttctatggatttgatcttggtttaagtttcttctaccttttgttttgggttatattgtttccaaatgttcttggactt

SEQ ID NO: 77812 - protein, 241 aa, Arabidopsis thaliana
  peptide (1)..(241): Ceres Seq. ID no. 12580615
  misc_feature (128)..(240): Pfam Name: DivIVA protein Pfam Description: DivIVA protein
  misc_feature (1)..(241): Homolog of NCBI NO: 30679149 NR Description: glycine-rich protein [Arabidopsis thaliana] AT4g02450/T14P8_5 [Arabidopsis thaliana]
  misc_feature (1)..(241): Homolog of NCBI NO: 11229591 NR Description: p23 co-chaperone [Arabidopsis thaliana]
  misc_feature (3)..(239): Homolog of NCBI NO: 7487014 NR Description: hypothetical protein T14P8.5 - Arabidopsis >gi|3193303|gb|AAC19287.1| similar to several proteins containing
  misc_feature (1)..(221): Homolog of NCBI NO: 38637531 NR Description: putative p23 co-chaperone [Oryza sativa (japonica
  misc_feature (104)..(241): Homolog of NCBI NO: 7487014 NR Description: hypothetical protein T14P8.5 - Arabidopsis >gi|3193303|gb|AAC19287.1| similar to several proteins containing
  misc_feature (1)..(131): Homolog of NCBI NO: 40882701 NR Description: putative ripening regulated protein [Oryza sativa
  misc_feature (179)..(228): Homolog of NCBI NO: 40882701 NR Description: putative ripening regulated protein [Oryza sativa
  misc_feature (5)..(241): Homolog of NCBI NO: 23482571 NR Description: 34 kDa phosphoprotein [Plasmodium yoelii yoelii]
  misc_feature (4)..(201): Homolog of NCBI NO: 23509732 NR Description: hypothetical protein [Plasmodium falciparum 3D7]
  misc_feature (1)..(139): Homolog of NCBI NO: 11934654 NR Description: p23 [Brassica napus]
MSRHPEVKWAETTEKIFLTVVLADTKDTKVNLDPEGVFDFSAKVGPENHVYELKLELADKVNVEESKINIGERSIFCIIEKAEPERWNKLLRVKKPPHYVKVDWDKWVDEDDEGSAGAADMDMAGMEGMGGMGGMGGMGGMGGMGGMGGMGGMEGMDFSKLMGGMGGMGGMGGLEGLGGMGGMGGMGGMGGMGGMEEFEDSDDEEETAKSGDKKDDAVKEEGLATEKAPAAEETTSVKEDK

SEQ ID NO: 77813 - protein, 121 aa, Arabidopsis thaliana
  peptide (1)..(121): Ceres Seq. ID no. 12580616
  misc_feature (8)..(120): Pfam Name: DivIVA protein Pfam Description: DivIVA protein
  misc_feature (1)..(121): Homolog of NCBI NO: 30679149 NR Description: glycine-rich protein [Arabidopsis thaliana] AT4g02450/T14P8_5 [Arabidopsis thaliana]
  misc_feature (1)..(121): Homolog of NCBI NO: 11229591 NR Description: p23 co-chaperone [Arabidopsis thaliana]
  misc_feature (1)..(119): Homolog of NCBI NO: 7487014 NR Description: hypothetical protein T14P8.5 - Arabidopsis >gi|3193303|gb|AAC19287.1| similar to several proteins containing
  misc_feature (1)..(101): Homolog of NCBI NO: 38637531 NR Description: putative p23 co-chaperone [Oryza sativa (japonica
  misc_feature (1)..(121): Homolog of NCBI NO: 7487014 NR Description: hypothetical protein T14P8.5 - Arabidopsis >gi|3193303|gb|AAC19287.1| similar to several proteins containing
  misc_feature (1)..(11): Homolog of NCBI NO: 40882701 NR Description: putative ripening regulated protein [Oryza sativa
  misc_feature (59)..(108): Homolog of NCBI NO: 40882701 NR Description: putative ripening regulated protein [Oryza sativa
  misc_feature (1)..(121): Homolog of NCBI NO: 23482571 NR Description: 34 kDa phosphoprotein [Plasmodium yoelii yoelii]
  misc_feature (1)..(81): Homolog of NCBI NO: 23509732 NR Description: hypothetical protein [Plasmodium falciparum 3D7]
  misc_feature (1)..(19): Homolog of NCBI NO: 11934654 NR Description: p23 [Brassica napus]
MDMAGMEGMGGMGGMGGMGGMGGMGGMGGMGGMEGMDFSKLMGGMGGMGGMGGLEGLGGMGGMGGMGGMGGMGGMEEFEDSDDEEETAKSGDKKDDAVKEEGLATEKAPAAEETTSVKEDK

SEQ ID NO: 77814 - DNA, 1695 bp, Arabidopsis thaliana
  misc_feature (1)..(1695): Ceres Seq. ID no. 12580632
  misc_feature: MA Experiment ID: 20001451 Result: Down-regulated in Transcription
  misc_feature: MA Experiment 20001451 PARAMETER Experiment Name: At_Far-red-induction_P Parameter: Age (day) Value: 7
  misc_feature: MA Experiment 20001451 PARAMETER Experiment Name: At_Far-red-induction_P Parameter: Light Value: Far-red vs. White
  misc_feature: MA Experiment 20001451 PARAMETER Experiment Name: At_Far-red-induction_P Parameter: Organism Value: A. thaliana
  misc_feature: MA Experiment 20001451 PARAMETER Experiment Name: At_Far-red-induction_P Parameter: Plant Line Value: Columbia
  misc_feature: MA Experiment 20001451 PARAMETER Experiment Name: At_Far-red-induction_P Parameter: Timepoint (hr) Value: 24
  misc_feature: MA Experiment 20001451 PARAMETER Experiment Name: At_Far-red-induction_P Parameter: Tissue Value: Whole Plant
agctgctcgatctctctctgatcacaacaatcataagcgatgagaggagctagacccgatgaattcaattttagtacgaatccatcaacgccaaacactggtcagccgacaccgacgtaccccgccggtgttggcggcggcggcggtggaaggaaaaaaggcgttggcgtgaggacgtggttggtacttaactcgtcagggcaatcggagccgaaggaagaagggaaacactccatcatgcggcgaacgggattaccggcgcgtgatcttaggattctcgatccactgttgtcgtatccatctactgttttaggtagagagagagcgattgtcatcaatttggagcatatcaaggcaatcatcactgctcaagaagttttgttgcttaattccaaggatccttcggtctcaccctttattgatgagttgcagaggcggattctctgtcaccatcacgccactaaacctcaggaggagcagaactctgggggagagcctcatacgagggtagatcctgcccaaggagaagctggaacggaacaatcttctggggatcaagggagtgaagccaagaaggatgcgaagcaaagtcttgagaatcaagatggatcgaaggttcttccatttgagtttgttgctctggaagcctgtcttgaagctgcatcaagcagtttggaacatgaggccttaagattggagttagaggctcatccagccctggacaagcttacttccaagatcagtacccttaatttggagcgggttcgacagattaaaagcaggctggttgcaataactggacgtgttcagaaggtgagggatgagctagaacatctgctagacgatgatgaagatatggctgagatgtatcttacagagaagttagctcagaaacttgaggattcgtcaaattcctctatgaatgagagtgataccttcgaggttgatcttcctcaaggagatgaggatgacaggcttcctcccgaatttgcatcagaggctaacagagatggaaggtatcttcaagcaaatgatgctcacgagcttcttatgagtactcaaagtgcacttagcagaaatagccgtgggactcacacaagctcaacccggagtgccatgaccaacaaattagatgtggaagagcttgaaatgcttttggaagcatatttcgtgcagatcgatggtatactgaacaaactatcaacactaagggaatatgtggatgacacggaggactacatcaacataatgctagatgacaagcagaatcatcttctgcagatgggtgtgatgctaacaacagctactctggtgatgagcgcctttatcgcagttgctggtgtatttggtatgaatataaccatagagttgttcacggataataaacatggtccaagtagattcatttggactgtgattggaggttctatcggcagtatatgcctctacgttggtgccatcgggtggtgcaagtacaagcgccttcttgaatgagtcgaccaacaacatattgggagaggagaataatgtcgcattgccacaaatctatttaagctaacaagacttttatgtatatcctttgttcttgaggatctttactactctcaaacctttttttatccgtctccttcactatttgcatttctttcgatttaataaaagagcaaattgcatagtttccttcttgcttatttc

SEQ ID NO: 77815 - protein, 484 aa, Arabidopsis thaliana
  peptide (1)..(484): Ceres Seq. ID no. 12580633
  misc_feature (1)..(484): Homolog of NCBI NO: 30685422 NR Description: expressed protein [Arabidopsis thaliana]
  misc_feature (25)..(312): Homolog of NCBI NO: 20804892 NR Description: P0497A05.17 [Oryza sativa (japonica
  misc_feature (363)..(484): Homolog of NCBI NO: 20804892 NR Description: P0497A05.17 [Oryza sativa (japonica
  misc_feature (31)..(283): Homolog of NCBI NO: 32488076 NR Description: OSJNBa0084A10.4 [Oryza sativa (japonica
  misc_feature (365)..(481): Homolog of NCBI NO: 32488076 NR Description: OSJNBa0084A10.4 [Oryza sativa (japonica
  misc_feature (348)..(483): Homolog of NCBI NO: 18394312 NR Description: expressed protein; protein id: At1g16010.1, by cDNA: gi_15451153, supported by cDNA: gi_20148402 [Arabidopsis
  misc_feature (173)..(289): Homolog of NCBI NO: 18394312 NR Description: expressed protein; protein id: At1g16010.1, by cDNA: gi_15451153, supported by cDNA: gi_20148402 [Arabidopsis
  misc_feature (36)..(134): Homolog of NCBI NO: 18394312 NR Description: expressed protein; protein id: At1g16010.1, by cDNA: gi_15451153, supported by cDNA: gi_20148402 [Arabidopsis
  misc_feature (342)..(483): Homolog of NCBI NO: 25360941 NR Description: MRS2-7 [Arabidopsis thaliana]
  misc_feature (195)..(298): Homolog of NCBI NO: 25360941 NR Description: MRS2-7 [Arabidopsis thaliana]
MRGARPDEFNFSTNPSTPNTGQPTPTYPAGVGGGGGGRKKGVGVRTWLVLNSSGQSEPKEEGKHSIMRRTGLPARDLRILDPLLSYPSTVLGRERAIVINLEHIKAIITAQEVLLLNSKDPSVSPFIDELQRRILCHHHATKPQEEQNSGGEPHTRVDPAQGEAGTEQSSGDQGSEAKKDAKQSLENQDGSKVLPFEFVALEACLEAASSSLEHEALRLELEAHPALDKLTSKISTLNLERVRQIKSRLVAITGRVQKVRDELEHLLDDDEDMAEMYLTEKLAQKLEDSSNSSMNESDTFEVDLPQGDEDDRLPPEFASEANRDGRYLQANDAHELLMSTQSALSRNSRGTHTSSTRSAMTNKLDVEELEMLLEAYFVQIDGILNKLSTLREYVDDTEDYINIMLDDKQNHLLQMGVMLTTATLVMSAFIAVAGVFGMNITIELFTDNKHGPSRFIWTVIGGSIGSICLYVGAIGWCKYKRLLE

SEQ ID NO: 77816 - protein, 418 aa, Arabidopsis thaliana
  peptide (1)..(418): Ceres Seq. ID no. 12580634
  misc_feature (1)..(418): Homolog of NCBI NO: 30685422 NR Description: expressed protein [Arabidopsis thaliana]
  misc_feature (1)..(246): Homolog of NCBI NO: 20804892 NR Description: P0497A05.17 [Oryza sativa (japonica
  misc_feature (297)..(418): Homolog of NCBI NO: 20804892 NR Description: P0497A05.17 [Oryza sativa (japonica
  misc_feature (1)..(217): Homolog of NCBI NO: 32488076 NR Description: OSJNBa0084A10.4 [Oryza sativa (japonica
  misc_feature (299)..(415): Homolog of NCBI NO: 32488076 NR Description: OSJNBa0084A10.4 [Oryza sativa (japonica
  misc_feature (282)..(417): Homolog of NCBI NO: 18394312 NR Description: expressed protein; protein id: At1g16010.1, by cDNA: gi_15451153, supported by cDNA: gi_20148402 [Arabidopsis
  misc_feature (107)..(223): Homolog of NCBI NO: 18394312 NR Description: expressed protein; protein id: At1g16010.1, by cDNA: gi_15451153, supported by cDNA: gi_20148402 [Arabidopsis
  misc_feature (1)..(68): Homolog of NCBI NO: 18394312 NR Description: expressed protein; protein id: At1g16010.1, by cDNA: gi_15451153, supported by cDNA: gi_20148402 [Arabidopsis
  misc_feature (276)..(417): Homolog of NCBI NO: 25360941 NR Description: MRS2-7 [Arabidopsis thaliana]
  misc_feature (129)..(232): Homolog of NCBI NO: 25360941 NR Description: MRS2-7 [Arabidopsis thaliana]
MRRTGLPARDLRILDPLLSYPSTVLGRERAIVINLEHIKAIITAQEVLLLNSKDPSVSPFIDELQRRILCHHHATKPQEEQNSGGEPHTRVDPAQGEAGTEQSSGDQGSEAKKDAKQSLENQDGSKVLPFEFVALEACLEAASSSLEHEALRLELEAHPALDKLTSKISTLNLERVRQIKSRLVAITGRVQKVRDELEHLLDDDEDMAEMYLTEKLAQKLEDSSNSSMNESDTFEVDLPQGDEDDRLPPEFASEANRDGRYLQANDAHELLMSTQSALSRNSRGTHTSSTRSAMTNKLDVEELEMLLEAYFVQIDGILNKLSTLREYVDDTEDYINIMLDDKQNHLLQMGVMLTTATLVMSAFIAVAGVFGMNITIELFTDNKHGPSRFIWTVIGGSIGSICLYVGAIGWCKYKRLLE

SEQ ID NO: 77817 - DNA, 1839 bp, Arabidopsis thaliana
  misc_feature (1)..(1839): Ceres Seq. ID no. 12580655
  misc_feature: MA Experiment ID: 20000173 Result: Down-regulated in Transcription
  misc_feature: MA Experiment 20000173 PARAMETER Experiment Name: At_42deg_Heat_P Parameter: Age (day) Value: 14
  misc_feature: MA Experiment 20000173 PARAMETER Experiment Name: At_42deg_Heat_P Parameter: Organism Value: A. thaliana
  misc_feature: MA Experiment 20000173 PARAMETER Experiment Name: At_42deg_Heat_P Parameter: Plant Line Value: WS
  misc_feature: MA Experiment 20000173 PARAMETER Experiment Name: At_42deg_Heat_P Parameter: Temperature (deg C) Value: 42 vs. 22
  misc_feature: MA Experiment 20000173 PARAMETER Experiment Name: At_42deg_Heat_P Parameter: Timepoint (hr) Value: 6
  misc_feature: MA Experiment 20000173 PARAMETER Experiment Name: At_42deg_Heat_P Parameter: Tissue Value: Aerial
  misc_feature: MA Experiment ID: 20000180 Result: Up-regulated in Transcription
  misc_feature: MA Experiment 20000180 PARAMETER Experiment Name: At_Germinating_Seeds_P Parameter: Age (hr) Value: 24 vs. 0
  misc_feature: MA Experiment 20000180 PARAMETER Experiment Name: At_Germinating_Seeds_P Parameter: Tissue Value: Germinating Seeds
  misc_feature: MA Experiment ID: 20000234 Result: Up-regulated in Transcription
  misc_feature: MA Experiment 20000234 PARAMETER Experiment Name: At_Siliques_P Parameter: Age (day) Value: 21
  misc_feature: MA Experiment 20000234 PARAMETER Experiment Name: At_Siliques_P Parameter: Organism Value: A. thaliana
  misc_feature: MA Experiment 20000234 PARAMETER Experiment Name: At_Siliques_P Parameter: Plant Line Value: WS
  misc_feature: MA Experiment 20000234 PARAMETER Experiment Name: At_Siliques_P Parameter: Tissue Value: Less Than 5mm Siliques vs. Whole Plant
  misc_feature: MA Experiment ID: 20000235 Result: Up-regulated in Transcription
  misc_feature: MA Experiment 20000235 PARAMETER Experiment Name: At_Siliques_P Parameter: Age (day) Value: 21
  misc_feature: MA Experiment 20000235 PARAMETER Experiment Name: At_Siliques_P Parameter: Organism Value: A. thaliana
  misc_feature: MA Experiment 20000235 PARAMETER Experiment Name: At_Siliques_P Parameter: Plant Line Value: WS
  misc_feature: MA Experiment 20000235 PARAMETER Experiment Name: At_Siliques_P Parameter: Tissue Value: 5-10mm Siliques vs. Whole Plant
  misc_feature: MA Experiment ID: 20001248 Result: Down-regulated in Transcription
  misc_feature: MA Experiment 20001248 PARAMETER Experiment Name: At_Far-red-induction_P Parameter: Age (day) Value: 7
  misc_feature: MA Experiment 20001248 PARAMETER Experiment Name: At_Far-red-induction_P Parameter: Light Value: Far-red vs. White
  misc_feature: MA Experiment 20001248 PARAMETER Experiment Name: At_Far-red-induction_P Parameter: Organism Value: A. thaliana
  misc_feature: MA Experiment 20001248 PARAMETER Experiment Name: At_Far-red-induction_P Parameter: Plant Line Value: Columbia
  misc_feature: MA Experiment 20001248 PARAMETER Experiment Name: At_Far-red-induction_P Parameter: Timepoint (hr) Value: 4
  misc_feature: MA Experiment 20001248 PARAMETER Experiment Name: At_Far-red-induction_P Parameter: Tissue Value: Whole Plant
  misc_feature: MA Experiment ID: 20001560 Result: Up-regulated in Transcription
  misc_feature: MA Experiment 20001560 PARAMETER Experiment Name: At_Drought_Soil_Dry_P Parameter: Age (day) Value: 28
  misc_feature: MA Experiment 20001560 PARAMETER Experiment Name: At_Drought_Soil_Dry_P Parameter: Organism Value: A. thaliana
  misc_feature: MA Experiment 20001560 PARAMETER Experiment Name: At_Drought_Soil_Dry_P Parameter: Plant Line Value: WS
  misc_feature: MA Experiment 20001560 PARAMETER Experiment Name: At_Drought_Soil_Dry_P Parameter: Post Timepoint (hr) Value: None
  misc_feature: MA Experiment 20001560 PARAMETER Experiment Name: At_Drought_Soil_Dry_P Parameter: Post-Treatment Value: None
  misc_feature: MA Experiment 20001560 PARAMETER Experiment Name: At_Drought_Soil_Dry_P Parameter: Timepoint (day) Value: 14
  misc_feature: MA Experiment 20001560 PARAMETER Experiment Name: At_Drought_Soil_Dry_P Parameter: Treatment Value: Drought vs. No Drought
gggaggcacacattacacaccaaagcagtgttttctttctcctgaaaagatttttcaagctctctctttctctcaaaggtaaatgcttctctgatttcgccatttttgcttactcgattcaaaagacatgtcgccggcagctacggagacggagcgatggtgcgttgttaccggcggtagaggattcgcggcgaggcatcttgttgaaatgctcgtacgctacgaaatgttttgcgtccgtatcgccgatttagctccggcgataatgcttgatcctcaggaagggaacggagttctcgacgaaggattaagatctggtcgtgttcaatatatctccgctgatcttcgagataaatctcaagtcgttaaagcttttcagggagcggaggtggtgtttcatatggcagctccagattcttctattaacaatcatcagcttcagtattcggtgaatgttcaagggacacaaaatgtgattgatgcttgtgttgatgttggagtaaagaggcttatttacactagctctcctagtgttgtgtttgatggtgttcatggtattttgaacggtactgaatcaatggcttacccaattaagcacaatgactcatattcagcaactaaagctgaaggagaagagttgatcatgaaggctaatggtagaaatggactactcacttgttgcatacgtccaagcagtatttttggtcccggtgatagattattggttccgtcgcttgttgctgctgctagggctgggaaatctaagcttcaggaggagatgtttctacaaaagctgcaggacagtggatttacaggcatatttcattaccaacatggagccaattaaattttgggaatttatgtcacagctccttgatggacttggttacgagaggccaagcataaagatccctgcgtttatcatgatgccgattgcgcatctggttgaactgacatataaagtgttgggaccatatgggatgacagtaccacaactaacaccttcaagagttaggcttctctcatgcagcagaactttcgattccacgaaagcaaaggatcgactaggctatgctcctgtggtcccacttcaggaaggtatacggaggacgatagactcattctctcacctaacagctggaagtcaatccaaaagagagggcccatccaaggcttctaggattcttggaggcggaaaggttgctgatacacttctctggaaggatttaaagcagactcttattgccatattcattctaattagtatctattataactttgttgcaactgggtctaccgtcgtaactgctctttcgaaggctctattggtagcatctgtatttttgttcctccatggcattctaccagagaaaatatttggttatacagttgaaaagattcctgcatcgcaatttcacctctcaaaagactcatcacatgacctctcattgtcagtgatctcttcatggaacaccactgtaaaagctttaagatctctttgccaggggaatgattggagcttctttttcaaggtggtcttcgttttgttagcattgagtttggctggagccatatctcttcacagcatatttgttataggactgcccattgccttccttgcttttctcgtgtacgaaaagaaagagcaagagatcgactcaatagtggtgagttttaaatctttcgcatgcaagcacaaatccgatgtgtatgagaaattgttcggaagcaagaaacatgactaaaaaccctttttttgcccagcatttgtaattttcttttgtttccaacgacctctaactctggtttgagcttttttcaagttttattatttgtgaa

SEQ ID NO: 77818 - protein, 363 aa, Arabidopsis thaliana
  peptide (1)..(363): Ceres Seq. ID no. 12580656
  misc_feature (54)..(157): Pfam Name: 3-beta hydroxysteroid dehydrogenase/isomerase family Pfam Description: 3-beta hydroxysteroid dehydrogenase/isomerase
  misc_feature (1)..(363): Homolog of NCBI NO: 21539467 NR Description: 3-beta-hydroxysteroid dehydrogenase [Arabidopsis
  misc_feature (54)..(182): Homolog of NCBI NO: 15225272 NR Description: 3-beta-hydroxysteroid dehydrogenase; protein id:
  misc_feature (54)..(338): Homolog of NCBI NO: 31415899 NR Description: putative 3-beta hydroxysteroid
  misc_feature (48)..(243): Homolog of NCBI NO: 30694041 NR Description: 3-beta hydroxysteroid dehydrogenase/isomerase [Arabidopsis thaliana] >gi|25405196|pir||F96513 hypothetical
  misc_feature (48)..(183): Homolog of NCBI NO: 21553411 NR Description: 3-beta-hydroxysteroid dehydrogenase, putative
  misc_feature (48)..(183): Homolog of NCBI NO: 18401656 NR Description: 3-beta-hydroxysteroid dehydrogenase, putative; id: At1g47290.1, supported by cDNA: 142354. [Arabidopsis
  misc_feature (54)..(181): Homolog of NCBI NO: 31415898 NR Description: putative 3-beta hydroxysteroid
  misc_feature (56)..(334): Homolog of NCBI NO: 18406234 NR Description: putative sterol dehydrogenase; protein id: supported by cDNA: gi_15027968 [Arabidopsis thaliana] putative sterol dehydrogenase [Arabidopsis thaliana]
  misc_feature (56)..(157): Homolog of NCBI NO: 25408868 NR Description: probable sterol dehydrogenase [imported] -
  misc_feature (54)..(160): Homolog of NCBI NO: 31127258 NR Description: Nsdhl protein [Mus musculus]
MVEMDYSLVAYVQAVFLVPVIDYWFRRLLLLLGLGNLSFRRRCFYKSCRTVDLQAYFITNMEPIKFWEFMSQLLDGLGYERPSIKIPAFIMMPIAHLVELTYKVLGPYGMTVPQLTPSRVRLLSCSRTFDSTKAKDRLGYAPVVPLQEGIRRTIDSFSHLTAGSQSKREGPSKASRILGGGKVADTLLWKDLKQTLIAIFILISIYYNFVATGSTVVTALSKALLVASVFLFLHGILPEKIFGYTVEKIPASQFHLSKDSSHDLSLSVISSWNTTVKALRSLCQGNDWSFFFKVVFVLLALSLAGAISLHSIFVIGLPIAFLAFLVYEKKEQEIDSIVVSFKSFACKHKSDVYEKLFGSKKHD

SEQ ID NO: 77819 - protein, 360 aa, Arabidopsis thaliana
  peptide (1)..(360): Ceres Seq. ID no. 12580657
  misc_feature (51)..(154): Pfam Name: 3-beta hydroxysteroid dehydrogenase/isomerase family Pfam Description: 3-beta hydroxysteroid dehydrogenase/isomerase
  misc_feature (1)..(360): Homolog of NCBI NO: 21539467 NR Description: 3-beta-hydroxysteroid dehydrogenase [Arabidopsis
  misc_feature (51)..(179): Homolog of NCBI NO: 15225272 NR Description: 3-beta-hydroxysteroid dehydrogenase; protein id:
  misc_feature (51)..(335): Homolog of NCBI NO: 31415899 NR Description: putative 3-beta hydroxysteroid
  misc_feature (45)..(240): Homolog of NCBI NO: 30694041 NR Description: 3-beta hydroxysteroid dehydrogenase/isomerase [Arabidopsis thaliana] >gi|25405196|pir||F96513 hypothetical
  misc_feature (45)..(180): Homolog of NCBI NO: 21553411 NR Description: 3-beta-hydroxysteroid dehydrogenase, putative
  misc_feature (45)..(180): Homolog of NCBI NO: 18401656 NR Description: 3-beta-hydroxysteroid dehydrogenase, putative; id: At1g47290.1, supported by cDNA: 142354. [Arabidopsis
  misc_feature (51)..(178): Homolog of NCBI NO: 31415898 NR Description: putative 3-beta hydroxysteroid
  misc_feature (53)..(331): Homolog of NCBI NO: 18406234 NR Description: putative sterol dehydrogenase; protein id: supported by cDNA: gi_15027968 [Arabidopsis thaliana] putative sterol dehydrogenase [Arabidopsis thaliana]
  misc_feature (53)..(154): Homolog of NCBI NO: 25408868 NR Description: probable sterol dehydrogenase [imported] -
  misc_feature (51)..(157): Homolog of NCBI NO: 31127258 NR Description: Nsdhl protein [Mus musculus]
MDYSLVAYVQAVFLVPVIDYWFRRLLLLLGLGNLSFRRRCFYKSCRTVDLQAYFITNMEPIKFWEFMSQLLDGLGYERPSIKIPAFIMMPIAHLVELTYKVLGPYGMTVPQLTPSRVRLLSCSRTFDSTKAKDRLGYAPVVPLQEGIRRTIDSFSHLTAGSQSKREGPSKASRILGGGKVADTLLWKDLKQTLIAIFILISIYYNFVATGSTVVTALSKALLVASVFLFLHGILPEKIFGYTVEKIPASQFHLSKDSSHDLSLSVISSWNTTVKALRSLCQGNDWSFFFKVVFVLLALSLAGAISLHSIFVIGLPIAFLAFLVYEKKEQEIDSIVVSFKSFACKHKSDVYEKLFGSKKHD

SEQ ID NO: 77820 - protein, 303 aa, Arabidopsis thaliana
  peptide (1)..(303): Ceres Seq. ID no. 12580658
  misc_feature (1)..(97): Pfam Name: 3-beta hydroxysteroid dehydrogenase/isomerase family Pfam Description: 3-beta hydroxysteroid dehydrogenase/isomerase
  misc_feature (1)..(303): Homolog of NCBI NO: 21539467 NR Description: 3-beta-hydroxysteroid dehydrogenase [Arabidopsis
  misc_feature (1)..(122): Homolog of NCBI NO: 15225272 NR Description: 3-beta-hydroxysteroid dehydrogenase; protein id:
  misc_feature (1)..(278): Homolog of NCBI NO: 31415899 NR Description: putative 3-beta hydroxysteroid
  misc_feature (1)..(183): Homolog of NCBI NO: 30694041 NR Description: 3-beta hydroxysteroid dehydrogenase/isomerase [Arabidopsis thaliana] >gi|25405196|pir||F96513 hypothetical
  misc_feature (1)..(123): Homolog of NCBI NO: 21553411 NR Description: 3-beta-hydroxysteroid dehydrogenase, putative
  misc_feature (1)..(123): Homolog of NCBI NO: 18401656 NR Description: 3-beta-hydroxysteroid dehydrogenase, putative; id: At1g47290.1, supported by cDNA: 142354. [Arabidopsis
  misc_feature (1)..(121): Homolog of NCBI NO: 31415898 NR Description: putative 3-beta hydroxysteroid
  misc_feature (1)..(274): Homolog of NCBI NO: 18406234 NR Description: putative sterol dehydrogenase; protein id: supported by cDNA: gi_15027968 [Arabidopsis thaliana] putative sterol dehydrogenase [Arabidopsis thaliana]
  misc_feature (1)..(97): Homolog of NCBI NO: 25408868 NR Description: probable sterol dehydrogenase [imported] -
  misc_feature (1)..(100): Homolog of NCBI NO: 31127258 NR Description: Nsdhl protein [Mus musculus]
MEPIKFWEFMSQLLDGLGYERPSIKIPAFIMMPIAHLVELTYKVLGPYGMTVPQLTPSRVRLLSCSRTFDSTKAKDRLGYAPVVPLQEGIRRTIDSFSHLTAGSQSKREGPSKASRILGGGKVADTLLWKDLKQTLIAIFILISIYYNFVATGSTVVTALSKALLVASVFLFLHGILPEKIFGYTVEKIPASQFHLSKDSSHDLSLSVISSWNTTVKALRSLCQGNDWSFFFKVVFVLLALSLAGAISLHSIFVIGLPIAFLAFLVYEKKEQEIDSIVVSFKSFACKHKSDVYEKLFGSKKHD

SEQ ID NO: 77821 - DNA, 2239 bp, Arabidopsis thaliana
  misc_feature (1)..(2239): Ceres Seq. ID no. 12580671
  misc_feature: MA Experiment ID: 20000315 Result: Down-regulated in Transcription
  misc_feature: MA Experiment 20000315 PARAMETER Experiment Name: At_14day_Shoots-Roots_Sub_P Parameter: Age (day) Value: 14
  misc_feature: MA Experiment 20000315 PARAMETER Experiment Name: At_14day_Shoots-Roots_Sub_P Parameter: Organism Value: A. thaliana
  misc_feature: MA Experiment 20000315 PARAMETER Experiment Name: At_14day_Shoots-Roots_Sub_P Parameter: Plant Line Value: WS
  misc_feature: MA Experiment 20000315 PARAMETER Experiment Name: At_14day_Shoots-Roots_Sub_P Parameter: Tissue Value: Shoots vs. Whole Plant
  misc_feature: MA Experiment ID: 20000355 Result: Down-regulated in Transcription
  misc_feature: MA Experiment 20000355 PARAMETER Experiment Name: At_Siliques_Sub_P Parameter: Age (day) Value: 21
  misc_feature: MA Experiment 20000355 PARAMETER Experiment Name: At_Siliques_Sub_P Parameter: Organism Value: A. thaliana
  misc_feature: MA Experiment 20000355 PARAMETER Experiment Name: At_Siliques_Sub_P Parameter: Plant Line Value: WS
  misc_feature: MA Experiment 20000355 PARAMETER Experiment Name: At_Siliques_Sub_P Parameter: Tissue Value: Less Than 5mm Siliques vs. Whole Plant
aaaagtccatatatctttctctcatctactcgatttctgaatcgcgaacgcagcgagcgatccggaatcgagagagagagctaccaatttttccaacttgttcggttccttataaagctgtttactttcccttgcgaattctctctctctctactataaagcaatacccttttctttcttttttggtaacccccaaaccctactttgtccagcgagaaaggaagaggggtttcgtctgattccgctaaatctctagtctttatctaaagatcatggattccgatgatgatatgcacgatatggactcggtagattatgattattacagcggcggcacctatgatgacaacgatagtgatgaaactgatttcgggtttggtgaggctgacaccgacgatgccgccatcatcgcctcctatcgctctaagagtaattatgttgttctcaaggaagaagatattcgcaggcatcagaacgatgatgttgggcgagtttccgcggtcctctccataaccgatgtcgaagcaagtactttgcttcttcactatcactggagtgtcagtaaagttaatgatgaatggtttgcggatgaggagagagttcgcagaactgttggcatattagagggacctgttgttacaacacctgatggcagagaatttacatgtggaatatgctttgattcctacactcttgaggaaattgtatcggtttcttgtggtcatcctttctgcgctacatgttggacaggttatataagcacaaccatcaatgatggcccaggctgtttgatgctaaaatgtcccgacccttcttgtcctgctgctattggtcgagatatgatcgataagttggcttctaaggaagacaaggagaagtattatagatattttcttagatcttatgtcgaagtcaacagagagatgaagtggtgtcctgccccaggatgtgaacatgcaattgattttgctggtgggaccgaaagttatgatgtttcgtgcttgtgttcgcatagcttttgctggaattgcactgaagaggctcaccgtcctgtggattgtgacacagttggaaaatggatactaaagaacagcgctgaatctgaaaatatgaattggatacttgccaattcaaagccttgtccaaagtgtaagcggccaattgaaaagaatcatggctgtatgcacatgacatgcacaccaccttgtaaatttgagttttgttggctttgccttaacgcatggacagaacacggggaaagaactggtggattttatgcctgcaaccggtatgaggcggctaagcaagaagggttgtatgatgaggctgaaaggaggcgagagatggcaaaaaattcgctagagagatacactcattactatgaacgctgggcaagcaatcaagtgtcgaggcaaaaagctatgggggatctgcagaaaatgcaatcagagaagcttgggaagcttagtgacattcagtgcacaccagaatctcagctcaagtttatcgcagaggcttggctccagatcattgaatgcagacgggtactgaaatggacatatgcatatggatactatctacaagatcatgctaagaaaccattttttgagtatttgcaaggggaggctgagtcaggtttggagaggctccacaaatgcgtagagaaggatatagaggtgtttgaacttgctgagggcccttcagaggaattcaatcatttccggacaaaattaactggtttaaccagcataacaaaaaccttctttgaaaatctggtgaaagctctggagaatggtcttgctgatgtggattcacaagctgctagcagcaaaccagctaactctaaaccttctagcaagacaaaaggcggtgggaaaggtaaaggaagctccaaaaatggcgggtccagcagaaacccagatggcaattgagatctctcaggtttcagttacatcactcagtctctctcacaaaggtctagattactcaggaagaagaaagactttttaagagttcagcaaattggagaaaggtttggggtttagaatacttttgactacactcctgtgagtttgaaggctgttaaggcacaagactgcacacacaagttaactatctctctctgtcttaagggttcatgatagtctttgcttaccctaaatattgtatagtattaaagaatctgcacattgttactttggcttttgattgccttttgaaccatctgaagtttcttatc

SEQ ID NO: 77822 - protein, 552 aa, Arabidopsis thaliana
  peptide (1)..(552): Ceres Seq. ID no. 12580672
  misc_feature (201)..(263): Pfam Name: IBR domain Pfam Description: IBR domain
  misc_feature (1)..(552): Homolog of NCBI NO: 30679494 NR Description: expressed protein [Arabidopsis thaliana] unknown protein [Arabidopsis thaliana]
  misc_feature (1)..(552): Homolog of NCBI NO: 29125025 NR Description: ARIADNE-like protein ARI5 [Arabidopsis thaliana]
  misc_feature (1)..(287): Homolog of NCBI NO: 25406877 NR Description: hypothetical protein [imported] - Arabidopsis
  misc_feature (318)..(552): Homolog of NCBI NO: 25406877 NR Description: hypothetical protein [imported] - Arabidopsis
  misc_feature (1)..(552): Homolog of NCBI NO: 29125028 NR Description: ARIADNE-like protein ARI7 [Arabidopsis thaliana]
  misc_feature (14)..(546): Homolog of NCBI NO: 22330435 NR Description: unknown protein; protein id: At1g65430.1, by cDNA: gi_17065463 [Arabidopsis thaliana]
  misc_feature (14)..(546): Homolog of NCBI NO: 7487800 NR Description: hypothetical protein T8F5.21 - Arabidopsis >gi|3335347|gb|AAC27149.1|AAC27149 Contains similarity to ARI, finger protein gb|X98309 from Drosophila melanogaster. ESTs and
  misc_feature (18)..(519): Homolog of NCBI NO: 15225135 NR Description: putative ARI-like RING zinc finger protein;
  misc_feature (25)..(531): Homolog of NCBI NO: 15225136 NR Description: putative ARI-like RING zinc finger protein;
  misc_feature (3)..(531): Homolog of NCBI NO: 15225137 NR Description: similar to Ariadne protein from Drosophila; id: At2g31780.1 [Arabidopsis thaliana] >gi|25408184|pir||A84725
MDSDDDMHDMDSVDYDYYSGGTYDDNDSDETDFGFGEADTDDAAIIASYRSKSNYVVLKEEDIRRHQNDDVGRVSAVLSITDVEASTLLLHYHWSVSKVNDEWFADEERVRRTVGILEGPVVTTPDGREFTCGICFDSYTLEEIVSVSCGHPFCATCWTGYISTTINDGPGCLMLKCPDPSCPAAIGRDMIDKLASKEDKEKYYRYFLRSYVEVNREMKWCPAPGCEHAIDFAGGTESYDVSCLCSHSFCWNCTEEAHRPVDCDTVGKWILKNSAESENMNWILANSKPCPKCKRPIEKNHGCMHMTCTPPCKFEFCWLCLNAWTEHGERTGGFYACNRYEAAKQEGLYDEAERRREMAKNSLERYTHYYERWASNQVSRQKAMGDLQKMQSEKLGKLSDIQCTPESQLKFIAEAWLQIIECRRVLKWTYAYGYYLQDHAKKPFFEYLQGEAESGLERLHKCVEKDIEVFELAEGPSEEFNHFRTKLTGLTSITKTFFENLVKALENGLADVDSQAASSKPANSKPSSKTKGGGKGKGSSKNGGSSRNPDGN

SEQ ID NO: 77823 - protein, 546 aa, Arabidopsis thaliana
  peptide (1)..(546): Ceres Seq. ID no. 12580673
  misc_feature (195)..(257): Pfam Name: IBR domain Pfam Description: IBR domain
  misc_feature (1)..(546): Homolog of NCBI NO: 30679494 NR Description: expressed protein [Arabidopsis thaliana] unknown protein [Arabidopsis thaliana]
  misc_feature (1)..(546): Homolog of NCBI NO: 29125025 NR Description: ARIADNE-like protein ARI5 [Arabidopsis thaliana]
  misc_feature (1)..(281): Homolog of NCBI NO: 25406877 NR Description: hypothetical protein [imported] - Arabidopsis
  misc_feature (312)..(546): Homolog of NCBI NO: 25406877 NR Description: hypothetical protein [imported] - Arabidopsis
  misc_feature (1)..(546): Homolog of NCBI NO: 29125028 NR Description: ARIADNE-like protein ARI7 [Arabidopsis thaliana]
  misc_feature (8)..(540): Homolog of NCBI NO: 22330435 NR Description: unknown protein; protein id: At1g65430.1, by cDNA: gi_17065463 [Arabidopsis thaliana]
  misc_feature (8)..(540): Homolog of NCBI NO: 7487800 NR Description: hypothetical protein T8F5.21 - Arabidopsis >gi|3335347|gb|AAC27149.1|AAC27149 Contains similarity to ARI, finger protein gb|X98309 from Drosophila melanogaster. ESTs and
  misc_feature (12)..(513): Homolog of NCBI NO: 15225135 NR Description: putative ARI-like RING zinc finger protein;
  misc_feature (19)..(525): Homolog of NCBI NO: 15225136 NR Description: putative ARI-like RING zinc finger protein;
  misc_feature (1)..(525): Homolog of NCBI NO: 15225137 NR Description: similar to Ariadne protein from Drosophila; id: At2g31780.1 [Arabidopsis thaliana] >gi|25408184|pir||A84725
MHDMDSVDYDYYSGGTYDDNDSDETDFGFGEADTDDAAIIASYRSKSNYVVLKEEDIRRHQNDDVGRVSAVLSITDVEASTLLLHYHWSVSKVNDEWFADEERVRRTVGILEGPVVTTPDGREFTCGICFDSYTLEEIVSVSCGHPFCATCWTGYISTTINDGPGCLMLKCPDPSCPAAIGRDMIDKLASKEDKEKYYRYFLRSYVEVNREMKWCPAPGCEHAIDFAGGTESYDVSCLCSHSFCWNCTEEAHRPVDCDTVGKWILKNSAESENMNWILANSKPCPKCKRPIEKNHGCMHMTCTPPCKFEFCWLCLNAWTEHGERTGGFYACNRYEAAKQEGLYDEAERRREMAKNSLERYTHYYERWASNQVSRQKAMGDLQKMQSEKLGKLSDIQCTPESQLKFIAEAWLQIIECRRVLKWTYAYGYYLQDHAKKPFFEYLQGEAESGLERLHKCVEKDIEVFELAEGPSEEFNHFRTKLTGLTSITKTFFENLVKALENGLADVDSQAASSKPANSKPSSKTKGGGKGKGSSKNGGSSRNPDGN

SEQ ID NO: 77824 - protein, 543 aa, Arabidopsis thaliana
  peptide (1)..(543): Ceres Seq. ID no. 12580674
  misc_feature (192)..(254): Pfam Name: IBR domain Pfam Description: IBR domain
  misc_feature (1)..(543): Homolog of NCBI NO: 30679494 NR Description: expressed protein [Arabidopsis thaliana] unknown protein [Arabidopsis thaliana]
  misc_feature (1)..(543): Homolog of NCBI NO: 29125025 NR Description: ARIADNE-like protein ARI5 [Arabidopsis thaliana]
  misc_feature (1)..(278): Homolog of NCBI NO: 25406877 NR Description: hypothetical protein [imported] - Arabidopsis
  misc_feature (309)..(543): Homolog of NCBI NO: 25406877 NR Description: hypothetical protein [imported] - Arabidopsis
  misc_feature (1)..(543): Homolog of NCBI NO: 29125028 NR Description: ARIADNE-like protein ARI7 [Arabidopsis thaliana]
  misc_feature (5)..(537): Homolog of NCBI NO: 22330435 NR Description: unknown protein; protein id: At1g65430.1, by cDNA: gi_17065463 [Arabidopsis thaliana]
  misc_feature (5)..(537): Homolog of NCBI NO: 7487800 NR Description: hypothetical protein T8F5.21 - Arabidopsis >gi|3335347|gb|AAC27149.1|AAC27149 Contains similarity to ARI, finger protein gb|X98309 from Drosophila melanogaster. ESTs and
  misc_feature (9)..(510): Homolog of NCBI NO: 15225135 NR Description: putative ARI-like RING zinc finger protein;
  misc_feature (16)..(522): Homolog of NCBI NO: 15225136 NR Description: putative ARI-like RING zinc finger protein;
  misc_feature (1)..(522): Homolog of NCBI NO: 15225137 NR Description: similar to Ariadne protein from Drosophila; id: At2g31780.1 [Arabidopsis thaliana] >gi|25408184|pir||A84725
MDSVDYDYYSGGTYDDNDSDETDFGFGEADTDDAAIIASYRSKSNYVVLKEEDIRRHQNDDVGRVSAVLSITDVEASTLLLHYHWSVSKVNDEWFADEERVRRTVGILEGPVVTTPDGREFTCGICFDSYTLEEIVSVSCGHPFCATCWTGYISTTINDGPGCLMLKCPDPSCPAAIGRDMIDKLASKEDKEKYYRYFLRSYVEVNREMKWCPAPGCEHAIDFAGGTESYDVSCLCSHSFCWNCTEEAHRPVDCDTVGKWILKNSAESENMNWILANSKPCPKCKRPIEKNHGCMHMTCTPPCKFEFCWLCLNAWTEHGERTGGFYACNRYEAAKQEGLYDEAERRREMAKNSLERYTHYYERWASNQVSRQKAMGDLQKMQSEKLGKLSDIQCTPESQLKFIAEAWLQIIECRRVLKWTYAYGYYLQDHAKKPFFEYLQGEAESGLERLHKCVEKDIEVFELAEGPSEEFNHFRTKLTGLTSITKTFFENLVKALENGLADVDSQAASSKPANSKPSSKTKGGGKGKGSSKNGGSSRNPDGN

SEQ ID NO: 77825 - DNA, 1604 bp, Arabidopsis thaliana
  misc_feature (1)..(1604): Ceres Seq. ID no. 12580683
  misc_feature: MA Experiment ID: 20000173 Result: Up-regulated in Transcription
  misc_feature: MA Experiment 20000173 PARAMETER Experiment Name: At_42deg_Heat_P Parameter: Age (day) Value: 14
  misc_feature: MA Experiment 20000173 PARAMETER Experiment Name: At_42deg_Heat_P Parameter: Organism Value: A. thaliana
  misc_feature: MA Experiment 20000173 PARAMETER Experiment Name: At_42deg_Heat_P Parameter: Plant Line Value: WS
  misc_feature: MA Experiment 20000173 PARAMETER Experiment Name: At_42deg_Heat_P Parameter: Temperature (deg C) Value: 42 vs. 22
  misc_feature: MA Experiment 20000173 PARAMETER Experiment Name: At_42deg_Heat_P Parameter: Timepoint (hr) Value: 6
  misc_feature: MA Experiment 20000173 PARAMETER Experiment Name: At_42deg_Heat_P Parameter: Tissue Value: Aerial
  misc_feature: MA Experiment ID: 20000265 Result: Up-regulated in Transcription
  misc_feature: MA Experiment 20000265 PARAMETER Experiment Name: At_Open_Flower_P Parameter: Age (day) Value: 21
  misc_feature: MA Experiment 20000265 PARAMETER Experiment Name: At_Open_Flower_P Parameter: Plant Line Value: WS
  misc_feature: MA Experiment 20000265 PARAMETER Experiment Name: At_Open_Flower_P Parameter: Tissue Value: Closed Flower vs. Whole Plant
  misc_feature: MA Experiment ID: 20000267 Result: Up-regulated in Transcription
  misc_feature: MA Experiment 20000267 PARAMETER Experiment Name: At_Drought_P Parameter: Age (day) Value: 7
  misc_feature: MA Experiment 20000267 PARAMETER Experiment Name: At_Drought_P Parameter: Organism Value: A. thaliana
  misc_feature: MA Experiment 20000267 PARAMETER Experiment Name: At_Drought_P Parameter: Plant Line Value: WS
  misc_feature: MA Experiment 20000267 PARAMETER Experiment Name: At_Drought_P Parameter: Timepoint (hr) Value: 6
  misc_feature: MA Experiment 20000267 PARAMETER Experiment Name: At_Drought_P Parameter: Tissue Value: Whole Plant
  misc_feature: MA Experiment 20000267 PARAMETER Experiment Name: At_Drought_P Parameter: Treatment Value: Drought vs. No Drought
  misc_feature: MA Experiment ID: 20000268 Result: Up-regulated in Transcription
  misc_feature: MA Experiment 20000268 PARAMETER Experiment Name: At_100mM_NaCl__P Parameter: Age (day) Value: 14
  misc_feature: MA Experiment 20000268 PARAMETER Experiment Name: At_100mM_NaCl__P Parameter: Organism Value: A. thaliana
  misc_feature: MA Experiment 20000268 PARAMETER Experiment Name: At_100mM_NaCl__P Parameter: Plant Line Value: WS
  misc_feature: MA Experiment 20000268 PARAMETER Experiment Name: At_100mM_NaCl__P Parameter: Timepoint (hr) Value: 6
  misc_feature: MA Experiment 20000268 PARAMETER Experiment Name: At_100mM_NaCl__P Parameter: Tissue Value: Whole Plant
  misc_feature: MA Experiment 20000268 PARAMETER Experiment Name: At_100mM_NaCl__P Parameter: Treatment Value: 100mM NaCl vs. No Treatment
  misc_feature: MA Experiment ID: 20000436 Result: Up-regulated in Transcription
  misc_feature: MA Experiment 20000436 PARAMETER Experiment Name: At_Drought_P Parameter: Age (day) Value: 7
  misc_feature: MA Experiment 20000436 PARAMETER Experiment Name: At_Drought_P Parameter: Organism Value: A. thaliana
  misc_feature: MA Experiment 20000436 PARAMETER Experiment Name: At_Drought_P Parameter: Plant Line Value: WS
  misc_feature: MA Experiment 20000436 PARAMETER Experiment Name: At_Drought_P Parameter: Timepoint (hr) Value: 12
  misc_feature: MA Experiment 20000436 PARAMETER Experiment Name: At_Drought_P Parameter: Tissue Value: Whole Plant
  misc_feature: MA Experiment 20000436 PARAMETER Experiment Name: At_Drought_P Parameter: Treatment Value: Drought vs. No Drought
  misc_feature: MA Experiment ID: 20000495 Result: Up-regulated in Transcription
  misc_feature: MA Experiment 20000495 PARAMETER Experiment Name: At_Guard_Cells_P Parameter: Harvest Date Value: 8/2/2002
  misc_feature: MA Experiment 20000495 PARAMETER Experiment Name: At_Guard_Cells_P Parameter: Organism Value: A. thaliana
  misc_feature: MA Experiment 20000495 PARAMETER Experiment Name: At_Guard_Cells_P Parameter: Tissue Value: Guard Cells vs. Leaves
  misc_feature: MA Experiment ID: 20001557 Result: Up-regulated in Transcription
  misc_feature: MA Experiment 20001557 PARAMETER Experiment Name: At_Drought_Soil_Dry_P Parameter: Age (day) Value: 27
  misc_feature: MA Experiment 20001557 PARAMETER Experiment Name: At_Drought_Soil_Dry_P Parameter: Organism Value: A. thaliana
  misc_feature: MA Experiment 20001557 PARAMETER Experiment Name: At_Drought_Soil_Dry_P Parameter: Plant Line Value: WS
  misc_feature: MA Experiment 20001557 PARAMETER Experiment Name: At_Drought_Soil_Dry_P Parameter: Post Timepoint (hr) Value: 3
  misc_feature: MA Experiment 20001557 PARAMETER Experiment Name: At_Drought_Soil_Dry_P Parameter: Post-Treatment Value: Re-Water vs. No Drought
  misc_feature: MA Experiment 20001557 PARAMETER Experiment Name: At_Drought_Soil_Dry_P Parameter: Timepoint (day) Value: 13
  misc_feature: MA Experiment 20001557 PARAMETER Experiment Name: At_Drought_Soil_Dry_P Parameter: Treatment Value: Drought vs. No Drought
  misc_feature: MA Experiment ID: 20001911 Result: Up-regulated in Transcription
  misc_feature: MA Experiment 20001911 PARAMETER Experiment Name: At_Drought_Reproduction_P Parameter: Age (day) Value: 40
  misc_feature: MA Experiment 20001911 PARAMETER Experiment Name: At_Drought_Reproduction_P Parameter: Organism Value: A. thaliana
  misc_feature: MA Experiment 20001911 PARAMETER Experiment Name: At_Drought_Reproduction_P Parameter: Plant Line Value: WS
  misc_feature: MA Experiment 20001911 PARAMETER Experiment Name: At_Drought_Reproduction_P Parameter: Timepoint (day) Value: 10
  misc_feature: MA Experiment 20001911 PARAMETER Experiment Name: At_Drought_Reproduction_P Parameter: Tissue Value: Flowers
  misc_feature: MA Experiment 20001911 PARAMETER Experiment Name: At_Drought_Reproduction_P Parameter: Treatment Value: Drought vs. No Drought
acaatatcacattcacactacctcagcttccgaccacctccactgttaataaactcaaacctctgcaattgtcttcttctcttcaactccatcatctccaccaccggcattctcgccggaatccaatggagcttaccagcttccatcgctcttctctcttattcctcatctcactaacattgatcattctcccgacgacaacaacttcaatcggagtaaactacggtcaaatcggagacaacctcccctccccaaccgacgtaatcccactaataaaatcaatcggagcaacaaaagtaaaactctacgacgcaaatccacaaatcctcaaagctttctccaacaccggaatcgaattcatcatcggactcggcaacgaatacctctccaaaatgaaagatccttcaaaagccttaacatggatcaaacaaaacgttactccatttttacctgcgactaacatcacatgcataactatcggtaacgaaatcctcgctctcaacgactcttcactcactaccaatctcctcccagcgatgcaaggagttcactctgctttaatcaccgccggtctctccgatcaaatctccgtcaccaccgcgcattctctctcgatcctcaaatcctcattcccaccttccgccggcgagtttcaaccggatctactcgattcgctaactccgatcttagaatttcaccggaaaactgattctccgttcttaatcaacgcgtatcctttcttcgcttacaaaggaaaccctaaagaagttcctttagatttcgttctgtttcaacctaatcaaggaatcgtagatccggccaccggttttcactacgataacatgttgttcgctcagatcgacgctgtctactctgctttagcggcggcggggtttaaatcgttgagagttgagatatcggagactgggtggccatcgaaaggtgacgacgatgaggtcggagctacgccggagaatgcgaagaggtataacggaaacttgattaagatgatgatgagtggtaaaaagactaaaacgcccttgaagcctaataatgatctaagtatttacgtttttgccctttttaatgagaatttgaaacctggtccgacgtcggagaggaattatggcttgtttaaacctgatgggactcaggcttattcacttgggtttgctttaaacgatgtcgtgagaggtgctagtggtggtggtaccggtggtgggaatagtagtagcggtggaggaagggataagtcaccggtgtttccggtttctccggtggccccggatagtgcgtccactggttatttagcaatttcggcttctccggtaacggggaaaagaaaagggaaaggggcaatattgtcattggtggtgagcatgttactggcgagacacttactttgattacacgaaactcgagtttaacttactagaagttaaagttgtcctgaagccatttgcattcttctaaattccagatattttttttacttgagctattttcacggctatttttcgtttttattactcctataatctttatgttagaaattcattttgcaccttatgtagtatgaggaattgaggatcacacatttaatt

SEQ ID NO: 77826 - protein, 467 aa, Arabidopsis thaliana
  peptide (1)..(467): Ceres Seq. ID no. 12580684
  misc_feature (70)..(390): Pfam Name: Glycosyl hydrolases family 17 Pfam Description: Glycosyl hydrolases family 17
  misc_feature (42)..(467): Homolog of NCBI NO: 30692765 NR Description: glycosyl hydrolase family 17 [Arabidopsis
  misc_feature (42)..(444): Homolog of NCBI NO: 25316443 NR Description: CDS protein F9L11.6 [imported] - Arabidopsis
  misc_feature (40)..(444): Homolog of NCBI NO: 419789 NR Description: hypothetical protein - potato
  misc_feature (44)..(462): Homolog of NCBI NO: 15238298 NR Description: glycosyl hydrolase family 17; protein id: supported by cDNA: 11988., supported by cDNA: gi_15451219
  misc_feature (44)..(396): Homolog of NCBI NO: 18401444 NR Description: glycosyl hydrolase family 17; protein id: supported by cDNA: 1126., supported by cDNA: gi_17473571,
  misc_feature (44)..(396): Homolog of NCBI NO: 25316425 NR Description: probable beta-1,3-glucanase [imported] -
  misc_feature (50)..(408): Homolog of NCBI NO: 38346337 NR Description: OSJNBa0073L04.8 [Oryza sativa (japonica
  misc_feature (69)..(441): Homolog of NCBI NO: 6006371 NR Description: Similar to hypothetical protein - potato (S31196)
  misc_feature (42)..(401): Homolog of NCBI NO: 34908492 NR Description: putative beta-1,3-glucanase [Oryza sativa
  misc_feature (55)..(453): Homolog of NCBI NO: 25316444 NR Description: probable beta-1,3-glucanase [imported] -
NITFTLPQLPTTSTVNKLKPLQLSSSLQLHHLHHRHSRRNPMELTSFHRSSLLFLISLTLIILPTTTTSIGVNYGQIGDNLPSPTDVIPLIKSIGATKVKLYDANPQILKAFSNTGIEFIIGLGNEYLSKMKDPSKALTWIKQNVTPFLPATNITCITIGNEILALNDSSLTTNLLPAMQGVHSALITAGLSDQISVTTAHSLSILKSSFPPSAGEFQPDLLDSLTPILEFHRKTDSPFLINAYPFFAYKGNPKEVPLDFVLFQPNQGIVDPATGFHYDNMLFAQIDAVYSALAAAGFKSLRVEISETGWPSKGDDDEVGATPENAKRYNGNLIKMMMSGKKTKTPLKPNNDLSIYVFALFNENLKPGPTSERNYGLFKPDGTQAYSLGFALNDVVRGASGGGTGGGNSSSGGGRDKSPVFPVSPVAPDSASTGYLAISASPVTGKRKGKGAILSLVVSMLLARHLL

SEQ ID NO: 77827 - protein, 426 aa, Arabidopsis thaliana
  peptide (1)..(426): Ceres Seq. ID no. 12580685
  misc_feature (29)..(349): Pfam Name: Glycosyl hydrolases family 17 Pfam Description: Glycosyl hydrolases family 17
  misc_feature (1)..(426): Homolog of NCBI NO: 30692765 NR Description: glycosyl hydrolase family 17 [Arabidopsis
  misc_feature (1)..(403): Homolog of NCBI NO: 25316443 NR Description: CDS protein F9L11.6 [imported] - Arabidopsis
  misc_feature (1)..(403): Homolog of NCBI NO: 419789 NR Description: hypothetical protein - potato
  misc_feature (3)..(421): Homolog of NCBI NO: 15238298 NR Description: glycosyl hydrolase family 17; protein id: supported by cDNA: 11988., supported by cDNA: gi_15451219
  misc_feature (3)..(355): Homolog of NCBI NO: 18401444 NR Description: glycosyl hydrolase family 17; protein id: supported by cDNA: 1126., supported by cDNA: gi_17473571,
  misc_feature (3)..(355): Homolog of NCBI NO: 25316425 NR Description: probable beta-1,3-glucanase [imported] -
  misc_feature (9)..(367): Homolog of NCBI NO: 38346337 NR Description: OSJNBa0073L04.8 [Oryza sativa (japonica
  misc_feature (28)..(400): Homolog of NCBI NO: 6006371 NR Description: Similar to hypothetical protein - potato (S31196)
  misc_feature (1)..(360): Homolog of NCBI NO: 34908492 NR Description: putative beta-1,3-glucanase [Oryza sativa
  misc_feature (14)..(412): Homolog of NCBI NO: 25316444 NR Description: probable beta-1,3-glucanase [imported] -
MELTSFHRSSLLFLISLTLIILPTTTTSIGVNYGQIGDNLPSPTDVIPLIKSIGATKVKLYDANPQILKAFSNTGIEFIIGLGNEYLSKMKDPSKALTWIKQNVTPFLPATNITCITIGNEILALNDSSLTTNLLPAMQGVHSALITAGLSDQISVTTAHSLSILKSSFPPSAGEFQPDLLDSLTPILEFHRKTDSPFLINAYPFFAYKGNPKEVPLDFVLFQPNQGIVDPATGFHYDNMLFAQIDAVYSALAAAGFKSLRVEISETGWPSKGDDDEVGATPENAKRYNGNLIKMMMSGKKTKTPLKPNNDLSIYVFALFNENLKPGPTSERNYGLFKPDGTQAYSLGFALNDVVRGASGGGTGGGNSSSGGGRDKSPVFPVSPVAPDSASTGYLAISASPVTGKRKGKGAILSLVVSMLLARHLL

SEQ ID NO: 77828 - protein, 337 aa, Arabidopsis thaliana
  peptide (1)..(337): Ceres Seq. ID no. 12580686
  misc_feature (1)..(260): Pfam Name: Glycosyl hydrolases family 17 Pfam Description: Glycosyl hydrolases family 17
  misc_feature (1)..(337): Homolog of NCBI NO: 30692765 NR Description: glycosyl hydrolase family 17 [Arabidopsis
  misc_feature (1)..(314): Homolog of NCBI NO: 25316443 NR Description: CDS protein F9L11.6 [imported] - Arabidopsis
  misc_feature (1)..(314): Homolog of NCBI NO: 419789 NR Description: hypothetical protein - potato
  misc_feature (1)..(332): Homolog of NCBI NO: 15238298 NR Description: glycosyl hydrolase family 17; protein id: supported by cDNA: 11988., supported by cDNA: gi_15451219
  misc_feature (1)..(266): Homolog of NCBI NO: 18401444 NR Description: glycosyl hydrolase family 17; protein id: supported by cDNA: 1126., supported by cDNA: gi_17473571,
  misc_feature (1)..(266): Homolog of NCBI NO: 25316425 NR Description: probable beta-1,3-glucanase [imported] -
  misc_feature (1)..(278): Homolog of NCBI NO: 38346337 NR Description: OSJNBa0073L04.8 [Oryza sativa (japonica
  misc_feature (1)..(311): Homolog of NCBI NO: 6006371 NR Description: Similar to hypothetical protein - potato (S31196)
  misc_feature (1)..(271): Homolog of NCBI NO: 34908492 NR Description: putative beta-1,3-glucanase [Oryza sativa
  misc_feature (1)..(323): Homolog of NCBI NO: 25316444 NR Description: probable beta-1,3-glucanase [imported] -
MKDPSKALTWIKQNVTPFLPATNITCITIGNEILALNDSSLTTNLLPAMQGVHSALITAGLSDQISVTTAHSLSILKSSFPPSAGEFQPDLLDSLTPILEFHRKTDSPFLINAYPFFAYKGNPKEVPLDFVLFQPNQGIVDPATGFHYDNMLFAQIDAVYSALAAAGFKSLRVEISETGWPSKGDDDEVGATPENAKRYNGNLIKMMMSGKKTKTPLKPNNDLSIYVFALFNENLKPGPTSERNYGLFKPDGTQAYSLGFALNDVVRGASGGGTGGGNSSSGGGRDKSPVFPVSPVAPDSASTGYLAISASPVTGKRKGKGAILSLVVSMLLARHLL

SEQ ID NO: 77829 - DNA, 1789 bp, Arabidopsis thaliana
  misc_feature (1)..(1789): Ceres Seq. ID no. 12580698
  misc_feature: MA Experiment ID: 20001451 Result: Down-regulated in Transcription
  misc_feature: MA Experiment 20001451 PARAMETER Experiment Name: At_Far-red-induction_P Parameter: Age (day) Value: 7
  misc_feature: MA Experiment 20001451 PARAMETER Experiment Name: At_Far-red-induction_P Parameter: Light Value: Far-red vs. White
  misc_feature: MA Experiment 20001451 PARAMETER Experiment Name: At_Far-red-induction_P Parameter: Organism Value: A. thaliana
  misc_feature: MA Experiment 20001451 PARAMETER Experiment Name: At_Far-red-induction_P Parameter: Plant Line Value: Columbia
  misc_feature: MA Experiment 20001451 PARAMETER Experiment Name: At_Far-red-induction_P Parameter: Timepoint (hr) Value: 24
  misc_feature: MA Experiment 20001451 PARAMETER Experiment Name: At_Far-red-induction_P Parameter: Tissue Value: Whole Plant
  misc_feature: MA Experiment ID: 20001905 Result: Down-regulated in Transcription
  misc_feature: MA Experiment 20001905 PARAMETER Experiment Name: At_Drought_Reproduction_P Parameter: Age (day) Value: 40
  misc_feature: MA Experiment 20001905 PARAMETER Experiment Name: At_Drought_Reproduction_P Parameter: Organism Value: A. thaliana
  misc_feature: MA Experiment 20001905 PARAMETER Experiment Name: At_Drought_Reproduction_P Parameter: Plant Line Value: WS
  misc_feature: MA Experiment 20001905 PARAMETER Experiment Name: At_Drought_Reproduction_P Parameter: Timepoint (day) Value: 10
  misc_feature: MA Experiment 20001905 PARAMETER Experiment Name: At_Drought_Reproduction_P Parameter: Tissue Value: Rosettes
  misc_feature: MA Experiment 20001905 PARAMETER Experiment Name: At_Drought_Reproduction_P Parameter: Treatment Value: Drought vs. No Drought
aacacacgcctctaatctccgcgcacacacacacaccctcacgaagaagaagaagacgaagaagaatcaatggcttctgttatctcttcctctccttttctatgcaaatcatcctccaagagtgatttggggatttcttcgtttcctaaatcttctcagatttcgattcatcgatgtcagaagaaatcgatctcacggaagattgtttccgttatggctcctcaaaaggatcggtctcctggaactacaggatcggtgaaaactgggatgacaatgacggagaagattctagctagagcttcggagaagtcattagtggttcctggtgataacatttgggttaatgttgatgttcttatgactcatgatgtttgtggtcctggtgcttttggtatcttcaagagagagtttggtgaaaaagccaaggtttgggatccggagaagattgttgtgattccggatcattatattttcactgctgataagcgtgcaaaccggaatgttgacatcatgagggagcattgcagggaacagaatattaagtatttctatgatatcactgaccttggaaattttaaggctaatcctgactacaaaggtgtttgccatgttgcacttgcacaagaaggtcattgcaggccaggagaggttttgttaggaacagactcacacacttgtactgctggagcatttggtcaatttgctacagggattggaaacactgatgcaggttttgtgttaggcactggaaaaatcctccttaaggttccaccaacgatgaggtttatcttggatggtgagatgcctagttatttgcaagcaaaggatctgattttacaaattattggtgaaatatctgttgctggtgcaacttacaagacgatggagttcagtggtacaactatcgaaagtctgagtatggaagaaagaatgacattgtgcaacatggttgtggaagctgggggaaagaatggtgtcatccctcctgatgcgacgacattaaattatgttgagaataggacatctgtaccatttgagccagtatatagtgatggaaatgcaagctttgtcgcagattatagatttgacgtgtcaaagctggagcctgtggtggctaagcctcattctcctgacaaccgagctctagctagagaatgcaaagacgtgaaaattgacagagtatacatcggttcttgtactggtgggaagacagaggattttatggctgcagctaaacttttccacgcagcaggaagaaaggtcaaagttccaactttccttgtcccggctactcagaaggtgtggatggatgtgtatgctctcccggtacctggagcaggtggaaagacatgtgcgcagatctttgaagaagctggctgtgacacaccagccagccctagctgtggtgcttgccttggtggcccagcagacacctacgctcgcttgaatgaacctcaagtgtgtgtctcaacgacaaacaggaacttccccggtcggatgggacacaaagaagggcaaatttacttagcgtctccttacactgctgcagcctcggctttaaccggccgtgtcgctgacccaagggagttcttgcagtaggctaatgtaatggcttcgtgtgaaaaatcatatgctatgcatcgacgaaatattgctaaatgatggggcattgtgaactatatgtatgtattttccttatttcgctgttggacttgatagtttcaagcactatgtcaaactttgatgttttgagtttgaaataataaaagagagaaaaagagtgagttag

SEQ ID NO: 77830 - protein, 509 aa, Arabidopsis thaliana
  peptide (1)..(509): Ceres Seq. ID no. 12580699
  misc_feature (68)..(499): Pfam Name: Aconitase family (aconitate hydratase) Pfam Description: Aconitase family (aconitate hydratase)
  misc_feature (1)..(509): Homolog of NCBI NO: 18414006 NR Description: putative protein; protein id: At4g13430.1, by cDNA: gi_15027970 [Arabidopsis thaliana] unknown protein [Arabidopsis thaliana]
  misc_feature (1)..(509): Homolog of NCBI NO: 7450363 NR Description: hypothetical protein T9E8.170 - Arabidopsis >gi|4584548|emb|CAB40778.1| putative protein [Arabidopsis >gi|7268046|emb|CAB78385.1| putative protein [Arabidopsis
  misc_feature (67)..(508): Homolog of NCBI NO: 23043646 NR Description: hypothetical protein [Trichodesmium erythraeum
  misc_feature (68)..(508): Homolog of NCBI NO: 21673449 NR Description: 3-isopropylmalate dehydratase, large subunit,
  misc_feature (66)..(506): Homolog of NCBI NO: 15668676 NR Description: 3-isopropylmalate dehydratase (leuC)
  misc_feature (66)..(508): Homolog of NCBI NO: 20094876 NR Description: 3-isopropylmalate dehydratase large subunit
  misc_feature (66)..(509): Homolog of NCBI NO: 15606262 NR Description: large subunit of isopropylmalate isomerase
  misc_feature (67)..(504): Homolog of NCBI NO: 15679385 NR Description: 3-isopropylmalate dehydratase, LeuD subunit
  misc_feature (66)..(509): Homolog of NCBI NO: 18977310 NR Description: 3-isopropylmalate dehydratase large subunit;
  misc_feature (66)..(509): Homolog of NCBI NO: 14521549 NR Description: PUTATIVE 3-ISOPROPYLMALATE DEHYDRATASE LARGE GE
MASVISSSPFLCKSSSKSDLGISSFPKSSQISIHRCQKKSISRKIVSVMAPQKDRSPGTTGSVKTGMTMTEKILARASEKSLVVPGDNIWVNVDVLMTHDVCGPGAFGIFKREFGEKAKVWDPEKIVVIPDHYIFTADKRANRNVDIMREHCREQNIKYFYDITDLGNFKANPDYKGVCHVALAQEGHCRPGEVLLGTDSHTCTAGAFGQFATGIGNTDAGFVLGTGKILLKVPPTMRFILDGEMPSYLQAKDLILQIIGEISVAGATYKTMEFSGTTIESLSMEERMTLCNMVVEAGGKNGVIPPDATTLNYVENRTSVPFEPVYSDGNASFVADYRFDVSKLEPVVAKPHSPDNRALARECKDVKIDRVYIGSCTGGKTEDFMAAAKLFHAAGRKVKVPTFLVPATQKVWMDVYALPVPGAGGKTCAQIFEEAGCDTPASPSCGACLGGPADTYARLNEPQVCVSTTNRNFPGRMGHKEGQIYLASPYTAAASALTGRVADPREFLQ

SEQ ID NO: 77831 - protein, 461 aa, Arabidopsis thaliana
  peptide (1)..(461): Ceres Seq. ID no. 12580700
  misc_feature (20)..(451): Pfam Name: Aconitase family (aconitate hydratase) Pfam Description: Aconitase family (aconitate hydratase)
  misc_feature (1)..(461): Homolog of NCBI NO: 18414006 NR Description: putative protein; protein id: At4g13430.1, by cDNA: gi_15027970 [Arabidopsis thaliana] unknown protein [Arabidopsis thaliana]
  misc_feature (1)..(461): Homolog of NCBI NO: 7450363 NR Description: hypothetical protein T9E8.170 - Arabidopsis >gi|4584548|emb|CAB40778.1| putative protein [Arabidopsis >gi|7268046|emb|CAB78385.1| putative protein [Arabidopsis
  misc_feature (19)..(460): Homolog of NCBI NO: 23043646 NR Description: hypothetical protein [Trichodesmium erythraeum
  misc_feature (20)..(460): Homolog of NCBI NO: 21673449 NR Description: 3-isopropylmalate dehydratase, large subunit,
  misc_feature (18)..(458): Homolog of NCBI NO: 15668676 NR Description: 3-isopropylmalate dehydratase (leuC)
  misc_feature (18)..(460): Homolog of NCBI NO: 20094876 NR Description: 3-isopropylmalate dehydratase large subunit
  misc_feature (18)..(461): Homolog of NCBI NO: 15606262 NR Description: large subunit of isopropylmalate isomerase
  misc_feature (19)..(456): Homolog of NCBI NO: 15679385 NR Description: 3-isopropylmalate dehydratase, LeuD subunit
  misc_feature (18)..(461): Homolog of NCBI NO: 18977310 NR Description: 3-isopropylmalate dehydratase large subunit;
  misc_feature (18)..(461): Homolog of NCBI NO: 14521549 NR Description: PUTATIVE 3-ISOPROPYLMALATE DEHYDRATASE LARGE GE
MAPQKDRSPGTTGSVKTGMTMTEKILARASEKSLVVPGDNIWVNVDVLMTHDVCGPGAFGIFKREFGEKAKVWDPEKIVVIPDHYIFTADKRANRNVDIMREHCREQNIKYFYDITDLGNFKANPDYKGVCHVALAQEGHCRPGEVLLGTDSHTCTAGAFGQFATGIGNTDAGFVLGTGKILLKVPPTMRFILDGEMPSYLQAKDLILQIIGEISVAGATYKTMEFSGTTIESLSMEERMTLCNMVVEAGGKNGVIPPDATTLNYVENRTSVPFEPVYSDGNASFVADYRFDVSKLEPVVAKPHSPDNRALARECKDVKIDRVYIGSCTGGKTEDFMAAAKLFHAAGRKVKVPTFLVPATQKVWMDVYALPVPGAGGKTCAQIFEEAGCDTPASPSCGACLGGPADTYARLNEPQVCVSTTNRNFPGRMGHKEGQIYLASPYTAAASALTGRVADPREFLQ

SEQ ID NO: 77832 - protein, 443 aa, Arabidopsis thaliana
  peptide (1)..(443): Ceres Seq. ID no. 12580701
  misc_feature (2)..(433): Pfam Name: Aconitase family (aconitate hydratase) Pfam Description: Aconitase family (aconitate hydratase)
  misc_feature (1)..(443): Homolog of NCBI NO: 18414006 NR Description: putative protein; protein id: At4g13430.1, by cDNA: gi_15027970 [Arabidopsis thaliana] unknown protein [Arabidopsis thaliana]
  misc_feature (1)..(443): Homolog of NCBI NO: 7450363 NR Description: hypothetical protein T9E8.170 - Arabidopsis >gi|4584548|emb|CAB40778.1| putative protein [Arabidopsis >gi|7268046|emb|CAB78385.1| putative protein [Arabidopsis
  misc_feature (1)..(442): Homolog of NCBI NO: 23043646 NR Description: hypothetical protein [Trichodesmium erythraeum
  misc_feature (2)..(442): Homolog of NCBI NO: 21673449 NR Description: 3-isopropylmalate dehydratase, large subunit,
  misc_feature (1)..(440): Homolog of NCBI NO: 15668676 NR Description: 3-isopropylmalate dehydratase (leuC)
  misc_feature (1)..(442): Homolog of NCBI NO: 20094876 NR Description: 3-isopropylmalate dehydratase large subunit
  misc_feature (1)..(443): Homolog of NCBI NO: 15606262 NR Description: large subunit of isopropylmalate isomerase
  misc_feature (1)..(438): Homolog of NCBI NO: 15679385 NR Description: 3-isopropylmalate dehydratase, LeuD subunit
  misc_feature (1)..(443): Homolog of NCBI NO: 18977310 NR Description: 3-isopropylmalate dehydratase large subunit;
  misc_feature (1)..(443): Homolog of NCBI NO: 14521549 NR Description: PUTATIVE 3-ISOPROPYLMALATE DEHYDRATASE LARGE GE
MTMTEKILARASEKSLVVPGDNIWVNVDVLMTHDVCGPGAFGIFKREFGEKAKVWDPEKIVVIPDHYIFTADKRANRNVDIMREHCREQNIKYFYDITDLGNFKANPDYKGVCHVALAQEGHCRPGEVLLGTDSHTCTAGAFGQFATGIGNTDAGFVLGTGKILLKVPPTMRFILDGEMPSYLQAKDLILQIIGEISVAGATYKTMEFSGTTIESLSMEERMTLCNMVVEAGGKNGVIPPDATTLNYVENRTSVPFEPVYSDGNASFVADYRFDVSKLEPVVAKPHSPDNRALARECKDVKIDRVYIGSCTGGKTEDFMAAAKLFHAAGRKVKVPTFLVPATQKVWMDVYALPVPGAGGKTCAQIFEEAGCDTPASPSCGACLGGPADTYARLNEPQVCVSTTNRNFPGRMGHKEGQIYLASPYTAAASALTGRVADPREFLQ

SEQ ID NO: 77833 - DNA, 1357 bp, Arabidopsis thaliana
  misc_feature (1)..(1357): Ceres Seq. ID no. 12580720
  misc_feature: MA Experiment ID: 108433 Result: Down-regulated in Transcription
  misc_feature: MA Experiment 108433 PARAMETER Experiment Name: At_rhl_Mutant2_cDNA_P Parameter: Age (day) Value: 7
  misc_feature: MA Experiment 108433 PARAMETER Experiment Name: At_rhl_Mutant2_cDNA_P Parameter: Organism Value: A. thaliana
  misc_feature: MA Experiment 108433 PARAMETER Experiment Name: At_rhl_Mutant2_cDNA_P Parameter: Plant Line Value: rhl Mutant vs. wt landsburg
  misc_feature: MA Experiment 108433 PARAMETER Experiment Name: At_rhl_Mutant2_cDNA_P Parameter: Tissue Value: Roots
  misc_feature: MA Experiment ID: 108434 Result: Up-regulated in Transcription
  misc_feature: MA Experiment 108434 PARAMETER Experiment Name: At_Root_Tips_cDNA_P Parameter: Tissue Value: Root Tips
  misc_feature: MA Experiment ID: 108461 Result: Up-regulated in Transcription
  misc_feature: MA Experiment 108461 PARAMETER Experiment Name: At_Germinating_Seeds_cDNA_P Parameter: Age (day) Value: 1 vs. 0
  misc_feature: MA Experiment 108461 PARAMETER Experiment Name: At_Germinating_Seeds_cDNA_P Parameter: Tissue Value: Germinating Seeds
  misc_feature: MA Experiment ID: 108473 Result: Down-regulated in Transcription
  misc_feature: MA Experiment 108473 PARAMETER Experiment Name: At_Drought_Flowers_cDNA_P Parameter: Timepoint (hr) Value: 7 d
  misc_feature: MA Experiment 108473 PARAMETER Experiment Name: At_Drought_Flowers_cDNA_P Parameter: Tissue Value: Flower
  misc_feature: MA Experiment 108473 PARAMETER Experiment Name: At_Drought_Flowers_cDNA_P Parameter: Treatment Value: Drought vs. No Drought
  misc_feature: MA Experiment ID: 108573 Result: Up-regulated in Transcription
  misc_feature: MA Experiment 108573 PARAMETER Experiment Name: At_Drought_cDNA_P Parameter: Timepoint (hr) Value: 6
  misc_feature: MA Experiment 108573 PARAMETER Experiment Name: At_Drought_cDNA_P Parameter: Tissue Value: Aerial
  misc_feature: MA Experiment 108573 PARAMETER Experiment Name: At_Drought_cDNA_P Parameter: Treatment Value: Drought vs. No Drought
  misc_feature: MA Experiment ID: 20000111 Result: Down-regulated in Transcription
  misc_feature: MA Experiment 20000111 PARAMETER Experiment Name: At_42deg_Heat_cDNA_P Parameter: Temperature (deg C) Value: 42 vs. 22
  misc_feature: MA Experiment 20000111 PARAMETER Experiment Name: At_42deg_Heat_cDNA_P Parameter: Timepoint (hr) Value: 6
  misc_feature: MA Experiment 20000111 PARAMETER Experiment Name: At_42deg_Heat_cDNA_P Parameter: Tissue Value: Aerial
  misc_feature: MA Experiment ID: 20000171 Result: Down-regulated in Transcription
  misc_feature: MA Experiment 20000171 PARAMETER Experiment Name: At_42deg_Heat_P Parameter: Age (day) Value: 14
  misc_feature: MA Experiment 20000171 PARAMETER Experiment Name: At_42deg_Heat_P Parameter: Organism Value: A. thaliana
  misc_feature: MA Experiment 20000171 PARAMETER Experiment Name: At_42deg_Heat_P Parameter: Plant Line Value: WS
  misc_feature: MA Experiment 20000171 PARAMETER Experiment Name: At_42deg_Heat_P Parameter: Temperature (deg C) Value: 42 vs. 22
  misc_feature: MA Experiment 20000171 PARAMETER Experiment Name: At_42deg_Heat_P Parameter: Timepoint (hr) Value: 1
  misc_feature: MA Experiment 20000171 PARAMETER Experiment Name: At_42deg_Heat_P Parameter: Tissue Value: Aerial
  misc_feature: MA Experiment ID: 20000173 Result: Down-regulated in Transcription
  misc_feature: MA Experiment 20000173 PARAMETER Experiment Name: At_42deg_Heat_P Parameter: Age (day) Value: 14
  misc_feature: MA Experiment 20000173 PARAMETER Experiment Name: At_42deg_Heat_P Parameter: Organism Value: A. thaliana
  misc_feature: MA Experiment 20000173 PARAMETER Experiment Name: At_42deg_Heat_P Parameter: Plant Line Value: WS
  misc_feature: MA Experiment 20000173 PARAMETER Experiment Name: At_42deg_Heat_P Parameter: Temperature (deg C) Value: 42 vs. 22
  misc_feature: MA Experiment 20000173 PARAMETER Experiment Name: At_42deg_Heat_P Parameter: Timepoint (hr) Value: 6
  misc_feature: MA Experiment 20000173 PARAMETER Experiment Name: At_42deg_Heat_P Parameter: Tissue Value: Aerial
  misc_feature: MA Experiment ID: 20000180 Result: Up-regulated in Transcription
  misc_feature: MA Experiment 20000180 PARAMETER Experiment Name: At_Germinating_Seeds_P Parameter: Age (hr) Value: 24 vs. 0
  misc_feature: MA Experiment 20000180 PARAMETER Experiment Name: At_Germinating_Seeds_P Parameter: Tissue Value: Germinating Seeds
  misc_feature: MA Experiment ID: 20000184 Result: Down-regulated in Transcription
  misc_feature: MA Experiment 20000184 PARAMETER Experiment Name: At_Shoots__P Parameter: Age (day) Value: 7
  misc_feature: MA Experiment 20000184 PARAMETER Experiment Name: At_Shoots__P Parameter: Tissue Value: Shoots vs. Whole Plant
  misc_feature: MA Experiment ID: 20000224 Result: Up-regulated in Transcription
  misc_feature: MA Experiment ID: 20000265 Result: Up-regulated in Transcription
  misc_feature: MA Experiment 20000265 PARAMETER Experiment Name: At_Open_Flower_P Parameter: Age (day) Value: 21
  misc_feature: MA Experiment 20000265 PARAMETER Experiment Name: At_Open_Flower_P Parameter: Plant Line Value: WS
  misc_feature: MA Experiment 20000265 PARAMETER Experiment Name: At_Open_Flower_P Parameter: Tissue Value: Closed Flower vs. Whole Plant
  misc_feature: MA Experiment ID: 20000445 Result: Up-regulated in Transcription
  misc_feature: MA Experiment 20000445 PARAMETER Experiment Name: At_100uM_NAA__P Parameter: Age (day) Value: 14
  misc_feature: MA Experiment 20000445 PARAMETER Experiment Name: At_100uM_NAA__P Parameter: Organism Value: A. thaliana
  misc_feature: MA Experiment 20000445 PARAMETER Experiment Name: At_100uM_NAA__P Parameter: Plant Line Value: WS
  misc_feature: MA Experiment 20000445 PARAMETER Experiment Name: At_100uM_NAA__P Parameter: Timepoint (hr) Value: 6
  misc_feature: MA Experiment 20000445 PARAMETER Experiment Name: At_100uM_NAA__P Parameter: Tissue Value: Aerial
  misc_feature: MA Experiment 20000445 PARAMETER Experiment Name: At_100uM_NAA__P Parameter: Treatment Value: 100uM NAA vs. No Treatment
ataactgaaaaataaaaataagacagaaaacaaagttaaaaataaaataaaaacggaagagagaaaataaataaataaaatcactcaaaggatttccacagtttttctttccatgttgatttagcccattcgtagacttcctccgcgccgccgttagacgccgcctcggaagtatcagcaaccgccgtggtgttcgtcgccttcaaagagatctgaatttgagatgtttaaaaaaatgagtgctactacaagcaagacggatcagaaagcggcattagacattgcatcatggctattcaatgtggttacttccgttggaatcatcctcgttaacaaagctttaatggctacttatggctttagtttcgctactacattaaccggtttgcatttcggaacaacgacattgttgacaactttcttgacatggcttggttatatccaaccttctcagcttccttggcctgatcttttgaaattcgttttgttcgctaacttctctatcgttgggatgaacgtcagtctcatgtggaattctgttggcttctaccagattgcgaagctgagtatgatcccggtttcttgtcttctagaagttatgcttgacaatgtcaggtattcaagagatacaaagcttagcattttgttagttcttgctggtgttgccgtctgtactgtaaccgatgttagtgtcaatctcaacggatttctagctgccgctattgctgtctggagcaccgcgcttcagcaatactatgtacattatctacaacggaaatattcactcggttctttcaatttactggcgcataccgctccagttcaagctgcgtcattgttgttggtcggaccatttctagactactggttgactaaccaaagagtggatgcatacaacttttcatttgtatctctgttcttcttaatactctcgtgcagtatcgcggttgggaccaatctcagccaattcatctgtattggaagattcacggcggtgtctttccaagtacttggtcacatgaagacaattctggttttggttttgggattcactttcttcggtaaggaaggattaaacctacaagtagtgcttggaatgctgattgctatactcggtatgatctggtacggtaatgcatcttctaaaccgggtggtaaagaacgtcgtagcctgtctattcccataaccaagtcacagaaactatctgaaacaaacgaatctgatgaaaaggtgtagaagaaagaagtgaatcgcattgacatagaaacaaaaacaagatactcagatacaaacaggtagagttatcaaatgggatattatttataaaccaaaaaaaagaaagggatttaattattt

SEQ ID NO: 77834 - protein, 337 aa, Arabidopsis thaliana; identical to SEQ ID NO: 22961
  peptide (1)..(337): Ceres Seq. ID no. 12580721
  misc_feature (1)..(337): Homolog of NCBI NO: 18420440 NR Description: putative protein; protein id: At4g39390.1, by cDNA: 35002., supported by cDNA: gi_20259515 [Arabidopsis >gi|20259516|gb|AAM13878.1| unknown protein [Arabidopsis
  misc_feature (5)..(337): Homolog of NCBI NO: 21593003 NR Description: unknown [Arabidopsis thaliana]
  misc_feature (5)..(337): Homolog of NCBI NO: 7486049 NR Description: hypothetical protein F23K16.20 - Arabidopsis >gi|5042155|emb|CAB44674.1| putative protein [Arabidopsis >gi|7270923|emb|CAB80602.1| putative protein [Arabidopsis
  misc_feature (7)..(335): Homolog of NCBI NO: 15234794 NR Description: hypothetical protein; protein id: At4g09810.1
  misc_feature (7)..(335): Homolog of NCBI NO: 18399097 NR Description: expressed protein; protein id: At1g34020.1, by cDNA: 7642. [Arabidopsis thaliana] >gi|25354483|pir||A86464
  misc_feature (7)..(335): Homolog of NCBI NO: 21595054 NR Description: unknown [Arabidopsis thaliana]
  misc_feature (7)..(337): Homolog of NCBI NO: 30313364 NR Description: putative transmembrane protein [Oryza sativa]
  misc_feature (5)..(337): Homolog of NCBI NO: 18394949 NR Description: expressed protein; protein id: At1g21070.1, by cDNA: 108746. [Arabidopsis thaliana] >gi|25354485|pir||G86343
  misc_feature (5)..(337): Homolog of NCBI NO: 21536703 NR Description: unknown [Arabidopsis thaliana]
  misc_feature (11)..(337): Homolog of NCBI NO: 18411172 NR Description: expressed protein; protein id: At1g76670.1, by cDNA: gi_14532697, supported by cDNA: gi_16604379, supported cDNA: gi_18491194 [Arabidopsis thaliana] >gi|25354481|pir||A96795

SEQ ID NO: 77835 - protein, 333 aa, Arabidopsis thaliana; identical to SEQ ID NO: 22962
  peptide (1)..(333): Ceres Seq. ID no. 12580722
  misc_feature (1)..(333): Homolog of NCBI NO: 18420440 NR Description: putative protein; protein id: At4g39390.1, by cDNA: 35002., supported by cDNA: gi_20259515 [Arabidopsis >gi|20259516|gb|AAM13878.1| unknown protein [Arabidopsis
  misc_feature (1)..(333): Homolog of NCBI NO: 21593003 NR Description: unknown [Arabidopsis thaliana]
  misc_feature (1)..(333): Homolog of NCBI NO: 7486049 NR Description: hypothetical protein F23K16.20 - Arabidopsis >gi|5042155|emb|CAB44674.1| putative protein [Arabidopsis >gi|7270923|emb|CAB80602.1| putative protein [Arabidopsis
  misc_feature (3)..(331): Homolog of NCBI NO: 15234794 NR Description: hypothetical protein; protein id: At4g09810.1
  misc_feature (3)..(331): Homolog of NCBI NO: 18399097 NR Description: expressed protein; protein id: At1g34020.1, by cDNA: 7642. [Arabidopsis thaliana] >gi|25354483|pir||A86464
  misc_feature (3)..(331): Homolog of NCBI NO: 21595054 NR Description: unknown [Arabidopsis thaliana]
  misc_feature (3)..(333): Homolog of NCBI NO: 30313364 NR Description: putative transmembrane protein [Oryza sativa]
  misc_feature (1)..(333): Homolog of NCBI NO: 18394949 NR Description: expressed protein; protein id: At1g21070.1, by cDNA: 108746. [Arabidopsis thaliana] >gi|25354485|pir||G86343
  misc_feature (1)..(333): Homolog of NCBI NO: 21536703 NR Description: unknown [Arabidopsis thaliana]
  misc_feature (7)..(333): Homolog of NCBI NO: 18411172 NR Description: expressed protein; protein id: At1g76670.1, by cDNA: gi_14532697, supported by cDNA: gi_16604379, supported cDNA: gi_18491194 [Arabidopsis thaliana] >gi|25354481|pir||A96795

SEQ ID NO: 77836 - protein, 297 aa, Arabidopsis thaliana; identical to SEQ ID NO: 22963
  peptide (1)..(297): Ceres Seq. ID no. 12580723
  misc_feature (1)..(297): Homolog of NCBI NO: 18420440 NR Description: putative protein; protein id: At4g39390.1, by cDNA: 35002., supported by cDNA: gi_20259515 [Arabidopsis >gi|20259516|gb|AAM13878.1| unknown protein [Arabidopsis
  misc_feature (1)..(297): Homolog of NCBI NO: 21593003 NR Description: unknown [Arabidopsis thaliana]
  misc_feature (1)..(297): Homolog of NCBI NO: 7486049 NR Description: hypothetical protein F23K16.20 - Arabidopsis >gi|5042155|emb|CAB44674.1| putative protein [Arabidopsis >gi|7270923|emb|CAB80602.1| putative protein [Arabidopsis
  misc_feature (1)..(295): Homolog of NCBI NO: 15234794 NR Description: hypothetical protein; protein id: At4g09810.1
  misc_feature (1)..(295): Homolog of NCBI NO: 18399097 NR Description: expressed protein; protein id: At1g34020.1, by cDNA: 7642. [Arabidopsis thaliana] >gi|25354483|pir||A86464
  misc_feature (1)..(295): Homolog of NCBI NO: 21595054 NR Description: unknown [Arabidopsis thaliana]
  misc_feature (1)..(297): Homolog of NCBI NO: 30313364 NR Description: putative transmembrane protein [Oryza sativa]
  misc_feature (1)..(297): Homolog of NCBI NO: 18394949 NR Description: expressed protein; protein id: At1g21070.1, by cDNA: 108746. [Arabidopsis thaliana] >gi|25354485|pir||G86343
  misc_feature (1)..(297): Homolog of NCBI NO: 21536703 NR Description: unknown [Arabidopsis thaliana]
  misc_feature (1)..(297): Homolog of NCBI NO: 18411172 NR Description: expressed protein; protein id: At1g76670.1, by cDNA: gi_14532697, supported by cDNA: gi_16604379, supported cDNA: gi_18491194 [Arabidopsis thaliana] >gi|25354481|pir||A96795

SEQ ID NO: 77837 - DNA, 1213 bp, Arabidopsis thaliana
  misc_feature (1)..(1213): Ceres Seq. ID no. 12580732
  misc_feature: MA Experiment ID: 108435 Result: Down-regulated in Transcription
  misc_feature: MA Experiment 108435 PARAMETER Experiment Name: At_stm_Mutants_cDNA_P Parameter: Plant Line Value: wt Landsburg vs stm
  misc_feature: MA Experiment 108435 PARAMETER Experiment Name: At_stm_Mutants_cDNA_P Parameter: Tissue Value: Shoot Apical Meristem Region
  misc_feature: MA Experiment ID: 108461 Result: Up-regulated in Transcription
  misc_feature: MA Experiment 108461 PARAMETER Experiment Name: At_Germinating_Seeds_cDNA_P Parameter: Age (day) Value: 1 vs. 0
  misc_feature: MA Experiment 108461 PARAMETER Experiment Name: At_Germinating_Seeds_cDNA_P Parameter: Tissue Value: Germinating Seeds
  misc_feature: MA Experiment ID: 108464 Result: Up-regulated in Transcription
  misc_feature: MA Experiment 108464 PARAMETER Experiment Name: At_Germinating_Seeds_cDNA_P Parameter: Age (day) Value: 4 vs. 0
  misc_feature: MA Experiment 108464 PARAMETER Experiment Name: At_Germinating_Seeds_cDNA_P Parameter: Tissue Value: Germinating Seeds
  misc_feature: MA Experiment ID: 108474 Result: Up-regulated in Transcription
  misc_feature: MA Experiment 108474 PARAMETER Experiment Name: At_Drought_Flowers_cDNA_P Parameter: Timepoint (hr) Value: null
  misc_feature: MA Experiment 108474 PARAMETER Experiment Name: At_Drought_Flowers_cDNA_P Parameter: Treatment Value: Drought vs. No Drought
  misc_feature: MA Experiment ID: 108605 Result: Down-regulated in Transcription
  misc_feature: MA Experiment 108605 PARAMETER Experiment Name: At_100uM_ABA_cDNA_P Parameter: Timepoint (hr) Value: 6
  misc_feature: MA Experiment 108605 PARAMETER Experiment Name: At_100uM_ABA_cDNA_P Parameter: Tissue Value: Aerial
  misc_feature: MA Experiment 108605 PARAMETER Experiment Name: At_100uM_ABA_cDNA_P Parameter: Treatment Value: 100uM ABA vs. No Treatment
  misc_feature: MA Experiment ID: 20000069 Result: Down-regulated in Transcription
  misc_feature: MA Experiment 20000069 PARAMETER Experiment Name: At_100uM_ABA_Mutants_cDNA_P Parameter: Plant Line Value: CS23
  misc_feature: MA Experiment 20000069 PARAMETER Experiment Name: At_100uM_ABA_Mutants_cDNA_P Parameter: Timepoint (hr) Value: 6
  misc_feature: MA Experiment 20000069 PARAMETER Experiment Name: At_100uM_ABA_Mutants_cDNA_P Parameter: Tissue Value: Aerial
  misc_feature: MA Experiment 20000069 PARAMETER Experiment Name: At_100uM_ABA_Mutants_cDNA_P Parameter: Treatment Value: 100uM ABA vs. No Treatment
  misc_feature: MA Experiment ID: 20000070 Result: Down-regulated in Transcription
  misc_feature: MA Experiment 20000070 PARAMETER Experiment Name: At_100uM_ABA_Mutants_cDNA_P Parameter: Plant Line Value: CS24
  misc_feature: MA Experiment 20000070 PARAMETER Experiment Name: At_100uM_ABA_Mutants_cDNA_P Parameter: Timepoint (hr) Value: 6
  misc_feature: MA Experiment 20000070 PARAMETER Experiment Name: At_100uM_ABA_Mutants_cDNA_P Parameter: Tissue Value: Aerial
  misc_feature: MA Experiment 20000070 PARAMETER Experiment Name: At_100uM_ABA_Mutants_cDNA_P Parameter: Treatment Value: 100uM ABA vs. No Treatment
  misc_feature: MA Experiment ID: 20000072 Result: Down-regulated in Transcription
  misc_feature: MA Experiment 20000072 PARAMETER Experiment Name: At_100uM_ABA_Mutants_cDNA_P Parameter: Plant Line Value: CS8105
  misc_feature: MA Experiment 20000072 PARAMETER Experiment Name: At_100uM_ABA_Mutants_cDNA_P Parameter: Timepoint (hr) Value: 6
  misc_feature: MA Experiment 20000072 PARAMETER Experiment Name: At_100uM_ABA_Mutants_cDNA_P Parameter: Tissue Value: Aerial
  misc_feature: MA Experiment 20000072 PARAMETER Experiment Name: At_100uM_ABA_Mutants_cDNA_P Parameter: Treatment Value: 100uM ABA vs. No Treatment
  misc_feature: MA Experiment ID: 20000087 Result: Down-regulated in Transcription
  misc_feature: MA Experiment 20000087 PARAMETER Experiment Name: At_100uM_ABA_Mutants_cDNA_P Parameter: Plant Line Value: WS
  misc_feature: MA Experiment 20000087 PARAMETER Experiment Name: At_100uM_ABA_Mutants_cDNA_P Parameter: Timepoint (hr) Value: 6
  misc_feature: MA Experiment 20000087 PARAMETER Experiment Name: At_100uM_ABA_Mutants_cDNA_P Parameter: Tissue Value: Aerial
  misc_feature: MA Experiment 20000087 PARAMETER Experiment Name: At_100uM_ABA_Mutants_cDNA_P Parameter: Treatment Value: 100uM ABA vs. No Treatment
  misc_feature: MA Experiment ID: 20000088 Result: Down-regulated in Transcription
  misc_feature: MA Experiment 20000088 PARAMETER Experiment Name: At_100uM_ABA_Mutants_cDNA_P Parameter: Plant Line Value: Landsberg
  misc_feature: MA Experiment 20000088 PARAMETER Experiment Name: At_100uM_ABA_Mutants_cDNA_P Parameter: Timepoint (hr) Value: 6
  misc_feature: MA Experiment 20000088 PARAMETER Experiment Name: At_100uM_ABA_Mutants_cDNA_P Parameter: Tissue Value: Aerial
  misc_feature: MA Experiment 20000088 PARAMETER Experiment Name: At_100uM_ABA_Mutants_cDNA_P Parameter: Treatment Value: 100uM ABA vs. No Treatment
  misc_feature: MA Experiment ID: 20000090 Result: Down-regulated in Transcription
  misc_feature: MA Experiment ID: 20000113 Result: Up-regulated in Transcription
  misc_feature: MA Experiment 20000113 PARAMETER Experiment Name: At_42deg_Heat_cDNA_P Parameter: Temperature (deg C) Value: 42 vs. 22
  misc_feature: MA Experiment 20000113 PARAMETER Experiment Name: At_42deg_Heat_cDNA_P Parameter: Timepoint (hr) Value: 8
  misc_feature: MA Experiment 20000113 PARAMETER Experiment Name: At_42deg_Heat_cDNA_P Parameter: Tissue Value: Aerial
  misc_feature: MA Experiment ID: 20000117 Result: Down-regulated in Transcription
  misc_feature: MA Experiment 20000117 PARAMETER Experiment Name: At_100uM_ABA_Mutants_cDNA_P Parameter: Plant Line Value: Columbia
  misc_feature: MA Experiment 20000117 PARAMETER Experiment Name: At_100uM_ABA_Mutants_cDNA_P Parameter: Timepoint (hr) Value: 6
  misc_feature: MA Experiment 20000117 PARAMETER Experiment Name: At_100uM_ABA_Mutants_cDNA_P Parameter: Tissue Value: Aerial
  misc_feature: MA Experiment 20000117 PARAMETER Experiment Name: At_100uM_ABA_Mutants_cDNA_P Parameter: Treatment Value: 100uM ABA vs. No Treatment
ataaatacacatatctcactctctctgatctccgcttctcttcgccaacaaatgtcgaccgctcctctctccggcttctttctcacttcactttctccttctcaatcttctctccagaaactctctcttcgtacttcttccaccgtcgcttgcctcccacccgcctcttcttcttcctcatcttcctcctcctcgtcttcccgttccgttccaacgcttatccgtaacgagccagtttttgccgctcctgctcctatcattgccccttattggagtgaagagatgggaaccgaagcatacgacgaggctattgaagctctcaagaagcttctcatcgagaaggaagagctaaagacggttgcagcggcaaaggtggagcagatcacagcggctcttcagacaggtacttcatccgacaagaaagctttcgaccccgtcgaaaccattaagcagggcttcatcaaattcaagaaggagaaatacgaaaccaaccctgctttgtacggtgagctcgcaaagggtcaaagtcctaagtacatggtgtttgcttgttcagactcacgtgtgtgtccatcacacgttctggactttcagccaggagatgccttcgtggtccgtaacatagccaacatggttcctcctttcgacaaggtcaaatacggtggcgttggagcagccattgaatacgcggtcttacaccttaaggtggagaacattgtggtgataggacacagtgcatgtggtgggatcaaagggcttatgtctttccccttagatggaaacaactccactgacttcatagaggactgggtcaaaatctgtttaccagccaagtcaaaggttatatcagaacttggagattcagcctttgaagatcaatgtggccgatgtgaaagggaggcggtgaatgtttcactagcaaacctattgacatatccatttgtgagagaaggacttgtgaagggaacacttgctttgaagggaggctactatgacttcgtcaagggtgcttttgagctttggggacttgaatttggcctctccgaaactagctctgttaaagatgtggctaccatactacattggaagctgtaggaaactctttgaagccttacccgatttcacattgtcaattcaataacaccaagttgttgtttacatgcagatcttgatgaaactggtttttgattttacagaattaaaatcttggggg

SEQ ID NO: 77838 - protein, 364 aa, Arabidopsis thaliana
  peptide (1)..(364): Ceres Seq. ID no. 12580733
  misc_feature (18)..(364): Homolog of NCBI NO: 30678350 NR Description: carbonic anhydrase, chloroplast precursor thaliana] >gi|16226255|gb|AAL16116.1|AF428284_1 AT3g01500/F4P13_5 thaliana] >gi|16226669|gb|AAL16228.1|AF428459_1 AT3g01500/F4P13_5
  misc_feature (18)..(353): Homolog of NCBI NO: 30678353 NR Description: carbonic anhydrase, chloroplast precursor thaliana] >gi|115470|sp|P27140|CAHC_ARATH Carbonic anhydrase, precursor (Carbonate dehydratase) >gi|320554|pir||S28412
  misc_feature (95)..(364): Homolog of NCBI NO: 30678347 NR Description: carbonic anhydrase, chloroplast precursor thaliana] >gi|20259533|gb|AAM13886.1| putative carbonic
  misc_feature (18)..(353): Homolog of NCBI NO: 7436820 NR Description: carbonate dehydratase (EC 4.2.1.1) 1b - Populus x Populus tremuloides >gi|1354517|gb|AAB65822.1| carbonic
  misc_feature (18)..(353): Homolog of NCBI NO: 7436819 NR Description: carbonate dehydratase (EC 4.2.1.1) 1a - Populus x Populus tremuloides >gi|1354515|gb|AAC49785.1| carbonic
  misc_feature (95)..(353): Homolog of NCBI NO: 21903379 NR Description: Carbonic anhydrase 2 (Carbonate dehydratase 2) AT5g14740 [Arabidopsis thaliana]
  misc_feature (95)..(353): Homolog of NCBI NO: 30685030 NR Description: CARBONIC ANHYDRASE 2 [Arabidopsis thaliana]
  misc_feature (95)..(353): Homolog of NCBI NO: 438449 NR Description: carbonic anhydrase
  misc_feature (18)..(353): Homolog of NCBI NO: 1168738 NR Description: CARBONIC ANHYDRASE 1 (CARBONATE DEHYDRATASE 1)
  misc_feature (18)..(353): Homolog of NCBI NO: 1168746 NR Description: CARBONIC ANHYDRASE (CARBONATE DEHYDRATASE)
INTHISLSLISASLRQQMSTAPLSGFFLTSLSPSQSSLQKLSLRTSSTVACLPPASSSSSSSSSSSSRSVPTLIRNEPVFAAPAPIIAPYWSEEMGTEAYDEAIEALKKLLIEKEELKTVAAAKVEQITAALQTGTSSDKKAFDPVETIKQGFIKFKKEKYETNPALYGELAKGQSPKYMVFACSDSRVCPSHVLDFQPGDAFVVRNIANMVPPFDKVKYGGVGAAIEYAVLHLKVENIVVIGHSACGGIKGLMSFPLDGNNSTDFIEDWVKICLPAKSKVISELGDSAFEDQCGRCEREAVNVSLANLLTYPFVREGLVKGTLALKGGYYDFVKGAFELWGLEFGLSETSSVKDVATILHWKL

SEQ ID NO: 77839 - protein, 347 aa, Arabidopsis thaliana
  peptide (1)..(347): Ceres Seq. ID no. 12580734
  misc_feature (1)..(347): Homolog of NCBI NO: 30678350 NR Description: carbonic anhydrase, chloroplast precursor thaliana] >gi|16226255|gb|AAL16116.1|AF428284_1 AT3g01500/F4P13_5 thaliana] >gi|16226669|gb|AAL16228.1|AF428459_1 AT3g01500/F4P13_5
  misc_feature (1)..(336): Homolog of NCBI NO: 30678353 NR Description: carbonic anhydrase, chloroplast precursor thaliana] >gi|115470|sp|P27140|CAHC_ARATH Carbonic anhydrase, precursor (Carbonate dehydratase) >gi|320554|pir||S28412
  misc_feature (78)..(347): Homolog of NCBI NO: 30678347 NR Description: carbonic anhydrase, chloroplast precursor thaliana] >gi|20259533|gb|AAM13886.1| putative carbonic
  misc_feature (1)..(336): Homolog of NCBI NO: 7436820 NR Description: carbonate dehydratase (EC 4.2.1.1) 1b - Populus x Populus tremuloides >gi|1354517|gb|AAB65822.1| carbonic
  misc_feature (1)..(336): Homolog of NCBI NO: 7436819 NR Description: carbonate dehydratase (EC 4.2.1.1) 1a - Populus x Populus tremuloides >gi|1354515|gb|AAC49785.1| carbonic
  misc_feature (78)..(336): Homolog of NCBI NO: 21903379 NR Description: Carbonic anhydrase 2 (Carbonate dehydratase 2) AT5g14740 [Arabidopsis thaliana]
  misc_feature (78)..(336): Homolog of NCBI NO: 30685030 NR Description: CARBONIC ANHYDRASE 2 [Arabidopsis thaliana]
  misc_feature (78)..(336): Homolog of NCBI NO: 438449 NR Description: carbonic anhydrase
  misc_feature (1)..(336): Homolog of NCBI NO: 1168738 NR Description: CARBONIC ANHYDRASE 1 (CARBONATE DEHYDRATASE 1)
  misc_feature (1)..(336): Homolog of NCBI NO: 1168746 NR Description: CARBONIC ANHYDRASE (CARBONATE DEHYDRATASE)
MSTAPLSGFFLTSLSPSQSSLQKLSLRTSSTVACLPPASSSSSSSSSSSSRSVPTLIRNEPVFAAPAPIIAPYWSEEMGTEAYDEAIEALKKLLIEKEELKTVAAAKVEQITAALQTGTSSDKKAFDPVETIKQGFIKFKKEKYETNPALYGELAKGQSPKYMVFACSDSRVCPSHVLDFQPGDAFVVRNIANMVPPFDKVKYGGVGAAIEYAVLHLKVENIVVIGHSACGGIKGLMSFPLDGNNSTDFIEDWVKICLPAKSKVISELGDSAFEDQCGRCEREAVNVSLANLLTYPFVREGLVKGTLALKGGYYDFVKGAFELWGLEFGLSETSSVKDVATILHWKL

SEQ ID NO: 77840 - protein, 270 aa, Arabidopsis thaliana
  peptide (1)..(270): Ceres Seq. ID no. 12580735
  misc_feature (1)..(270): Homolog of NCBI NO: 30678350 NR Description: carbonic anhydrase, chloroplast precursor thaliana] >gi|16226255|gb|AAL16116.1|AF428284_1 AT3g01500/F4P13_5 thaliana] >gi|16226669|gb|AAL16228.1|AF428459_1 AT3g01500/F4P13_5
  misc_feature (1)..(259): Homolog of NCBI NO: 30678353 NR Description: carbonic anhydrase, chloroplast precursor thaliana] >gi|115470|sp|P27140|CAHC_ARATH Carbonic anhydrase, precursor (Carbonate dehydratase) >gi|320554|pir||S28412
  misc_feature (1)..(270): Homolog of NCBI NO: 30678347 NR Description: carbonic anhydrase, chloroplast precursor thaliana] >gi|20259533|gb|AAM13886.1| putative carbonic
  misc_feature (1)..(259): Homolog of NCBI NO: 7436820 NR Description: carbonate dehydratase (EC 4.2.1.1) 1b - Populus x Populus tremuloides >gi|1354517|gb|AAB65822.1| carbonic
  misc_feature (1)..(259): Homolog of NCBI NO: 7436819 NR Description: carbonate dehydratase (EC 4.2.1.1) 1a - Populus x Populus tremuloides >gi|1354515|gb|AAC49785.1| carbonic
  misc_feature (1)..(259): Homolog of NCBI NO: 21903379 NR Description: Carbonic anhydrase 2 (Carbonate dehydratase 2) AT5g14740 [Arabidopsis thaliana]
  misc_feature (1)..(259): Homolog of NCBI NO: 30685030 NR Description: CARBONIC ANHYDRASE 2 [Arabidopsis thaliana]
  misc_feature (1)..(259): Homolog of NCBI NO: 438449 NR Description: carbonic anhydrase
  misc_feature (1)..(259): Homolog of NCBI NO: 1168738 NR Description: CARBONIC ANHYDRASE 1 (CARBONATE DEHYDRATASE 1)
  misc_feature (1)..(259): Homolog of NCBI NO: 1168746 NR Description: CARBONIC ANHYDRASE (CARBONATE DEHYDRATASE)
MGTEAYDEAIEALKKLLIEKEELKTVAAAKVEQITAALQTGTSSDKKAFDPVETIKQGFIKFKKEKYETNPALYGELAKGQSPKYMVFACSDSRVCPSHVLDFQPGDAFVVRNIANMVPPFDKVKYGGVGAAIEYAVLHLKVENIVVIGHSACGGIKGLMSFPLDGNNSTDFIEDWVKICLPAKSKVISELGDSAFEDQCGRCEREAVNVSLANLLTYPFVREGLVKGTLALKGGYYDFVKGAFELWGLEFGLSETSSVKDVATILHWKL

SEQ ID NO: 77841 - DNA, 2278 bp, Arabidopsis thaliana
  misc_feature (1)..(2278): Ceres Seq. ID no. 12580795
  misc_feature: MA Experiment ID: 20000185 Result: Up-regulated in Transcription
  misc_feature: MA Experiment 20000185 PARAMETER Experiment Name: At_Roots__P Parameter: Age (day) Value: 7 vs. 21
  misc_feature: MA Experiment 20000185 PARAMETER Experiment Name: At_Roots__P Parameter: Organism Value: A. thaliana
  misc_feature: MA Experiment 20000185 PARAMETER Experiment Name: At_Roots__P Parameter: Tissue Value: Roots vs. Whole Plant
  misc_feature: MA Experiment ID: 20000234 Result: Up-regulated in Transcription
  misc_feature: MA Experiment 20000234 PARAMETER Experiment Name: At_Siliques_P Parameter: Age (day) Value: 21
  misc_feature: MA Experiment 20000234 PARAMETER Experiment Name: At_Siliques_P Parameter: Organism Value: A. thaliana
  misc_feature: MA Experiment 20000234 PARAMETER Experiment Name: At_Siliques_P Parameter: Plant Line Value: WS
  misc_feature: MA Experiment 20000234 PARAMETER Experiment Name: At_Siliques_P Parameter: Tissue Value: Less Than 5mm Siliques vs. Whole Plant
  misc_feature: MA Experiment ID: 20000264 Result: Up-regulated in Transcription
  misc_feature: MA Experiment 20000264 PARAMETER Experiment Name: At_Open_Flower_P Parameter: Age (day) Value: 21
  misc_feature: MA Experiment 20000264 PARAMETER Experiment Name: At_Open_Flower_P Parameter: Plant Line Value: WS
  misc_feature: MA Experiment 20000264 PARAMETER Experiment Name: At_Open_Flower_P Parameter: Tissue Value: Open Flower vs. Whole Plant
  misc_feature: MA Experiment ID: 20000265 Result: Up-regulated in Transcription
  misc_feature: MA Experiment 20000265 PARAMETER Experiment Name: At_Open_Flower_P Parameter: Age (day) Value: 21
  misc_feature: MA Experiment 20000265 PARAMETER Experiment Name: At_Open_Flower_P Parameter: Plant Line Value: WS
  misc_feature: MA Experiment 20000265 PARAMETER Experiment Name: At_Open_Flower_P Parameter: Tissue Value: Closed Flower vs. Whole Plant
  misc_feature: MA Experiment ID: 20000286 Result: Up-regulated in Transcription
  misc_feature: MA Experiment 20000286 PARAMETER Experiment Name: At_Open_Flower_P Parameter: Age (day) Value: 21
  misc_feature: MA Experiment 20000286 PARAMETER Experiment Name: At_Open_Flower_P Parameter: Plant Line Value: WS
  misc_feature: MA Experiment 20000286 PARAMETER Experiment Name: At_Open_Flower_P Parameter: Tissue Value: Half Open vs. Whole Plant
  misc_feature: MA Experiment ID: 20000439 Result: Up-regulated in Transcription
  misc_feature: MA Experiment 20000439 PARAMETER Experiment Name: At_Roots__P Parameter: Age (day) Value: 14 vs. 21
  misc_feature: MA Experiment 20000439 PARAMETER Experiment Name: At_Roots__P Parameter: Organism Value: A. thaliana
  misc_feature: MA Experiment 20000439 PARAMETER Experiment Name: At_Roots__P Parameter: Tissue Value: Roots vs. Whole Plant
  misc_feature: MA Experiment ID: 20000794 Result: Up-regulated in Transcription
  misc_feature: MA Experiment 20000794 PARAMETER Experiment Name: At_Petals_P Parameter: Age (day) Value: 23-25 days
  misc_feature: MA Experiment 20000794 PARAMETER Experiment Name: At_Petals_P Parameter: Plant Line Value: WS
  misc_feature: MA Experiment 20000794 PARAMETER Experiment Name: At_Petals_P Parameter: Tissue Value: Petals vs. Whole plant
aggttcctgaaatgttctcgtcagggcgacattagggtttcttcattcccgtccttcagattcgtatttgaaacaggaaggagagaaaaatgggtatacaagggcttttgccgttgttgaaatcgataatggtaccgattcatatcaaggagctcgagggttgtatcgtcgccgtcgatacatattcatggctacacaaaggggctttatcttgtagccgagagctctgcaagggattacccaccaagaggcatattcaatactgtatgcatagagtgaatttacttcgccatcatggagtgaagcctatcatggtctttgatggaggtccgttaccgatgaaactagaacaagagaataagcgtgctaggtccagaaaggaaaatcttgctcgtgcattggagcatgaagcaaatggaaattcctcagctgcttatgagtgctactcaaaggccgtagatatttcaccttctattgcacatgagttgatacaggttctgaggcaggagaatgttgattacgttgttgctccttacgaagctgatgcgcagatggcattcttagctattactaagcaagttgatgcgattatcactgaggattctgatctcataccttttggctgcctaagagtaattaagcacttaaagtacagcacagtttcagttcctcctctttatgaagagtcattcaagagagctttactgactttcaagcatcaacgtgtctatgacccaaatgctgaagatatcatacacttgtgtgacatttctgacaaccttggtgaagattcagattttgtaggcccatcgatgccacaagatattgctaagggtatagctctaggccagcttgatcccttcacacagttgccattccaggctgagagtgttactcctaaattggctgttgatgatatatcccgtcccaaaagtttcaaacctgaaactgtaaagaaaaagcttgatttgccagtccaaaaaaaccttctcaccaagtacttctgctttgcgtctgttgaggcaaaaagaaaattcaaggctcctaggatatcaccaatgtctctgaccccaactgatgagtctccaagcattcctgatgacaacacaccagatttagatgctctttcaagccagacaacaaatgaatccccggtttatagcttgggtgagaatccatgtgttagcgaagttgcagagaaaagagattcacccgatgacgatgcagtggaaaggaatcacaaggaccttcatcataaatactgcgaacgggaagtggataggccgaagtcagatagtttgaaggttatagtaagaagcaagtattttaagcagaaacaggaggacaaaagtctgaaacaatcgatcccatgtcttaatgattgctctgtgattggtcagagaaaggctgttaaaactgtgattaacatgtcaagcgcgtctaaaagagaagagagtcacagagctatagcaacaagtccatgtttacaccatgaccgaatctacaacgatcatgaagatgctaaagaagcgagtttctctgccatgaacgaggtggctgagagaacaataaacacccacaagattaaccatcagatcaatgaagaagaacagaacccatccgttgaaattccttctgcctttagtactcccgagaatgttatacctctctcttccattgctattgatagttgccatggagttgcaacagggaagaggaagcttgactcagatgaaaaccttcacaaggaaaatttgaaatccaagcacatgcgcatggatgaaactgatactgctcttaatgcagaaacaccattagaaaccgatgatgttgagaagtttggatcgaacatttcacatatagggcattactcagaaatagcagagaaatcagtggaaagatttgtctcagctatatcgtctttcaaatattctgggactggctctcgtgctagcggtctccgtgcccctctcaaagatatccgcaacacttgtccgtccaaagggttatctcttaaaccagacatcagcaagtttggctatgcgtcaagcaaccgacacatggtgacaaagtcaaggagaatgtgagctcagatttgtaagttaaccatctctttagagccacatgtgagagctttagctttagaattaacttcttggtcgcatgatgatatttttggtgttgtgtctgtattagctttctacttactgtgcatagcattcttgttcaaagacacttcacacaacagttggattcataaatgaaacaactttcaact

SEQ ID NO: 77842 - protein, 665 aa, Arabidopsis thaliana
  peptide (1)..(665): Ceres Seq. ID no. 12580796
  misc_feature (138)..(240): Pfam Name: XPG I-region Pfam Description: XPG I-region
  misc_feature (1)..(183): Homolog of NCBI NO: 15220506 NR Description: exonuclease, putative; protein id: At1g29630.1
  misc_feature (181)..(240): Homolog of NCBI NO: 15220506 NR Description: exonuclease, putative; protein id: At1g29630.1
  misc_feature (1)..(650): Homolog of NCBI NO: 34910036 NR Description: putative exonuclease [Oryza sativa (japonica group)] >gi|22202704|dbj|BAC07362.1| putative exonuclease [Oryza
  misc_feature (1)..(183): Homolog of NCBI NO: 18394573 NR Description: expressed protein; protein id: At1g18090.1, by cDNA: gi_15215781 [Arabidopsis thaliana] At1g18090/T10F20_6 [Arabidopsis thaliana]
  misc_feature (193)..(286): Homolog of NCBI NO: 18394573 NR Description: expressed protein; protein id: At1g18090.1, by cDNA: gi_15215781 [Arabidopsis thaliana] At1g18090/T10F20_6 [Arabidopsis thaliana]
  misc_feature (1)..(183): Homolog of NCBI NO: 30685678 NR Description: expressed protein [Arabidopsis thaliana]
  misc_feature (193)..(286): Homolog of NCBI NO: 30685678 NR Description: expressed protein [Arabidopsis thaliana]
  misc_feature (1)..(183): Homolog of NCBI NO: 9719724 NR Description: Contains similarity to exonuclease ExoI from
  misc_feature (193)..(286): Homolog of NCBI NO: 9719724 NR Description: Contains similarity to exonuclease ExoI from
  misc_feature (1)..(183): Homolog of NCBI NO: 4884906 NR Description: exonuclease ExoI [Xenopus laevis]
MGIQGLLPLLKSIMVPIHIKELEGCIVAVDTYSWLHKGALSCSRELCKGLPTKRHIQYCMHRVNLLRHHGVKPIMVFDGGPLPMKLEQENKRARSRKENLARALEHEANGNSSAAYECYSKAVDISPSIAHELIQVLRQENVDYVVAPYEADAQMAFLAITKQVDAIITEDSDLIPFGCLRVIKHLKYSTVSVPPLYEESFKRALLTFKHQRVYDPNAEDIIHLCDISDNLGEDSDFVGPSMPQDIAKGIALGQLDPFTQLPFQAESVTPKLAVDDISRPKSFKPETVKKKLDLPVQKNLLTKYFCFASVEAKRKFKAPRISPMSLTPTDESPSIPDDNTPDLDALSSQTTNESPVYSLGENPCVSEVAEKRDSPDDDAVERNHKDLHHKYCEREVDRPKSDSLKVIVRSKYFKQKQEDKSLKQSIPCLNDCSVIGQRKAVKTVINMSSASKREESHRAIATSPCLHHDRIYNDHEDAKEASFSAMNEVAERTINTHKINHQINEEEQNPSVEIPSAFSTPENVIPLSSIAIDSCHGVATGKRKLDSDENLHKENLKSKHMRMDETDTALNAETPLETDDVEKFGSNISHIGHYSEIAEKSVERFVSAISSFKYSGTGSRASGLRAPLKDIRNTCPSKGLSLKPDISKFGYASSNRHMVTKSRRM

SEQ ID NO: 77843 - protein, 652 aa, Arabidopsis thaliana
  peptide (1)..(652): Ceres Seq. ID no. 12580797
  misc_feature (125)..(227): Pfam Name: XPG I-region Pfam Description: XPG I-region
  misc_feature (1)..(170): Homolog of NCBI NO: 15220506 NR Description: exonuclease, putative; protein id: At1g29630.1
  misc_feature (168)..(227): Homolog of NCBI NO: 15220506 NR Description: exonuclease, putative; protein id: At1g29630.1
  misc_feature (1)..(637): Homolog of NCBI NO: 34910036 NR Description: putative exonuclease [Oryza sativa (japonica group)] >gi|22202704|dbj|BAC07362.1| putative exonuclease [Oryza
  misc_feature (1)..(170): Homolog of NCBI NO: 18394573 NR Description: expressed protein; protein id: At1g18090.1, by cDNA: gi_15215781 [Arabidopsis thaliana] At1g18090/T10F20_6 [Arabidopsis thaliana]
  misc_feature (180)..(273): Homolog of NCBI NO: 18394573 NR Description: expressed protein; protein id: At1g18090.1, by cDNA: gi_15215781 [Arabidopsis thaliana] At1g18090/T10F20_6 [Arabidopsis thaliana]
  misc_feature (1)..(170): Homolog of NCBI NO: 30685678 NR Description: expressed protein [Arabidopsis thaliana]
  misc_feature (180)..(273): Homolog of NCBI NO: 30685678 NR Description: expressed protein [Arabidopsis thaliana]
  misc_feature (1)..(170): Homolog of NCBI NO: 9719724 NR Description: Contains similarity to exonuclease ExoI from
  misc_feature (180)..(273): Homolog of NCBI NO: 9719724 NR Description: Contains similarity to exonuclease ExoI from
  misc_feature (1)..(170): Homolog of NCBI NO: 4884906 NR Description: exonuclease ExoI [Xenopus laevis]
MVPIHIKELEGCIVAVDTYSWLHKGALSCSRELCKGLPTKRHIQYCMHRVNLLRHHGVKPIMVFDGGPLPMKLEQENKRARSRKENLARALEHEANGNSSAAYECYSKAVDISPSIAHELIQVLRQENVDYVVAPYEADAQMAFLAITKQVDAIITEDSDLIPFGCLRVIKHLKYSTVSVPPLYEESFKRALLTFKHQRVYDPNAEDIIHLCDISDNLGEDSDFVGPSMPQDIAKGIALGQLDPFTQLPFQAESVTPKLAVDDISRPKSFKPETVKKKLDLPVQKNLLTKYFCFASVEAKRKFKAPRISPMSLTPTDESPSIPDDNTPDLDALSSQTTNESPVYSLGENPCVSEVAEKRDSPDDDAVERNHKDLHHKYCEREVDRPKSDSLKVIVRSKYFKQKQEDKSLKQSIPCLNDCSVIGQRKAVKTVINMSSASKREESHRAIATSPCLHHDRIYNDHEDAKEASFSAMNEVAERTINTHKINHQINEEEQNPSVEIPSAFSTPENVIPLSSIAIDSCHGVATGKRKLDSDENLHKENLKSKHMRMDETDTALNAETPLETDDVEKFGSNISHIGHYSEIAEKSVERFVSAISSFKYSGTGSRASGLRAPLKDIRNTCPSKGLSLKPDISKFGYASSNRHMVTKSRRM

SEQ ID NO: 77844 - protein, 606 aa, Arabidopsis thaliana
  peptide (1)..(606): Ceres Seq. ID no. 12580798
  misc_feature (79)..(181): Pfam Name: XPG I-region Pfam Description: XPG I-region
  misc_feature (1)..(124): Homolog of NCBI NO: 15220506 NR Description: exonuclease, putative; protein id: At1g29630.1
  misc_feature (122)..(181): Homolog of NCBI NO: 15220506 NR Description: exonuclease, putative; protein id: At1g29630.1
  misc_feature (1)..(591): Homolog of NCBI NO: 34910036 NR Description: putative exonuclease [Oryza sativa (japonica group)] >gi|22202704|dbj|BAC07362.1| putative exonuclease [Oryza
  misc_feature (1)..(124): Homolog of NCBI NO: 18394573 NR Description: expressed protein; protein id: At1g18090.1, by cDNA: gi_15215781 [Arabidopsis thaliana] At1g18090/T10F20_6 [Arabidopsis thaliana]
  misc_feature (134)..(227): Homolog of NCBI NO: 18394573 NR Description: expressed protein; protein id: At1g18090.1, by cDNA: gi_15215781 [Arabidopsis thaliana] At1g18090/T10F20_6 [Arabidopsis thaliana]
  misc_feature (1)..(124): Homolog of NCBI NO: 30685678 NR Description: expressed protein [Arabidopsis thaliana]
  misc_feature (134)..(227): Homolog of NCBI NO: 30685678 NR Description: expressed protein [Arabidopsis thaliana]
  misc_feature (1)..(124): Homolog of NCBI NO: 9719724 NR Description: Contains similarity to exonuclease ExoI from
  misc_feature (134)..(227): Homolog of NCBI NO: 9719724 NR Description: Contains similarity to exonuclease ExoI from
  misc_feature (1)..(124): Homolog of NCBI NO: 4884906 NR Description: exonuclease ExoI [Xenopus laevis]
MHRVNLLRHHGVKPIMVFDGGPLPMKLEQENKRARSRKENLARALEHEANGNSSAAYECYSKAVDISPSIAHELIQVLRQENVDYVVAPYEADAQMAFLAITKQVDAIITEDSDLIPFGCLRVIKHLKYSTVSVPPLYEESFKRALLTFKHQRVYDPNAEDIIHLCDISDNLGEDSDFVGPSMPQDIAKGIALGQLDPFTQLPFQAESVTPKLAVDDISRPKSFKPETVKKKLDLPVQKNLLTKYFCFASVEAKRKFKAPRISPMSLTPTDESPSIPDDNTPDLDALSSQTTNESPVYSLGENPCVSEVAEKRDSPDDDAVERNHKDLHHKYCEREVDRPKSDSLKVIVRSKYFKQKQEDKSLKQSIPCLNDCSVIGQRKAVKTVINMSSASKREESHRAIATSPCLHHDRIYNDHEDAKEASFSAMNEVAERTINTHKINHQINEEEQNPSVEIPSAFSTPENVIPLSSIAIDSCHGVATGKRKLDSDENLHKENLKSKHMRMDETDTALNAETPLETDDVEKFGSNISHIGHYSEIAEKSVERFVSAISSFKYSGTGSRASGLRAPLKDIRNTCPSKGLSLKPDISKFGYASSNRHMVTKSRRM

SEQ ID NO: 77845 - DNA, 1871 bp, Arabidopsis thaliana
  misc_feature (1)..(1871): Ceres Seq. ID no. 12580799
  misc_feature: MA Experiment ID: 108434 Result: Down-regulated in Transcription
  misc_feature: MA Experiment 108434 PARAMETER Experiment Name: At_Root_Tips_cDNA_P Parameter: Tissue Value: Root Tips
  misc_feature: MA Experiment ID: 108577 Result: Down-regulated in Transcription
  misc_feature: MA Experiment 108577 PARAMETER Experiment Name: At_42deg_Heat_cDNA_P Parameter: Temperature (deg C) Value: 42 vs. 22
  misc_feature: MA Experiment 108577 PARAMETER Experiment Name: At_42deg_Heat_cDNA_P Parameter: Timepoint (hr) Value: 6
  misc_feature: MA Experiment 108577 PARAMETER Experiment Name: At_42deg_Heat_cDNA_P Parameter: Tissue Value: Aerial
  misc_feature: MA Experiment ID: 108585 Result: Up-regulated in Transcription
  misc_feature: MA Experiment 108585 PARAMETER Experiment Name: At_5mM_NaNP_cDNA_P Parameter: Timepoint (hr) Value: 6
  misc_feature: MA Experiment 108585 PARAMETER Experiment Name: At_5mM_NaNP_cDNA_P Parameter: Tissue Value: Aerial
  misc_feature: MA Experiment 108585 PARAMETER Experiment Name: At_5mM_NaNP_cDNA_P Parameter: Treatment Value: null
  misc_feature: MA Experiment ID: 108667 Result: Up-regulated in Transcription
  misc_feature: MA Experiment 108667 PARAMETER Experiment Name: At_2mM_SA_cDNA_P Parameter: Plant Line Value: WS
  misc_feature: MA Experiment 108667 PARAMETER Experiment Name: At_2mM_SA_cDNA_P Parameter: Timepoint (hr) Value: 1
  misc_feature: MA Experiment 108667 PARAMETER Experiment Name: At_2mM_SA_cDNA_P Parameter: Treatment Value: 2mM SA vs. No Treatment
  misc_feature: MA Experiment ID: 20000111 Result: Down-regulated in Transcription
  misc_feature: MA Experiment 20000111 PARAMETER Experiment Name: At_42deg_Heat_cDNA_P Parameter: Temperature (deg C) Value: 42 vs. 22
  misc_feature: MA Experiment 20000111 PARAMETER Experiment Name: At_42deg_Heat_cDNA_P Parameter: Timepoint (hr) Value: 6
  misc_feature: MA Experiment 20000111 PARAMETER Experiment Name: At_42deg_Heat_cDNA_P Parameter: Tissue Value: Aerial
  misc_feature: MA Experiment ID: 20000113 Result: Down-regulated in Transcription
  misc_feature: MA Experiment 20000113 PARAMETER Experiment Name: At_42deg_Heat_cDNA_P Parameter: Temperature (deg C) Value: 42 vs. 22
  misc_feature: MA Experiment 20000113 PARAMETER Experiment Name: At_42deg_Heat_cDNA_P Parameter: Timepoint (hr) Value: 8
  misc_feature: MA Experiment 20000113 PARAMETER Experiment Name: At_42deg_Heat_cDNA_P Parameter: Tissue Value: Aerial
gattcatcagagccatgggtgtctgtttctccgccattagagtcactggtgctagcagcagtagacgaagcagtcagaccaaatccaaggctgctcctactcccatcgataccaaggcctctaccaaacgccgaaccggctccatcccctgcggcaagcgtaccgattttggctactccaaagacttccacgatcactacaccatcggcaagttgctcggccatggtcaattcggctacacctacgtcgccatccacagacccaatggagatcgcgtcgccgtcaaaagactcgataagtctaagatggttcttcctattgctgttgaggatgtcaagcgtgaggttcagattcttattgctctctctggccacgagaatgttgttcagtttcacaatgcctttgaggatgacgattacgtctatattgttatggagttgtgcgaaggaggcgaattgctggataggatattatccaagaaaggtaatcggtactccgagaaagatgcagccgttgtcgttaggcagatgctcaaagttgcaggagaatgtcatctacacggtcttgtacatagagatatgaaaccagagaactttttgttcaaatcagctcaactagattcgcctctaaaggctacggattttggtttatcggattttatcaaaccagggaaaaggttccatgacattgttggtagcgcctattatgtggctcctgaggtattaaagcgcagatcagggcctgaatcagatgtatggagcattggtgtgattacgtatatattactttgtgggaggcggcctttttgggatagaactgaagatggtatatttaaagaggttttaagaaataaacctgacttcagccgtaaaccttgggcaactataagtgacagcgccaaagattttgtgaaaaagttacttgtaaaagacccacgagcacggctaactgctgcacaagcactatcacatgcgtgggttagagaaggcgggaatgctactgatatccctgtcgacatttcagttctgaacaacttaagacaatttgtgagatacagccgtctaaagcaatttgctttaagggcgcttgctagcacacttgacgaggcagagatctctgacctcagagatcaatttgatgcgattgatgtggataaaaatggcgtcattagtcttgaagagatgagacaggcacttgccaaagatcttccttggaaactgaaagactcacgagttgctgagatccttgaagcgattgatagcaacactgatgggttagtggacttcacagagtttgtagcagcagctctacatgttcatcaactagaagaacatgattcagagaaatggcagctaaggtcaagagcagcttttgagaaattcgacctagacaaagacgggtacataacgcctgaggaacttcgaatgcacacggggttaagaggatcaatagatccactgctggatgaagcagacatagacagagatgggaaaataagcctgcatgagttcaggagacttctaagaacagcgagcataagttcacagagagcaccaagccctgcaggtcacaggaatcttcgatagtatatactagaagaggatgataagtaagtaatactttggttgtttaaggcgcagcaaaacaaagagagaaagtggagtgagaatcccattgatgaaatatgagagagctcttaaggtgcactagatgcaagaggacacgtggcattccctgaatgggggacaaatccaattttaaatttttaatggttgggcaccaaaagaaacatagagagccagctgtaatttcgattctatcatatattttgtctgtttccatttttcttataatattcgttttgagagcac

SEQ ID NO: 77846 - protein, 527 aa, Arabidopsis thaliana
  peptide (1)..(527): Ceres Seq. ID no. 12580800
  misc_feature (66)..(326): Pfam Name: Protein kinase domain Pfam Description: Protein kinase domain
  misc_feature (5)..(527): Homolog of NCBI NO: 15239300 NR Description: calcium-dependent protein kinase; protein id: supported by cDNA: 18901. [Arabidopsis thaliana]
  misc_feature (5)..(527): Homolog of NCBI NO: 21553971 NR Description: calcium-dependent protein kinase [Arabidopsis
  misc_feature (42)..(520): Homolog of NCBI NO: 16904224 NR Description: calcium/calmodulin-dependent protein kinase CaMK2
  misc_feature (21)..(523): Homolog of NCBI NO: 15227920 NR Description: putative Ca2+-dependent ser/thr protein kinase;
  misc_feature (5)..(525): Homolog of NCBI NO: 12592069 NR Description: calcium-dependent protein kinase [Oryza sativa]
  misc_feature (36)..(514): Homolog of NCBI NO: 3779218 NR Description: protein kinase CPK1 [Solanum tuberosum]
  misc_feature (5)..(524): Homolog of NCBI NO: 15234291 NR Description: Calcium-dependent serine/threonine protein
  misc_feature (44)..(525): Homolog of NCBI NO: 34902680 NR Description: similar to calcium-dependent protein kinase
  misc_feature (5)..(514): Homolog of NCBI NO: 6689920 NR Description: calcium-dependent protein kinase [Oryza sativa]
  misc_feature (56)..(514): Homolog of NCBI NO: 33146627 NR Description: putative CDPK-related protein kinase [Oryza
FIRAMGVCFSAIRVTGASSSRRSSQTKSKAAPTPIDTKASTKRRTGSIPCGKRTDFGYSKDFHDHYTIGKLLGHGQFGYTYVAIHRPNGDRVAVKRLDKSKMVLPIAVEDVKREVQILIALSGHENVVQFHNAFEDDDYVYIVMELCEGGELLDRILSKKGNRYSEKDAAVVVRQMLKVAGECHLHGLVHRDMKPENFLFKSAQLDSPLKATDFGLSDFIKPGKRFHDIVGSAYYVAPEVLKRRSGPESDVWSIGVITYILLCGRRPFWDRTEDGIFKEVLRNKPDFSRKPWATISDSAKDFVKKLLVKDPRARLTAAQALSHAWVREGGNATDIPVDISVLNNLRQFVRYSRLKQFALRALASTLDEAEISDLRDQFDAIDVDKNGVISLEEMRQALAKDLPWKLKDSRVAEILEAIDSNTDGLVDFTEFVAAALHVHQLEEHDSEKWQLRSRAAFEKFDLDKDGYITPEELRMHTGLRGSIDPLLDEADIDRDGKISLHEFRRLLRTASISSQRAPSPAGHRNLR

SEQ ID NO: 77847 - protein, 523 aa, Arabidopsis thaliana
  peptide (1)..(523): Ceres Seq. ID no. 12580801
  misc_feature (62)..(322): Pfam Name: Protein kinase domain Pfam Description: Protein kinase domain
  misc_feature (1)..(523): Homolog of NCBI NO: 15239300 NR Description: calcium-dependent protein kinase; protein id: supported by cDNA: 18901. [Arabidopsis thaliana]
  misc_feature (1)..(523): Homolog of NCBI NO: 21553971 NR Description: calcium-dependent protein kinase [Arabidopsis
  misc_feature (38)..(516): Homolog of NCBI NO: 16904224 NR Description: calcium/calmodulin-dependent protein kinase CaMK2
  misc_feature (17)..(519): Homolog of NCBI NO: 15227920 NR Description: putative Ca2+-dependent ser/thr protein kinase;
  misc_feature (1)..(521): Homolog of NCBI NO: 12592069 NR Description: calcium-dependent protein kinase [Oryza sativa]
  misc_feature (32)..(510): Homolog of NCBI NO: 3779218 NR Description: protein kinase CPK1 [Solanum tuberosum]
  misc_feature (1)..(520): Homolog of NCBI NO: 15234291 NR Description: Calcium-dependent serine/threonine protein
  misc_feature (40)..(521): Homolog of NCBI NO: 34902680 NR Description: similar to calcium-dependent protein kinase
  misc_feature (1)..(510): Homolog of NCBI NO: 6689920 NR Description: calcium-dependent protein kinase [Oryza sativa]
  misc_feature (52)..(510): Homolog of NCBI NO: 33146627 NR Description: putative CDPK-related protein kinase [Oryza
MGVCFSAIRVTGASSSRRSSQTKSKAAPTPIDTKASTKRRTGSIPCGKRTDFGYSKDFHDHYTIGKLLGHGQFGYTYVAIHRPNGDRVAVKRLDKSKMVLPIAVEDVKREVQILIALSGHENVVQFHNAFEDDDYVYIVMELCEGGELLDRILSKKGNRYSEKDAAVVVRQMLKVAGECHLHGLVHRDMKPENFLFKSAQLDSPLKATDFGLSDFIKPGKRFHDIVGSAYYVAPEVLKRRSGPESDVWSIGVITYILLCGRRPFWDRTEDGIFKEVLRNKPDFSRKPWATISDSAKDFVKKLLVKDPRARLTAAQALSHAWVREGGNATDIPVDISVLNNLRQFVRYSRLKQFALRALASTLDEAEISDLRDQFDAIDVDKNGVISLEEMRQALAKDLPWKLKDSRVAEILEAIDSNTDGLVDFTEFVAAALHVHQLEEHDSEKWQLRSRAAFEKFDLDKDGYITPEELRMHTGLRGSIDPLLDEADIDRDGKISLHEFRRLLRTASISSQRAPSPAGHRNLR

SEQ ID NO: 77848 - protein, 426 aa, Arabidopsis thaliana
  peptide (1)..(426): Ceres Seq. ID no. 12580802
  misc_feature (1)..(225): Pfam Name: Protein kinase domain Pfam Description: Protein kinase domain
  misc_feature (1)..(426): Homolog of NCBI NO: 15239300 NR Description: calcium-dependent protein kinase; protein id: supported by cDNA: 18901. [Arabidopsis thaliana]
  misc_feature (1)..(426): Homolog of NCBI NO: 21553971 NR Description: calcium-dependent protein kinase [Arabidopsis
  misc_feature (1)..(419): Homolog of NCBI NO: 16904224 NR Description: calcium/calmodulin-dependent protein kinase CaMK2
  misc_feature (1)..(422): Homolog of NCBI NO: 15227920 NR Description: putative Ca2+-dependent ser/thr protein kinase;
  misc_feature (1)..(424): Homolog of NCBI NO: 12592069 NR Description: calcium-dependent protein kinase [Oryza sativa]
  misc_feature (1)..(413): Homolog of NCBI NO: 3779218 NR Description: protein kinase CPK1 [Solanum tuberosum]
  misc_feature (1)..(423): Homolog of NCBI NO: 15234291 NR Description: Calcium-dependent serine/threonine protein
  misc_feature (1)..(424): Homolog of NCBI NO: 34902680 NR Description: similar to calcium-dependent protein kinase
  misc_feature (1)..(413): Homolog of NCBI NO: 6689920 NR Description: calcium-dependent protein kinase [Oryza sativa]
  misc_feature (1)..(413): Homolog of NCBI NO: 33146627 NR Description: putative CDPK-related protein kinase [Oryza
MVLPIAVEDVKREVQILIALSGHENVVQFHNAFEDDDYVYIVMELCEGGELLDRILSKKGNRYSEKDAAVVVRQMLKVAGECHLHGLVHRDMKPENFLFKSAQLDSPLKATDFGLSDFIKPGKRFHDIVGSAYYVAPEVLKRRSGPESDVWSIGVITYILLCGRRPFWDRTEDGIFKEVLRNKPDFSRKPWATISDSAKDFVKKLLVKDPRARLTAAQALSHAWVREGGNATDIPVDISVLNNLRQFVRYSRLKQFALRALASTLDEAEISDLRDQFDAIDVDKNGVISLEEMRQALAKDLPWKLKDSRVAEILEAIDSNTDGLVDFTEFVAAALHVHQLEEHDSEKWQLRSRAAFEKFDLDKDGYITPEELRMHTGLRGSIDPLLDEADIDRDGKISLHEFRRLLRTASISSQRAPSPAGHRNLR

SEQ ID NO: 77849 - DNA, 1631 bp, Arabidopsis thaliana
  misc_feature (1)..(1631): Ceres Seq. ID no. 12580827
  misc_feature: MA Experiment ID: 20000088 Result: Down-regulated in Transcription
  misc_feature: MA Experiment 20000088 PARAMETER Experiment Name: At_100uM_ABA_Mutants_cDNA_P Parameter: Plant Line Value: Landsberg
  misc_feature: MA Experiment 20000088 PARAMETER Experiment Name: At_100uM_ABA_Mutants_cDNA_P Parameter: Timepoint (hr) Value: 6
  misc_feature: MA Experiment 20000088 PARAMETER Experiment Name: At_100uM_ABA_Mutants_cDNA_P Parameter: Tissue Value: Aerial
  misc_feature: MA Experiment 20000088 PARAMETER Experiment Name: At_100uM_ABA_Mutants_cDNA_P Parameter: Treatment Value: 100uM ABA vs. No Treatment
  misc_feature: MA Experiment ID: 20000227 Result: Down-regulated in Transcription
  misc_feature: MA Experiment 20000227 PARAMETER Experiment Name: At_Root-Tips-vs-Tops_P Parameter: Tissue Value: Root Tips vs. Root Tops
atggatcgacggggcaagtattgggccggaccgatgtggatcgggttgagtatgtgcggatcgggctctgataccatattagagtgtaggttaagattattcaaacttcaaaggcaaaaccaaatgagcttcgtgtggtccgctgcggtgtgggtcatagctgtagccgctgttgtgattagcaaatggttataccgatggtcgaacccgaagtgcaatggcaagttaccaccgggatcaatgggtttaccgatcatcggagagacatgcgacttctttgagccccatggattatacgagatctcaccctttgtcaagaagaggatgttaaagtacgggccattgtttcggacaaatattttcggatcgaacaccgtggttttgacagaacctgatatcatcttcgaagtttttcggcaagagaacaagtcttttgtgtttagctatccagaagcttttgtcaagccatttggaaaagaaaacgtgttcctcaaacatggaaacatccacaagcacgtcaagcaaatcagtcttcaacatcttggctctgaggctttaaaaaaaaagatgataggagaaatagacagagtaacctatgagcatcttagatcgaaggctaaccagggtagcttcgatgctaaggaggcagttgaaagtgttataatggcgcacttgaccccaaagataataagtaacctcaaaccagaaacacaagcaactcttgtggacaatataatggccctaggatctgaatggtttcagtcacccttgaagcttacgactttgatttctatctacaaagtctttattgcacgtagatacgccctccaggtgataaaggacgttttcacgaggaggaaagcgtccagagaaatgtgcggagacttcctcgacacaatggtagaagagggggagaaagaagacgtcatttttaatgaagaaagtgctataaatctcatattcgctattttggtcgtcgctaaagaatctacctcttccgttactagcttggccatcaaatttcttgccgaaaaccataaagctctcgcagagttgaagagggagcatgcggccatccttcaaaatagaaatggtaaaggagctggagttagctgggaagaatacagacaccaaatgactttcactaacatggtgataaatgagactcttcgaatggcaaacatggctcctataatgtatagaaaggctgtgaacgatgtcgaaatcaaaggttacacaattccagcgggctggattgtggcggttataccaccagctgtccatttcaatgatgctatttatgagaatcctttggagttcaatccatggagatgggaggggaaagagttgcggtctggatctaagacgttcatggtgtttggaggtggagtgagacagtgtgtcggcgcggagtttgcgagactacaaatttctatcttcattcatcatcttgtaacaacctacgatttctcattggcccaagaatcggagttcatccgtgcaccactcccatacttccccaaaggactgcctatcaagatttcccagtcactctagtatcttgtgtaatcatatatgtcactagtaaagaatccggggaagtattttcaatggggcaatactaaaataat

SEQ ID NO: 77850 - protein, 518 aa, Arabidopsis thaliana
  peptide (1)..(518): Ceres Seq. ID no. 12580828
  misc_feature (1)..(518): Homolog of NCBI NO: 30695347 NR Description: cytochrome p450 family [Arabidopsis thaliana]
  misc_feature (42)..(518): Homolog of NCBI NO: 30695352 NR Description: cytochrome p450 family [Arabidopsis thaliana]
  misc_feature (42)..(518): Homolog of NCBI NO: 22530982 NR Description: cytochrome P450-like protein [Arabidopsis
  misc_feature (42)..(517): Homolog of NCBI NO: 15218388 NR Description: cytochrome P450, putative; protein id: supported by cDNA: gi_17473540 [Arabidopsis thaliana]
  misc_feature (42)..(390): Homolog of NCBI NO: 15230572 NR Description: cytochrome P450 - like protein; protein id:
  misc_feature (400)..(516): Homolog of NCBI NO: 15230572 NR Description: cytochrome P450 - like protein; protein id:
  misc_feature (42)..(411): Homolog of NCBI NO: 25282639 NR Description: hypothetical protein T30F21.17 [imported] - thaliana >gi|4836883|gb|AAD30586.1|AC007260_17 Similar to
  misc_feature (443)..(517): Homolog of NCBI NO: 25282639 NR Description: hypothetical protein T30F21.17 [imported] - thaliana >gi|4836883|gb|AAD30586.1|AC007260_17 Similar to
  misc_feature (42)..(517): Homolog of NCBI NO: 15222806 NR Description: cytochrome P450, putative; protein id:
  misc_feature (35)..(307): Homolog of NCBI NO: 8778326 NR Description: F14J16.21 [Arabidopsis thaliana]
MDRRGKYWAGPMWIGLSMCGSGSDTILECRLRLFKLQRQNQMSFVWSAAVWVIAVAAVVISKWLYRWSNPKCNGKLPPGSMGLPIIGETCDFFEPHGLYEISPFVKKRMLKYGPLFRTNIFGSNTVVLTEPDIIFEVFRQENKSFVFSYPEAFVKPFGKENVFLKHGNIHKHVKQISLQHLGSEALKKKMIGEIDRVTYEHLRSKANQGSFDAKEAVESVIMAHLTPKIISNLKPETQATLVDNIMALGSEWFQSPLKLTTLISIYKVFIARRYALQVIKDVFTRRKASREMCGDFLDTMVEEGEKEDVIFNEESAINLIFAILVVAKESTSSVTSLAIKFLAENHKALAELKREHAAILQNRNGKGAGVSWEEYRHQMTFTNMVINETLRMANMAPIMYRKAVNDVEIKGYTIPAGWIVAVIPPAVHFNDAIYENPLEFNPWRWEGKELRSGSKTFMVFGGGVRQCVGAEFARLQISIFIHHLVTTYDFSLAQESEFIRAPLPYFPKGLPIKISQSL

SEQ ID NO: 77851 - protein, 507 aa, Arabidopsis thaliana
  peptide (1)..(507): Ceres Seq. ID no. 12580829
  misc_feature (1)..(507): Homolog of NCBI NO: 30695347 NR Description: cytochrome p450 family [Arabidopsis thaliana]
  misc_feature (31)..(507): Homolog of NCBI NO: 30695352 NR Description: cytochrome p450 family [Arabidopsis thaliana]
  misc_feature (31)..(507): Homolog of NCBI NO: 22530982 NR Description: cytochrome P450-like protein [Arabidopsis
  misc_feature (31)..(506): Homolog of NCBI NO: 15218388 NR Description: cytochrome P450, putative; protein id: supported by cDNA: gi_17473540 [Arabidopsis thaliana]
  misc_feature (31)..(379): Homolog of NCBI NO: 15230572 NR Description: cytochrome P450 - like protein; protein id:
  misc_feature (389)..(505): Homolog of NCBI NO: 15230572 NR Description: cytochrome P450 - like protein; protein id:
  misc_feature (31)..(400): Homolog of NCBI NO: 25282639 NR Description: hypothetical protein T30F21.17 [imported] - thaliana >gi|4836883|gb|AAD30586.1|AC007260_17 Similar to
  misc_feature (432)..(506): Homolog of NCBI NO: 25282639 NR Description: hypothetical protein T30F21.17 [imported] - thaliana >gi|4836883|gb|AAD30586.1|AC007260_17 Similar to
  misc_feature (31)..(506): Homolog of NCBI NO: 15222806 NR Description: cytochrome P450, putative; protein id:
  misc_feature (24)..(296): Homolog of NCBI NO: 8778326 NR Description: F14J16.21 [Arabidopsis thaliana]
MWIGLSMCGSGSDTILECRLRLFKLQRQNQMSFVWSAAVWVIAVAAVVISKWLYRWSNPKCNGKLPPGSMGLPIIGETCDFFEPHGLYEISPFVKKRMLKYGPLFRTNIFGSNTVVLTEPDIIFEVFRQENKSFVFSYPEAFVKPFGKENVFLKHGNIHKHVKQISLQHLGSEALKKKMIGEIDRVTYEHLRSKANQGSFDAKEAVESVIMAHLTPKIISNLKPETQATLVDNIMALGSEWFQSPLKLTTLISIYKVFIARRYALQVIKDVFTRRKASREMCGDFLDTMVEEGEKEDVIFNEESAINLIFAILVVAKESTSSVTSLAIKFLAENHKALAELKREHAAILQNRNGKGAGVSWEEYRHQMTFTNMVINETLRMANMAPIMYRKAVNDVEIKGYTIPAGWIVAVIPPAVHFNDAIYENPLEFNPWRWEGKELRSGSKTFMVFGGGVRQCVGAEFARLQISIFIHHLVTTYDFSLAQESEFIRAPLPYFPKGLPIKISQSL

SEQ ID NO: 77852 - protein, 501 aa, Arabidopsis thaliana
  peptide (1)..(501): Ceres Seq. ID no. 12580830
  misc_feature (1)..(501): Homolog of NCBI NO: 30695347 NR Description: cytochrome p450 family [Arabidopsis thaliana]
  misc_feature (25)..(501): Homolog of NCBI NO: 30695352 NR Description: cytochrome p450 family [Arabidopsis thaliana]
  misc_feature (25)..(501): Homolog of NCBI NO: 22530982 NR Description: cytochrome P450-like protein [Arabidopsis
  misc_feature (25)..(500): Homolog of NCBI NO: 15218388 NR Description: cytochrome P450, putative; protein id: supported by cDNA: gi_17473540 [Arabidopsis thaliana]
  misc_feature (25)..(373): Homolog of NCBI NO: 15230572 NR Description: cytochrome P450 - like protein; protein id:
  misc_feature (383)..(499): Homolog of NCBI NO: 15230572 NR Description: cytochrome P450 - like protein; protein id:
  misc_feature (25)..(394): Homolog of NCBI NO: 25282639 NR Description: hypothetical protein T30F21.17 [imported] - thaliana >gi|4836883|gb|AAD30586.1|AC007260_17 Similar to
  misc_feature (426)..(500): Homolog of NCBI NO: 25282639 NR Description: hypothetical protein T30F21.17 [imported] - thaliana >gi|4836883|gb|AAD30586.1|AC007260_17 Similar to
  misc_feature (25)..(500): Homolog of NCBI NO: 15222806 NR Description: cytochrome P450, putative; protein id:
  misc_feature (18)..(290): Homolog of NCBI NO: 8778326 NR Description: F14J16.21 [Arabidopsis thaliana]
MCGSGSDTILECRLRLFKLQRQNQMSFVWSAAVWVIAVAAVVISKWLYRWSNPKCNGKLPPGSMGLPIIGETCDFFEPHGLYEISPFVKKRMLKYGPLFRTNIFGSNTVVLTEPDIIFEVFRQENKSFVFSYPEAFVKPFGKENVFLKHGNIHKHVKQISLQHLGSEALKKKMIGEIDRVTYEHLRSKANQGSFDAKEAVESVIMAHLTPKIISNLKPETQATLVDNIMALGSEWFQSPLKLTTLISIYKVFIARRYALQVIKDVFTRRKASREMCGDFLDTMVEEGEKEDVIFNEESAINLIFAILVVAKESTSSVTSLAIKFLAENHKALAELKREHAAILQNRNGKGAGVSWEEYRHQMTFTNMVINETLRMANMAPIMYRKAVNDVEIKGYTIPAGWIVAVIPPAVHFNDAIYENPLEFNPWRWEGKELRSGSKTFMVFGGGVRQCVGAEFARLQISIFIHHLVTTYDFSLAQESEFIRAPLPYFPKGLPIKISQSL

SEQ ID NO: 77853 - DNA, 1933 bp, Arabidopsis thaliana
  misc_feature (1)..(1933): Ceres Seq. ID no. 12580849
  misc_feature: MA Experiment ID: 108488 Result: Down-regulated in Transcription
  misc_feature: MA Experiment ID: 108489 Result: Up-regulated in Transcription
  misc_feature: MA Experiment ID: 108572 Result: Up-regulated in Transcription
  misc_feature: MA Experiment 108572 PARAMETER Experiment Name: At_Drought_cDNA_P Parameter: Timepoint (hr) Value: 1
  misc_feature: MA Experiment 108572 PARAMETER Experiment Name: At_Drought_cDNA_P Parameter: Tissue Value: Aerial
  misc_feature: MA Experiment 108572 PARAMETER Experiment Name: At_Drought_cDNA_P Parameter: Treatment Value: Drought vs. No Drought
  misc_feature: MA Experiment ID: 108573 Result: Up-regulated in Transcription
  misc_feature: MA Experiment 108573 PARAMETER Experiment Name: At_Drought_cDNA_P Parameter: Timepoint (hr) Value: 6
  misc_feature: MA Experiment 108573 PARAMETER Experiment Name: At_Drought_cDNA_P Parameter: Tissue Value: Aerial
  misc_feature: MA Experiment 108573 PARAMETER Experiment Name: At_Drought_cDNA_P Parameter: Treatment Value: Drought vs. No Drought
  misc_feature: MA Experiment ID: 108594 Result: Down-regulated in Transcription
  misc_feature: MA Experiment 108594 PARAMETER Experiment Name: At_Ler-rhl_Root_cDNA_P Parameter: Plant Line Value: null
  misc_feature: MA Experiment ID: 20000069 Result: Down-regulated in Transcription
  misc_feature: MA Experiment 20000069 PARAMETER Experiment Name: At_100uM_ABA_Mutants_cDNA_P Parameter: Plant Line Value: CS23
  misc_feature: MA Experiment 20000069 PARAMETER Experiment Name: At_100uM_ABA_Mutants_cDNA_P Parameter: Timepoint (hr) Value: 6
  misc_feature: MA Experiment 20000069 PARAMETER Experiment Name: At_100uM_ABA_Mutants_cDNA_P Parameter: Tissue Value: Aerial
  misc_feature: MA Experiment 20000069 PARAMETER Experiment Name: At_100uM_ABA_Mutants_cDNA_P Parameter: Treatment Value: 100uM ABA vs. No Treatment
  misc_feature: MA Experiment ID: 20000089 Result: Down-regulated in Transcription
  misc_feature: MA Experiment ID: 20000111 Result: Up-regulated in Transcription
  misc_feature: MA Experiment 20000111 PARAMETER Experiment Name: At_42deg_Heat_cDNA_P Parameter: Temperature (deg C) Value: 42 vs. 22
  misc_feature: MA Experiment 20000111 PARAMETER Experiment Name: At_42deg_Heat_cDNA_P Parameter: Timepoint (hr) Value: 6
  misc_feature: MA Experiment 20000111 PARAMETER Experiment Name: At_42deg_Heat_cDNA_P Parameter: Tissue Value: Aerial
  misc_feature: MA Experiment ID: 20000113 Result: Up-regulated in Transcription
  misc_feature: MA Experiment 20000113 PARAMETER Experiment Name: At_42deg_Heat_cDNA_P Parameter: Temperature (deg C) Value: 42 vs. 22
  misc_feature: MA Experiment 20000113 PARAMETER Experiment Name: At_42deg_Heat_cDNA_P Parameter: Timepoint (hr) Value: 8
  misc_feature: MA Experiment 20000113 PARAMETER Experiment Name: At_42deg_Heat_cDNA_P Parameter: Tissue Value: Aerial
  misc_feature: MA Experiment ID: 20000213 Result: Down-regulated in Transcription
  misc_feature: MA Experiment 20000213 PARAMETER Experiment Name: At_4deg_Cold_P Parameter: Timepoint (hr) Value: 2
  misc_feature: MA Experiment ID: 20001560 Result: Down-regulated in Transcription
  misc_feature: MA Experiment 20001560 PARAMETER Experiment Name: At_Drought_Soil_Dry_P Parameter: Age (day) Value: 28
  misc_feature: MA Experiment 20001560 PARAMETER Experiment Name: At_Drought_Soil_Dry_P Parameter: Organism Value: A. thaliana
  misc_feature: MA Experiment 20001560 PARAMETER Experiment Name: At_Drought_Soil_Dry_P Parameter: Plant Line Value: WS
  misc_feature: MA Experiment 20001560 PARAMETER Experiment Name: At_Drought_Soil_Dry_P Parameter: Post Timepoint (hr) Value: None
  misc_feature: MA Experiment 20001560 PARAMETER Experiment Name: At_Drought_Soil_Dry_P Parameter: Post-Treatment Value: None
  misc_feature: MA Experiment 20001560 PARAMETER Experiment Name: At_Drought_Soil_Dry_P Parameter: Timepoint (day) Value: 14
  misc_feature: MA Experiment 20001560 PARAMETER Experiment Name: At_Drought_Soil_Dry_P Parameter: Treatment Value: Drought vs. No Drought
  misc_feature: MA Experiment ID: 20001905 Result: Up-regulated in Transcription
  misc_feature: MA Experiment 20001905 PARAMETER Experiment Name: At_Drought_Reproduction_P Parameter: Age (day) Value: 40
  misc_feature: MA Experiment 20001905 PARAMETER Experiment Name: At_Drought_Reproduction_P Parameter: Organism Value: A. thaliana
  misc_feature: MA Experiment 20001905 PARAMETER Experiment Name: At_Drought_Reproduction_P Parameter: Plant Line Value: WS
  misc_feature: MA Experiment 20001905 PARAMETER Experiment Name: At_Drought_Reproduction_P Parameter: Timepoint (day) Value: 10
  misc_feature: MA Experiment 20001905 PARAMETER Experiment Name: At_Drought_Reproduction_P Parameter: Tissue Value: Rosettes
  misc_feature: MA Experiment 20001905 PARAMETER Experiment Name: At_Drought_Reproduction_P Parameter: Treatment Value: Drought vs. No Drought
attatttcttcttcttcttcttcttcttcttcatcatcgcatctctctcacttcacgttttcttcggtgaagagatagccgccggaaaaagttatcatctccggaaatttcgctctttctttacgtgtttgagggtgtgttttatgtatggatggatttaagggtaaaagaacatctagaccgattatgccacggaaagcaagtggtcttgtgttacatgagaatatgaagaagaaagatgataagagtgttgtccctatctgcagtagaattggttgcagttccagggttagttccactaagggagatttgattgatcataaagcaaaagctactgtgtcttcgtttcgatctcctttgagtggaaaggaaaccgttggtagttcatctcgaagtatgagtggatttggtggtacaaaaaaggcttccaaggttattggtaggagacaactctcttctcttttggacatggattcttcagagagcagcagtgttaatgaagactcacccacaagtgagcgttcccttcctcgtggaaagacaaaagaaagcactattagtgttcattctgaaagtagtgtctctggagaagttgtgacagaggcaggaagctcgagtagaggaactggtagaagcattcatcagagacctgatttggtctcccgagatgctcgtgtgagtaatagtgagcaaaatgcaagagctagtgtgaacaagaatggattaagagacttgaggaacaaatctggttctgatgttcttccatctaattcaactccgacaagaaaaagtaacatctttagaaagaaaacctctgatggtgagagcagctcttcgagtagagggaataagacggaaggatcagtggttgggggaaagaatattagttcccctcaggggaatggcatcaccatgtctgaacctaggaggaacagaaacttaccaagtgttagggacaacagtgttgtttcaagtagtactaggagatcaactggttattatggtagaacaggacgtgctggagcggttgcaacactacaagcacctcggcctccaacaagagctgatctcaatccttctagatcggcagaagcttcgcgtagtcctttaaatagttacagtaggccaatcagtagtaatggcaggttacgtagcctgatgatgcctggtagcccctcagaagccggcctttctcgctctttgatgaaccgtgatactttcagacggtataacatgaatggagttgcagaggtattgttggccctggaaaggattgagcaagacgaagagcttacatacgagcaattggctgttttagagaccaatctgttcttaaatggtatgagcagcttccacgatcagcatagagatatgaggcttgacattgacaacatgtcgtatgaggaactgttagcattagaggagaaaatgggtacagtgagcactgctctaagcgaagaagcgcttctgaaaagcctcaagtcaagtatttaccgtccaaacgatgaatccgacgacatttgcctgaacaaagatgatgatgtcaagtgcagcatttgccaggaagagtatgttgatggagatgaagtagggactttgccttgccaacataaataccacgtgagctgcgcgcaacaatggctacggatgaagaattggtgtcctatatgtaaaacctctgcagaatctcagccacatccattttcatgatgatgggattgcagagacatttaccaaagtgtttgtgtctacttccactaccttgctctctattatttgtacataaaaggttttcttttttacttacacacaattgggaacaaatagaaaataagatcaggtggacaaattattgttttcaccttgtattggttcgtaatttcaacaatatttggtttaattccatatatagtttatatactgttattgcact

SEQ ID NO: 77854 - protein, 520 aa, Arabidopsis thaliana
  peptide (1)..(520): Ceres Seq. ID no. 12580850
  misc_feature (468)..(508): Pfam Name: Zinc finger, C3HC4 type (RING finger) Pfam Description: Zinc finger, C3HC4 type (RING finger)
  misc_feature (1)..(520): Homolog of NCBI NO: 30689641 NR Description: RING finger-related protein [Arabidopsis thaliana]
  misc_feature (1)..(515): Homolog of NCBI NO: 22326712 NR Description: Pspzf zinc finger protein - like; protein id:
  misc_feature (1)..(515): Homolog of NCBI NO: 20466428 NR Description: Pspzf zinc finger protein-like [Arabidopsis
  misc_feature (27)..(515): Homolog of NCBI NO: 10129643 NR Description: Pspzf zinc finger protein-like [Arabidopsis
  misc_feature (98)..(514): Homolog of NCBI NO: 7486381 NR Description: hypothetical protein F3L17.20 - Arabidopsis >gi|5262756|emb|CAB45904.1| putative protein [Arabidopsis >gi|7270048|emb|CAB79863.1| putative protein [Arabidopsis
  misc_feature (98)..(514): Homolog of NCBI NO: 18417809 NR Description: putative protein; protein id: At4g31450.1, by cDNA: gi_15983461 [Arabidopsis thaliana] AT4g31450/F3L17_20 [Arabidopsis thaliana]
  misc_feature (145)..(514): Homolog of NCBI NO: 15235211 NR Description: putative protein; protein id: At4g34040.1
  misc_feature (310)..(516): Homolog of NCBI NO: 15226553 NR Description: putative RING zinc finger protein; protein id: [Arabidopsis thaliana] >gi|25411642|pir||B84530 probable RING
  misc_feature (207)..(512): Homolog of NCBI NO: 38344153 NR Description: OSJNBa0041A02.20 [Oryza sativa (japonica
  misc_feature (183)..(511): Homolog of NCBI NO: 15239131 NR Description: putative protein; protein id: At5g42940.1, by cDNA: gi_18087615 [Arabidopsis thaliana] contains similarity to RING zinc finger protein~gene_id:MBD2.14
MDGFKGKRTSRPIMPRKASGLVLHENMKKKDDKSVVPICSRIGCSSRVSSTKGDLIDHKAKATVSSFRSPLSGKETVGSSSRSMSGFGGTKKASKVIGRRQLSSLLDMDSSESSSVNEDSPTSERSLPRGKTKESTISVHSESSVSGEVVTEAGSSSRGTGRSIHQRPDLVSRDARVSNSEQNARASVNKNGLRDLRNKSGSDVLPSNSTPTRKSNIFRKKTSDGESSSSSRGNKTEGSVVGGKNISSPQGNGITMSEPRRNRNLPSVRDNSVVSSSTRRSTGYYGRTGRAGAVATLQAPRPPTRADLNPSRSAEASRSPLNSYSRPISSNGRLRSLMMPGSPSEAGLSRSLMNRDTFRRYNMNGVAEVLLALERIEQDEELTYEQLAVLETNLFLNGMSSFHDQHRDMRLDIDNMSYEELLALEEKMGTVSTALSEEALLKSLKSSIYRPNDESDDICLNKDDDVKCSICQEEYVDGDEVGTLPCQHKYHVSCAQQWLRMKNWCPICKTSAESQPHPFS

SEQ ID NO: 77855 - protein, 507 aa, Arabidopsis thaliana
  peptide (1)..(507): Ceres Seq. ID no. 12580851
  misc_feature (455)..(495): Pfam Name: Zinc finger, C3HC4 type (RING finger) Pfam Description: Zinc finger, C3HC4 type (RING finger)
  misc_feature (1)..(507): Homolog of NCBI NO: 30689641 NR Description: RING finger-related protein [Arabidopsis thaliana]
  misc_feature (1)..(502): Homolog of NCBI NO: 22326712 NR Description: Pspzf zinc finger protein - like; protein id:
  misc_feature (1)..(502): Homolog of NCBI NO: 20466428 NR Description: Pspzf zinc finger protein-like [Arabidopsis
  misc_feature (14)..(502): Homolog of NCBI NO: 10129643 NR Description: Pspzf zinc finger protein-like [Arabidopsis
  misc_feature (85)..(501): Homolog of NCBI NO: 7486381 NR Description: hypothetical protein F3L17.20 - Arabidopsis >gi|5262756|emb|CAB45904.1| putative protein [Arabidopsis >gi|7270048|emb|CAB79863.1| putative protein [Arabidopsis
  misc_feature (85)..(501): Homolog of NCBI NO: 18417809 NR Description: putative protein; protein id: At4g31450.1, by cDNA: gi_15983461 [Arabidopsis thaliana] AT4g31450/F3L17_20 [Arabidopsis thaliana]
  misc_feature (132)..(501): Homolog of NCBI NO: 15235211 NR Description: putative protein; protein id: At4g34040.1
  misc_feature (297)..(503): Homolog of NCBI NO: 15226553 NR Description: putative RING zinc finger protein; protein id: [Arabidopsis thaliana] >gi|25411642|pir||B84530 probable RING
  misc_feature (194)..(499): Homolog of NCBI NO: 38344153 NR Description: OSJNBa0041A02.20 [Oryza sativa (japonica
  misc_feature (170)..(498): Homolog of NCBI NO: 15239131 NR Description: putative protein; protein id: At5g42940.1, by cDNA: gi_18087615 [Arabidopsis thaliana] contains similarity to RING zinc finger protein~gene_id:MBD2.14
MPRKASGLVLHENMKKKDDKSVVPICSRIGCSSRVSSTKGDLIDHKAKATVSSFRSPLSGKETVGSSSRSMSGFGGTKKASKVIGRRQLSSLLDMDSSESSSVNEDSPTSERSLPRGKTKESTISVHSESSVSGEVVTEAGSSSRGTGRSIHQRPDLVSRDARVSNSEQNARASVNKNGLRDLRNKSGSDVLPSNSTPTRKSNIFRKKTSDGESSSSSRGNKTEGSVVGGKNISSPQGNGITMSEPRRNRNLPSVRDNSVVSSSTRRSTGYYGRTGRAGAVATLQAPRPPTRADLNPSRSAEASRSPLNSYSRPISSNGRLRSLMMPGSPSEAGLSRSLMNRDTFRRYNMNGVAEVLLALERIEQDEELTYEQLAVLETNLFLNGMSSFHDQHRDMRLDIDNMSYEELLALEEKMGTVSTALSEEALLKSLKSSIYRPNDESDDICLNKDDDVKCSICQEEYVDGDEVGTLPCQHKYHVSCAQQWLRMKNWCPICKTSAESQPHPFS

SEQ ID NO: 77856 - protein, 494 aa, Arabidopsis thaliana
  peptide (1)..(494): Ceres Seq. ID no. 12580852
  misc_feature (442)..(482): Pfam Name: Zinc finger, C3HC4 type (RING finger) Pfam Description: Zinc finger, C3HC4 type (RING finger)
  misc_feature (1)..(494): Homolog of NCBI NO: 30689641 NR Description: RING finger-related protein [Arabidopsis thaliana]
  misc_feature (1)..(489): Homolog of NCBI NO: 22326712 NR Description: Pspzf zinc finger protein - like; protein id:
  misc_feature (1)..(489): Homolog of NCBI NO: 20466428 NR Description: Pspzf zinc finger protein-like [Arabidopsis
  misc_feature (1)..(489): Homolog of NCBI NO: 10129643 NR Description: Pspzf zinc finger protein-like [Arabidopsis
  misc_feature (72)..(488): Homolog of NCBI NO: 7486381 NR Description: hypothetical protein F3L17.20 - Arabidopsis >gi|5262756|emb|CAB45904.1| putative protein [Arabidopsis >gi|7270048|emb|CAB79863.1| putative protein [Arabidopsis
  misc_feature (72)..(488): Homolog of NCBI NO: 18417809 NR Description: putative protein; protein id: At4g31450.1, by cDNA: gi_15983461 [Arabidopsis thaliana] AT4g31450/F3L17_20 [Arabidopsis thaliana]
  misc_feature (119)..(488): Homolog of NCBI NO: 15235211 NR Description: putative protein; protein id: At4g34040.1
  misc_feature (284)..(490): Homolog of NCBI NO: 15226553 NR Description: putative RING zinc finger protein; protein id: [Arabidopsis thaliana] >gi|25411642|pir||B84530 probable RING
  misc_feature (181)..(486): Homolog of NCBI NO: 38344153 NR Description: OSJNBa0041A02.20 [Oryza sativa (japonica
  misc_feature (157)..(485): Homolog of NCBI NO: 15239131 NR Description: putative protein; protein id: At5g42940.1, by cDNA: gi_18087615 [Arabidopsis thaliana] contains similarity to RING zinc finger protein~gene_id:MBD2.14
MKKKDDKSVVPICSRIGCSSRVSSTKGDLIDHKAKATVSSFRSPLSGKETVGSSSRSMSGFGGTKKASKVIGRRQLSSLLDMDSSESSSVNEDSPTSERSLPRGKTKESTISVHSESSVSGEVVTEAGSSSRGTGRSIHQRPDLVSRDARVSNSEQNARASVNKNGLRDLRNKSGSDVLPSNSTPTRKSNIFRKKTSDGESSSSSRGNKTEGSVVGGKNISSPQGNGITMSEPRRNRNLPSVRDNSVVSSSTRRSTGYYGRTGRAGAVATLQAPRPPTRADLNPSRSAEASRSPLNSYSRPISSNGRLRSLMMPGSPSEAGLSRSLMNRDTFRRYNMNGVAEVLLALERIEQDEELTYEQLAVLETNLFLNGMSSFHDQHRDMRLDIDNMSYEELLALEEKMGTVSTALSEEALLKSLKSSIYRPNDESDDICLNKDDDVKCSICQEEYVDGDEVGTLPCQHKYHVSCAQQWLRMKNWCPICKTSAESQPHPFS

SEQ ID NO: 77857 - DNA, 1378 bp, Arabidopsis thaliana
  misc_feature (1)..(1378): Ceres Seq. ID no. 12580853
  misc_feature: MA Experiment ID: 20000264 Result: Up-regulated in Transcription
  misc_feature: MA Experiment 20000264 PARAMETER Experiment Name: At_Open_Flower_P Parameter: Age (day) Value: 21
  misc_feature: MA Experiment 20000264 PARAMETER Experiment Name: At_Open_Flower_P Parameter: Plant Line Value: WS
  misc_feature: MA Experiment 20000264 PARAMETER Experiment Name: At_Open_Flower_P Parameter: Tissue Value: Open Flower vs. Whole Plant
  misc_feature: MA Experiment ID: 20000794 Result: Up-regulated in Transcription
  misc_feature: MA Experiment 20000794 PARAMETER Experiment Name: At_Petals_P Parameter: Age (day) Value: 23-25 days
  misc_feature: MA Experiment 20000794 PARAMETER Experiment Name: At_Petals_P Parameter: Plant Line Value: WS
  misc_feature: MA Experiment 20000794 PARAMETER Experiment Name: At_Petals_P Parameter: Tissue Value: Petals vs. Whole plant
  misc_feature: MA Experiment ID: 20001557 Result: Down-regulated in Transcription
  misc_feature: MA Experiment 20001557 PARAMETER Experiment Name: At_Drought_Soil_Dry_P Parameter: Age (day) Value: 27
  misc_feature: MA Experiment 20001557 PARAMETER Experiment Name: At_Drought_Soil_Dry_P Parameter: Organism Value: A. thaliana
  misc_feature: MA Experiment 20001557 PARAMETER Experiment Name: At_Drought_Soil_Dry_P Parameter: Plant Line Value: WS
  misc_feature: MA Experiment 20001557 PARAMETER Experiment Name: At_Drought_Soil_Dry_P Parameter: Post Timepoint (hr) Value: 3
  misc_feature: MA Experiment 20001557 PARAMETER Experiment Name: At_Drought_Soil_Dry_P Parameter: Post-Treatment Value: Re-Water vs. No Drought
  misc_feature: MA Experiment 20001557 PARAMETER Experiment Name: At_Drought_Soil_Dry_P Parameter: Timepoint (day) Value: 13
  misc_feature: MA Experiment 20001557 PARAMETER Experiment Name: At_Drought_Soil_Dry_P Parameter: Treatment Value: Drought vs. No Drought
  misc_feature: MA Experiment ID: 20001558 Result: Down-regulated in Transcription
  misc_feature: MA Experiment 20001558 PARAMETER Experiment Name: At_Drought_Soil_Dry_P Parameter: Age (day) Value: 27
  misc_feature: MA Experiment 20001558 PARAMETER Experiment Name: At_Drought_Soil_Dry_P Parameter: Organism Value: A. thaliana
  misc_feature: MA Experiment 20001558 PARAMETER Experiment Name: At_Drought_Soil_Dry_P Parameter: Plant Line Value: WS
  misc_feature: MA Experiment 20001558 PARAMETER Experiment Name: At_Drought_Soil_Dry_P Parameter: Post Timepoint (hr) Value: 6
  misc_feature: MA Experiment 20001558 PARAMETER Experiment Name: At_Drought_Soil_Dry_P Parameter: Post-Treatment Value: Re-Water vs. No Drought
  misc_feature: MA Experiment 20001558 PARAMETER Experiment Name: At_Drought_Soil_Dry_P Parameter: Timepoint (day) Value: 13
  misc_feature: MA Experiment 20001558 PARAMETER Experiment Name: At_Drought_Soil_Dry_P Parameter: Treatment Value: Drought vs. No Drought
atattctttctttggtccgttgcttattcaccagggaaaaatgttgcagaagatttctcagtctatttctttatgtaacggcgatcaatttaagccgttaatatacctcgccggagctccgacgaacttcatctcttcccctctctcaggcaagaagaaatcatcttctctgagaattaaaaggatacaacaacttcaaagtacattagaagatagaataaatccaccactagtatgtggaacagtatcgccacgtcttagtgttcctgatcatatactaaagcctctatatgttgagtctagcaaagttccagagatatcaagtgaattacagattcctgactctataggcattgtgaaaatgaagaaagcgtgtgagctcgcggctcgtgtattagactatgcaggaactttggttagagtaagttacttttgaatctctaactatgattgaatctctttgttgtaatggtttttttgttttgttgttgcagccgtttgttactacagatgaaattgataaagcagtgcatcagatggttattgagtttggtgcatatccttcacctcttggatatggtggatttcctaaaagtgtttgtacatcggttaatgaatgtatgtttcacgggattcccgattctcgtccgctacaggtttggagtagcatgagaattctcttttgtagtatatatgtaacaccccggtttcaggaatatggtggtgcatgcggagaggtttataatatatcactaatcaacaacttcttgtattcagaatggagatattataaacatcgatgttgcggtttacttggatgggtatcatggagatacgtcaaagactttcttatgtggagacgtcaatggaagccttaaacaacttgtcaaggtcacagaagaatgcttggagaaaggtatatcggtttgtaaagatggagcaagcttcaaacaaatcgggaagataatcagtgagcatgctgcaaagtatggctataatatggagcgattcatcggtcatggtgtaggaacggtattacactcggaacctcttatatatcttcatagtaactatgattatgaacttgaatatatgattgaaggtcaaacttttacgctcgaaccaattctcaccattggaacaacagagtttgtaacatggcctgacaaatggacaattgtgaccgcagatggtggtccggccgcacagtttgagcatacaattcttattaccaccactggtgcagaaattctcaccatatcatcatgaattatatcacaatgttacggaatttacattatgaaccatccatttctgttgtaaataaaagaaaatataaactgtttggttctgagcagttgatgttggtgtcgttggc

SEQ ID NO: 77858 - protein, 144 aa, Arabidopsis thaliana
  peptide (1)..(144): Ceres Seq. ID no. 12580854
  misc_feature (14)..(140): Homolog of NCBI NO: 15230872 NR Description: methionine aminopeptidase, putative; protein id:
  misc_feature (14)..(140): Homolog of NCBI NO: 11320958 NR Description: methionine aminopeptidase-like protein
  misc_feature (14)..(140): Homolog of NCBI NO: 7939560 NR Description: methionine aminopeptidase-like protein
  misc_feature (48)..(142): Homolog of NCBI NO: 11320956 NR Description: methionine aminopeptidase-like protein
  misc_feature (48)..(142): Homolog of NCBI NO: 15222218 NR Description: methionine aminopeptidase I (MAP1), putative; id: At1g13270.1, supported by cDNA: gi_11320955 [Arabidopsis
  misc_feature (56)..(140): Homolog of NCBI NO: 25289731 NR Description: methionyl aminopeptidase-like protein [imported] -
  misc_feature (80)..(140): Homolog of NCBI NO: 18419957 NR Description: methionyl aminopeptidase-like protein; protein At4g37040.1 [Arabidopsis thaliana]
  misc_feature (66)..(142): Homolog of NCBI NO: 38345794 NR Description: OSJNBa0085I10.11 [Oryza sativa (japonica
  misc_feature (39)..(142): Homolog of NCBI NO: 34394646 NR Description: putative methionine aminopeptidase I (MAP1)
  misc_feature (44)..(141): Homolog of NCBI NO: 34855177 NR Description: similar to methionine aminopeptidase-like 1
YSFFGPLLIHQGKMLQKISQSISLCNGDQFKPLIYLAGAPTNFISSPLSGKKKSSSLRIKRIQQLQSTLEDRINPPLVCGTVSPRLSVPDHILKPLYVESSKVPEISSELQIPDSIGIVKMKKACELAARVLDYAGTLVRVSYF

SEQ ID NO: 77859 - protein, 143 aa, Arabidopsis thaliana
  peptide (1)..(143): Ceres Seq. ID no. 12580855
  misc_feature (14)..(70): Homolog of NCBI NO: 7939560 NR Description: methionine aminopeptidase-like protein
  misc_feature (14)..(70): Homolog of NCBI NO: 11320958 NR Description: methionine aminopeptidase-like protein
  misc_feature (14)..(70): Homolog of NCBI NO: 15230872 NR Description: methionine aminopeptidase, putative; protein id:
  misc_feature (14)..(70): Homolog of NCBI NO: 25289731 NR Description: methionyl aminopeptidase-like protein [imported] -
  misc_feature (14)..(70): Homolog of NCBI NO: 18419957 NR Description: methionyl aminopeptidase-like protein; protein At4g37040.1 [Arabidopsis thaliana]
  misc_feature (1)..(143): Homolog of NCBI NO: 22531174 NR Description: methionine aminopeptidase, putative [Arabidopsis
  misc_feature (17)..(66): Homolog of NCBI NO: 15827827 NR Description: methionine aminopeptidase [Mycobacterium leprae]
  misc_feature (14)..(70): Homolog of NCBI NO: 15225437 NR Description: putative methionine aminopeptidase; protein id: supported by cDNA: 37621., supported by cDNA: gi_11320953, by cDNA: gi_20466152 [Arabidopsis thaliana]
  misc_feature (14)..(70): Homolog of NCBI NO: 21593270 NR Description: putative methionine aminopeptidase [Arabidopsis
  misc_feature (9)..(70): Homolog of NCBI NO: 28436769 NR Description: Unknown (protein for IMAGE:5542221) [Xenopus
MIESLCCNGFFVLLLQPFVTTDEIDKAVHQMVIEFGAYPSPLGYGGFPKSVCTSVNECMFHGIPDSRPLQVWSSMRILFCSIYVTPRFQEYGGACGEVYNISLINNFLYSEWRYYKHRCCGLLGWVSWRYVKDFLMWRRQWKP

SEQ ID NO: 77860 - protein, 131 aa, Arabidopsis thaliana
  peptide (1)..(131): Ceres Seq. ID no. 12580856
  misc_feature (1)..(127): Homolog of NCBI NO: 15230872 NR Description: methionine aminopeptidase, putative; protein id:
  misc_feature (1)..(127): Homolog of NCBI NO: 11320958 NR Description: methionine aminopeptidase-like protein
  misc_feature (1)..(127): Homolog of NCBI NO: 7939560 NR Description: methionine aminopeptidase-like protein
  misc_feature (35)..(129): Homolog of NCBI NO: 11320956 NR Description: methionine aminopeptidase-like protein
  misc_feature (35)..(129): Homolog of NCBI NO: 15222218 NR Description: methionine aminopeptidase I (MAP1), putative; id: At1g13270.1, supported by cDNA: gi_11320955 [Arabidopsis
  misc_feature (43)..(127): Homolog of NCBI NO: 25289731 NR Description: methionyl aminopeptidase-like protein [imported] -
  misc_feature (67)..(127): Homolog of NCBI NO: 18419957 NR Description: methionyl aminopeptidase-like protein; protein At4g37040.1 [Arabidopsis thaliana]
  misc_feature (53)..(129): Homolog of NCBI NO: 38345794 NR Description: OSJNBa0085I10.11 [Oryza sativa (japonica
  misc_feature (26)..(129): Homolog of NCBI NO: 34394646 NR Description: putative methionine aminopeptidase I (MAP1)
  misc_feature (31)..(128): Homolog of NCBI NO: 34855177 NR Description: similar to methionine aminopeptidase-like 1
MLQKISQSISLCNGDQFKPLIYLAGAPTNFISSPLSGKKKSSSLRIKRIQQLQSTLEDRINPPLVCGTVSPRLSVPDHILKPLYVESSKVPEISSELQIPDSIGIVKMKKACELAARVLDYAGTLVRVSYF

SEQ ID NO: 77861 - DNA, 1335 bp, Arabidopsis thaliana
  misc_feature (1)..(1335): Ceres Seq. ID no. 12580883
  misc_feature: MA Experiment ID: 20000496 Result: Up-regulated in Transcription
  misc_feature: MA Experiment 20000496 PARAMETER Experiment Name: At_Guard_Cells_P Parameter: Harvest Date Value: 7/19/2002
  misc_feature: MA Experiment 20000496 PARAMETER Experiment Name: At_Guard_Cells_P Parameter: Organism Value: Canola
  misc_feature: MA Experiment 20000496 PARAMETER Experiment Name: At_Guard_Cells_P Parameter: Tissue Value: Guard Cells vs. Leaves
  misc_feature: MA Experiment ID: 20000794 Result: Down-regulated in Transcription
  misc_feature: MA Experiment 20000794 PARAMETER Experiment Name: At_Petals_P Parameter: Age (day) Value: 23-25 days
  misc_feature: MA Experiment 20000794 PARAMETER Experiment Name: At_Petals_P Parameter: Plant Line Value: WS
  misc_feature: MA Experiment 20000794 PARAMETER Experiment Name: At_Petals_P Parameter: Tissue Value: Petals vs. Whole plant
  misc_feature: MA Experiment ID: 20001905 Result: Down-regulated in Transcription
  misc_feature: MA Experiment 20001905 PARAMETER Experiment Name: At_Drought_Reproduction_P Parameter: Age (day) Value: 40
  misc_feature: MA Experiment 20001905 PARAMETER Experiment Name: At_Drought_Reproduction_P Parameter: Organism Value: A. thaliana
  misc_feature: MA Experiment 20001905 PARAMETER Experiment Name: At_Drought_Reproduction_P Parameter: Plant Line Value: WS
  misc_feature: MA Experiment 20001905 PARAMETER Experiment Name: At_Drought_Reproduction_P Parameter: Timepoint (day) Value: 10
  misc_feature: MA Experiment 20001905 PARAMETER Experiment Name: At_Drought_Reproduction_P Parameter: Tissue Value: Rosettes
  misc_feature: MA Experiment 20001905 PARAMETER Experiment Name: At_Drought_Reproduction_P Parameter: Treatment Value: Drought vs. No Drought
ggtgagaaactcgatggcgaggaggcgacgttcatcggcggcggagagtttgaaacggcggaacgacggatacgagtcactgtgtcaagtcgtacaacaagattcagatcggagactcatcaccattttcgtaatcttcttcattgtgattcccgccgtttcgattgctgtgtacaaagtcaaattcgctgatcgagtcatccaaacggaatcatcaatacgtcaaaagggaatcgttaaaactgatattaatttccaagaaatcctcactgaacattccaaggcttcagagaattcaactaggcactatgattatccagtgttagcttacattactccatggaactctaaaggctatgatatggcaaagatattcaactcaaagtttacacatttatcgccggtatggtacgacctgaagagccaagggtctggattggttttggaagggagacataatgctgataagggatggattcaagagcttcggtcaagaggcaatgcactgatattaccaagagttgttctagaagcaattcctggggagatgcttaacaaaaaaaaactaagagagaaagctatcagtcttattgtcacagagtgcaaggaaatggaatacaatggtatcgtgttagagtcttggtcaaggtgggcagcttatggcgttttgcatgaccctgatttgcggaaaatggcactgaaattcgtaaaacaacttggagacgctcttcactcaacgagctcaccaagaaacaaccagcaacatatgcagttcatgtatgtcgttggtccgcctcgttcagagaagctccaaataaccctggccccaatgctcctgtcaagtggatagatttaactctcaagctcctgcttgggtcatccaacaacatagactcaaacatagccaggaaggttcttcttggtatcaacttttacggcaacgattttgtaatctctggagattcaggaggtggaggagcaatcaccggaagggattacctcgcattactccagaaacacaagccaactttccgttgggataaagagagcggcgaacatcttttcatgtatagagatgataagaacatcaagcatgctgttttctatcctacattgatgtcaatccttctacggcttgagaatgctcgtctctggggaatcggcatttcaatctgggaaatcggacaaggtttagattatttctttgatctattgtaagttccatacattgcatcatgttatgttttcttaatgttatacttgatcctctttgttcacttaaatcaaatgctgaggaaccttttgtatctagtctagtctctgttctttgtgttc

SEQ ID NO: 77862 - protein, 282 aa, Arabidopsis thaliana
  peptide (1)..(282): Ceres Seq. ID no. 12580884
  misc_feature (217)..(272): Pfam Name: Glycosyl hydrolases family 18 Pfam Description: Glycosyl hydrolases family 18
  misc_feature (5)..(272): Homolog of NCBI NO: 15234049 NR Description: glycosyl hydrolase family 18; protein id: [Arabidopsis thaliana] >gi|25407076|pir||G85013 hypothetical
  misc_feature (1)..(272): Homolog of NCBI NO: 7485232 NR Description: hypothetical protein A_IG002N01.31 - Arabidopsis >gi|2191152|gb|AAB61039.1| A_IG002N01.31 gene product
  misc_feature (5)..(282): Homolog of NCBI NO: 22135960 NR Description: unknown protein [Arabidopsis thaliana]
  misc_feature (68)..(270): Homolog of NCBI NO: 34912746 NR Description: B1040D09.22 [Oryza sativa (japonica
  misc_feature (68)..(270): Homolog of NCBI NO: 11034671 NR Description: P0407B12.10 [Oryza sativa (japonica
  misc_feature (69)..(247): Homolog of NCBI NO: 14585861 NR Description: hypothetical protein SB139 [Homo sapiens]
  misc_feature (69)..(224): Homolog of NCBI NO: 12652527 NR Description: Unknown (protein for MGC:3234) [Homo sapiens]
  misc_feature (69)..(224): Homolog of NCBI NO: 22761484 NR Description: unnamed protein product [Homo sapiens]
  misc_feature (52)..(224): Homolog of NCBI NO: 13905168 NR Description: Similar to hypothetical protein MGC3234 [Mus
  misc_feature (69)..(224): Homolog of NCBI NO: 13182739 NR Description: GL008 [Homo sapiens]
VRNSMARRRRSSAAESLKRRNDGYESLCQVVQQDSDRRLITIFVIFFIVIPAVSIAVYKVKFADRVIQTESSIRQKGIVKTDINFQEILTEHSKASENSTRHYDYPVLAYITPWNSKGYDMAKIFNSKFTHLSPVWYDLKSQGSGLVLEGRHNADKGWIQELRSRGNALILPRVVLEAIPGEMLNKKKLREKAISLIVTECKEMEYNGIVLESWSRWAAYGVLHDPDLRKMALKFVKQLGDALHSTSSPRNNQQHMQFMYVVGPPRSEKLQITLAPMLLSSG

SEQ ID NO: 77863 - protein, 278 aa, Arabidopsis thaliana
  peptide (1)..(278): Ceres Seq. ID no. 12580885
  misc_feature (213)..(268): Pfam Name: Glycosyl hydrolases family 18 Pfam Description: Glycosyl hydrolases family 18
  misc_feature (1)..(268): Homolog of NCBI NO: 15234049 NR Description: glycosyl hydrolase family 18; protein id: [Arabidopsis thaliana] >gi|25407076|pir||G85013 hypothetical
  misc_feature (1)..(268): Homolog of NCBI NO: 7485232 NR Description: hypothetical protein A_IG002N01.31 - Arabidopsis >gi|2191152|gb|AAB61039.1| A_IG002N01.31 gene product
  misc_feature (1)..(278): Homolog of NCBI NO: 22135960 NR Description: unknown protein [Arabidopsis thaliana]
  misc_feature (64)..(266): Homolog of NCBI NO: 34912746 NR Description: B1040D09.22 [Oryza sativa (japonica
  misc_feature (64)..(266): Homolog of NCBI NO: 11034671 NR Description: P0407B12.10 [Oryza sativa (japonica
  misc_feature (65)..(243): Homolog of NCBI NO: 14585861 NR Description: hypothetical protein SB139 [Homo sapiens]
  misc_feature (65)..(220): Homolog of NCBI NO: 12652527 NR Description: Unknown (protein for MGC:3234) [Homo sapiens]
  misc_feature (65)..(220): Homolog of NCBI NO: 22761484 NR Description: unnamed protein product [Homo sapiens]
  misc_feature (48)..(220): Homolog of NCBI NO: 13905168 NR Description: Similar to hypothetical protein MGC3234 [Mus
  misc_feature (65)..(220): Homolog of NCBI NO: 13182739 NR Description: GL008 [Homo sapiens]
MARRRRSSAAESLKRRNDGYESLCQVVQQDSDRRLITIFVIFFIVIPAVSIAVYKVKFADRVIQTESSIRQKGIVKTDINFQEILTEHSKASENSTRHYDYPVLAYITPWNSKGYDMAKIFNSKFTHLSPVWYDLKSQGSGLVLEGRHNADKGWIQELRSRGNALILPRVVLEAIPGEMLNKKKLREKAISLIVTECKEMEYNGIVLESWSRWAAYGVLHDPDLRKMALKFVKQLGDALHSTSSPRNNQQHMQFMYVVGPPRSEKLQITLAPMLLSSG

SEQ ID NO: 77864 - protein, 162 aa, Arabidopsis thaliana
  peptide (1)..(162): Ceres Seq. ID no. 12580886
  misc_feature (97)..(152): Pfam Name: Glycosyl hydrolases family 18 Pfam Description: Glycosyl hydrolases family 18
  misc_feature (1)..(152): Homolog of NCBI NO: 15234049 NR Description: glycosyl hydrolase family 18; protein id: [Arabidopsis thaliana] >gi|25407076|pir||G85013 hypothetical
  misc_feature (1)..(152): Homolog of NCBI NO: 7485232 NR Description: hypothetical protein A_IG002N01.31 - Arabidopsis >gi|2191152|gb|AAB61039.1| A_IG002N01.31 gene product
  misc_feature (1)..(162): Homolog of NCBI NO: 22135960 NR Description: unknown protein [Arabidopsis thaliana]
  misc_feature (1)..(150): Homolog of NCBI NO: 34912746 NR Description: B1040D09.22 [Oryza sativa (japonica
  misc_feature (1)..(150): Homolog of NCBI NO: 11034671 NR Description: P0407B12.10 [Oryza sativa (japonica
  misc_feature (1)..(127): Homolog of NCBI NO: 14585861 NR Description: hypothetical protein SB139 [Homo sapiens]
  misc_feature (1)..(104): Homolog of NCBI NO: 12652527 NR Description: Unknown (protein for MGC:3234) [Homo sapiens]
  misc_feature (1)..(104): Homolog of NCBI NO: 22761484 NR Description: unnamed protein product [Homo sapiens]
  misc_feature (1)..(104): Homolog of NCBI NO: 13905168 NR Description: Similar to hypothetical protein MGC3234 [Mus
  misc_feature (1)..(104): Homolog of NCBI NO: 13182739 NR Description: GL008 [Homo sapiens]
MAKIFNSKFTHLSPVWYDLKSQGSGLVLEGRHNADKGWIQELRSRGNALILPRVVLEAIPGEMLNKKKLREKAISLIVTECKEMEYNGIVLESWSRWAAYGVLHDPDLRKMALKFVKQLGDALHSTSSPRNNQQHMQFMYVVGPPRSEKLQITLAPMLLSSG

SEQ ID NO: 77865 - DNA, 1959 bp, Arabidopsis thaliana
  misc_feature (1)..(1959): Ceres Seq. ID no. 12580899
  misc_feature: MA Experiment ID: 20000327 Result: Down-regulated in Transcription
  misc_feature: MA Experiment 20000327 PARAMETER Experiment Name: At_42deg_Heat_Sub_P Parameter: Age (day) Value: 14
  misc_feature: MA Experiment 20000327 PARAMETER Experiment Name: At_42deg_Heat_Sub_P Parameter: Organism Value: A. thaliana
  misc_feature: MA Experiment 20000327 PARAMETER Experiment Name: At_42deg_Heat_Sub_P Parameter: Plant Line Value: WS
  misc_feature: MA Experiment 20000327 PARAMETER Experiment Name: At_42deg_Heat_Sub_P Parameter: Temperature (deg C) Value: 42 vs. 22
  misc_feature: MA Experiment 20000327 PARAMETER Experiment Name: At_42deg_Heat_Sub_P Parameter: Timepoint (hr) Value: 1
  misc_feature: MA Experiment 20000327 PARAMETER Experiment Name: At_42deg_Heat_Sub_P Parameter: Tissue Value: Aerial
agaaaacacagtttaaaggaacataaaaagcaactcttttgagagatcacagaaaccctaatttgctaagaaccctaatctcaatttccatcttccaaagttcagattctgtatgtaaatgcatctgaagaattctactgtagcagaacggcggtacatcggaaaagaaaccgccggttatttaacttcttcctccgatttggatccgaaacctaagattaaacatcatcgtcctcttcaggtacctgagattttgactccagacattggtgctggtgctggattcagtgtgtataataatcaagttcaagctcagagtcgtcatcatctgacggttgaaatcccagattcatcgtctcacaatcttacatctaagagacctgtggtggttcaatcttctaatccgttcaacgttgacgatttccgaagacaacaacgcgcaagcttgggtccgatttcatcttattgtccgtcgtatcttttatcgtggttttcttcttctcttccatcgatccatcggccactaatcagaagcttctccgtcatgttcttagagtccgtttgatatgtttccatcttcgtttcttacttcttctctctgttcctcctctctacatcttcttcttgttgattagtttcagattcttccttctctttgtcttctcgattatcgctttttctttcgtcctttcgatctctctcaaattcgctcttcctcacttaccatcgattcgtttgattatcgctcggttactttctctcaagcttacccctaccagatcatcctcttcatctcaggagaacactaaacatgttatttggtcaattgggtctaagcctgtgactgagaagaagaccagctctggctcatgggttcagaagtacagctctggtgatgtatacgagggagagtttcatagggggaagtgttcaggaagtggagtttattactattctatgaagggtaaatacgaaggggattggattgatgggaagtatgatggatatggagttgaaacttgggctaaagggagtaggtaccgaggtcaatacaggcaagggatgagacatggaactggtatctacagattttatacaggggatgtatatgctggtgagtggtctaatggacagagccatggctgtggtgtgtatacctctgaggatggtagtcgttttgttggagagtttaaatggggtgtcaaacatggccttggtcattatcatttcagaaatggtgatacatatgctggggagtattttgcagacaggatgcatggttttggagtgtatcaatttggaaacgggcatcggtatgaaggagcctggcatgaggggagaaggcaaggacttggtatgtacacgttcaggaatggtgagacacaggcaggccattgggaagacggagttcttaactgtcctaccgagcagaccactcgccctgattcatcgttttccatcagtcattccaaggttgtcgacactgtccagcaagcaaggaaagcagccaagaaagcacgcgaagttgtgaaagttgaagagagagtgaacagagcagtgatggtcgcaaaccgagcagcaaatgctgctagagttgctgctacaaaggctgtccaaacccaaacatttcattgtagtagtggtgacgatcccttgtgagttcctgcggcaaagattttgacataatcgcagtcatgaccttacctcgaacttctacgaagacagaagagtgaaagagagatgtttagagacagcgtcagaattcgcaatctccgttgagattttcttgaaggtgaaccacttggaaccaatgtcgagatctcataagtaataagtaagagatctggctatggagcaagtattacaggtttactttttcttttctcccacttgttttatgagcaggctggtttaaaactgtacatatgttgttgaagagtaagcaatgtgtgttaacaa

SEQ ID NO: 77866 - protein, 233 aa, Arabidopsis thaliana
  peptide (1)..(233): Ceres Seq. ID no. 12580900
  misc_feature (5)..(27): Pfam Name: MORN repeat Pfam Description: MORN repeat
  misc_feature (1)..(233): Homolog of NCBI NO: 21928129 NR Description: AT4g17080/dl4570w [Arabidopsis thaliana]
  misc_feature (1)..(233): Homolog of NCBI NO: 15235967 NR Description: hypothetical protein; protein id: At4g17080.1
  misc_feature (1)..(230): Homolog of NCBI NO: 18403768 NR Description: expressed protein; protein id: At2g35170.1, by cDNA: gi_16604413, supported by cDNA: gi_19699213 [Arabidopsis >gi|25370691|pir||E84765 hypothetical protein At2g35170
  misc_feature (1)..(233): Homolog of NCBI NO: 37536922 NR Description: putative phosphatidylinositol-4-phosphate
  misc_feature (1)..(222): Homolog of NCBI NO: 15219142 NR Description: phosphatidylinositol-4-phosphate 5-kinase, protein id: At1g21920.1, supported by cDNA: 37462., supported by gi_13878044 [Arabidopsis thaliana]
  misc_feature (1)..(222): Homolog of NCBI NO: 21593251 NR Description: phosphatidylinositol-4-phosphate 5-kinase,
  misc_feature (1)..(222): Homolog of NCBI NO: 15217439 NR Description: unknown protein; protein id: At1g77660.1
  misc_feature (1)..(149): Homolog of NCBI NO: 40062709 NR Description: MORN repeat protein [uncultured bacterium 314]
  misc_feature (1)..(150): Homolog of NCBI NO: 40062709 NR Description: MORN repeat protein [uncultured bacterium 314]
  misc_feature (1)..(150): Homolog of NCBI NO: 40062709 NR Description: MORN repeat protein [uncultured bacterium 314]
MKGKYEGDWIDGKYDGYGVETWAKGSRYRGQYRQGMRHGTGIYRFYTGDVYAGEWSNGQSHGCGVYTSEDGSRFVGEFKWGVKHGLGHYHFRNGDTYAGEYFADRMHGFGVYQFGNGHRYEGAWHEGRRQGLGMYTFRNGETQAGHWEDGVLNCPTEQTTRPDSSFSISHSKVVDTVQQARKAAKKAREVVKVEERVNRAVMVANRAANAARVAATKAVQTQTFHCSSGDDPL

SEQ ID NO: 77867 - protein, 198 aa, Arabidopsis thaliana
  peptide (1)..(198): Ceres Seq. ID no. 12580901
  misc_feature (1)..(198): Homolog of NCBI NO: 21928129 NR Description: AT4g17080/dl4570w [Arabidopsis thaliana]
  misc_feature (1)..(198): Homolog of NCBI NO: 15235967 NR Description: hypothetical protein; protein id: At4g17080.1
  misc_feature (1)..(195): Homolog of NCBI NO: 18403768 NR Description: expressed protein; protein id: At2g35170.1, by cDNA: gi_16604413, supported by cDNA: gi_19699213 [Arabidopsis >gi|25370691|pir||E84765 hypothetical protein At2g35170
  misc_feature (1)..(198): Homolog of NCBI NO: 37536922 NR Description: putative phosphatidylinositol-4-phosphate
  misc_feature (1)..(187): Homolog of NCBI NO: 15219142 NR Description: phosphatidylinositol-4-phosphate 5-kinase, protein id: At1g21920.1, supported by cDNA: 37462., supported by gi_13878044 [Arabidopsis thaliana]
  misc_feature (1)..(187): Homolog of NCBI NO: 21593251 NR Description: phosphatidylinositol-4-phosphate 5-kinase,
  misc_feature (1)..(187): Homolog of NCBI NO: 15217439 NR Description: unknown protein; protein id: At1g77660.1
  misc_feature (1)..(114): Homolog of NCBI NO: 40062709 NR Description: MORN repeat protein [uncultured bacterium 314]
  misc_feature (1)..(115): Homolog of NCBI NO: 40062709 NR Description: MORN repeat protein [uncultured bacterium 314]
  misc_feature (1)..(115): Homolog of NCBI NO: 40062709 NR Description: MORN repeat protein [uncultured bacterium 314]
MRHGTGIYRFYTGDVYAGEWSNGQSHGCGVYTSEDGSRFVGEFKWGVKHGLGHYHFRNGDTYAGEYFADRMHGFGVYQFGNGHRYEGAWHEGRRQGLGMYTFRNGETQAGHWEDGVLNCPTEQTTRPDSSFSISHSKVVDTVQQARKAAKKAREVVKVEERVNRAVMVANRAANAARVAATKAVQTQTFHCSSGDDPL

SEQ ID NO: 77868 - protein, 153 aa, Arabidopsis thaliana
  peptide (1)..(153): Ceres Seq. ID no. 12580902
MELVSTDFIQGMYMLVSGLMDRAMAVVCIPLRMVVVLLESLNGVSNMALVIIISEMVIHMLGSILQTGCMVLECINLETGIGMKEPGMRGEGKDLVCTRSGMVRHRQAIGKTEFLTVLPSRPLALIHRFPSVIPRLSTLSSKQGKQPRKHAKL

SEQ ID NO: 77869 - DNA, 1553 bp, Arabidopsis thaliana
  misc_feature (1)..(1553): Ceres Seq. ID no. 12580903
  misc_feature: MA Experiment ID: 20000185 Result: Down-regulated in Transcription
  misc_feature: MA Experiment 20000185 PARAMETER Experiment Name: At_Roots__P Parameter: Age (day) Value: 7 vs. 21
  misc_feature: MA Experiment 20000185 PARAMETER Experiment Name: At_Roots__P Parameter: Organism Value: A. thaliana
  misc_feature: MA Experiment 20000185 PARAMETER Experiment Name: At_Roots__P Parameter: Tissue Value: Roots vs. Whole Plant
  misc_feature: MA Experiment ID: 20000234 Result: Down-regulated in Transcription
  misc_feature: MA Experiment 20000234 PARAMETER Experiment Name: At_Siliques_P Parameter: Age (day) Value: 21
  misc_feature: MA Experiment 20000234 PARAMETER Experiment Name: At_Siliques_P Parameter: Organism Value: A. thaliana
  misc_feature: MA Experiment 20000234 PARAMETER Experiment Name: At_Siliques_P Parameter: Plant Line Value: WS
  misc_feature: MA Experiment 20000234 PARAMETER Experiment Name: At_Siliques_P Parameter: Tissue Value: Less Than 5mm Siliques vs. Whole Plant
  misc_feature: MA Experiment ID: 20000235 Result: Down-regulated in Transcription
  misc_feature: MA Experiment 20000235 PARAMETER Experiment Name: At_Siliques_P Parameter: Age (day) Value: 21
  misc_feature: MA Experiment 20000235 PARAMETER Experiment Name: At_Siliques_P Parameter: Organism Value: A. thaliana
  misc_feature: MA Experiment 20000235 PARAMETER Experiment Name: At_Siliques_P Parameter: Plant Line Value: WS
  misc_feature: MA Experiment 20000235 PARAMETER Experiment Name: At_Siliques_P Parameter: Tissue Value: 5-10mm Siliques vs. Whole Plant
  misc_feature: MA Experiment ID: 20000264 Result: Down-regulated in Transcription
  misc_feature: MA Experiment 20000264 PARAMETER Experiment Name: At_Open_Flower_P Parameter: Age (day) Value: 21
  misc_feature: MA Experiment 20000264 PARAMETER Experiment Name: At_Open_Flower_P Parameter: Plant Line Value: WS
  misc_feature: MA Experiment 20000264 PARAMETER Experiment Name: At_Open_Flower_P Parameter: Tissue Value: Open Flower vs. Whole Plant
  misc_feature: MA Experiment ID: 20000265 Result: Down-regulated in Transcription
  misc_feature: MA Experiment 20000265 PARAMETER Experiment Name: At_Open_Flower_P Parameter: Age (day) Value: 21
  misc_feature: MA Experiment 20000265 PARAMETER Experiment Name: At_Open_Flower_P Parameter: Plant Line Value: WS
  misc_feature: MA Experiment 20000265 PARAMETER Experiment Name: At_Open_Flower_P Parameter: Tissue Value: Closed Flower vs. Whole Plant
  misc_feature: MA Experiment ID: 20000286 Result: Down-regulated in Transcription
  misc_feature: MA Experiment 20000286 PARAMETER Experiment Name: At_Open_Flower_P Parameter: Age (day) Value: 21
  misc_feature: MA Experiment 20000286 PARAMETER Experiment Name: At_Open_Flower_P Parameter: Plant Line Value: WS
  misc_feature: MA Experiment 20000286 PARAMETER Experiment Name: At_Open_Flower_P Parameter: Tissue Value: Half Open vs. Whole Plant
  misc_feature: MA Experiment ID: 20000437 Result: Down-regulated in Transcription
  misc_feature: MA Experiment 20000437 PARAMETER Experiment Name: At_Drought_P Parameter: Age (day) Value: 8
  misc_feature: MA Experiment 20000437 PARAMETER Experiment Name: At_Drought_P Parameter: Organism Value: A. thaliana
  misc_feature: MA Experiment 20000437 PARAMETER Experiment Name: At_Drought_P Parameter: Plant Line Value: WS
  misc_feature: MA Experiment 20000437 PARAMETER Experiment Name: At_Drought_P Parameter: Timepoint (hr) Value: 24
  misc_feature: MA Experiment 20000437 PARAMETER Experiment Name: At_Drought_P Parameter: Tissue Value: Whole Plant
  misc_feature: MA Experiment 20000437 PARAMETER Experiment Name: At_Drought_P Parameter: Treatment Value: Drought vs. No Drought
  misc_feature: MA Experiment ID: 20000439 Result: Down-regulated in Transcription
  misc_feature: MA Experiment 20000439 PARAMETER Experiment Name: At_Roots__P Parameter: Age (day) Value: 14 vs. 21
  misc_feature: MA Experiment 20000439 PARAMETER Experiment Name: At_Roots__P Parameter: Organism Value: A. thaliana
  misc_feature: MA Experiment 20000439 PARAMETER Experiment Name: At_Roots__P Parameter: Tissue Value: Roots vs. Whole Plant
  misc_feature: MA Experiment ID: 20000441 Result: Up-regulated in Transcription
  misc_feature: MA Experiment 20000441 PARAMETER Experiment Name: At_1uM_BR-BRZ__P Parameter: Tissue Value: Shoot Apices
  misc_feature: MA Experiment 20000441 PARAMETER Experiment Name: At_1uM_BR-BRZ__P Parameter: Treatment Value: 1uM BR vs. No Treatment
  misc_feature: MA Experiment ID: 20000451 Result: Up-regulated in Transcription
  misc_feature: MA Experiment 20000451 PARAMETER Experiment Name: At_CS6879_Shoots-Roots_P Parameter: Age (day) Value: 14
  misc_feature: MA Experiment 20000451 PARAMETER Experiment Name: At_CS6879_Shoots-Roots_P Parameter: Organism Value: A. thaliana
  misc_feature: MA Experiment 20000451 PARAMETER Experiment Name: At_CS6879_Shoots-Roots_P Parameter: Plant Line Value: CS6879 vs. WS
  misc_feature: MA Experiment 20000451 PARAMETER Experiment Name: At_CS6879_Shoots-Roots_P Parameter: Tissue Value: Roots
  misc_feature: MA Experiment ID: 20000452 Result: Up-regulated in Transcription
  misc_feature: MA Experiment 20000452 PARAMETER Experiment Name: At_CS6879_Shoots-Roots_P Parameter: Age (day) Value: 14
  misc_feature: MA Experiment 20000452 PARAMETER Experiment Name: At_CS6879_Shoots-Roots_P Parameter: Organism Value: A. thaliana
  misc_feature: MA Experiment 20000452 PARAMETER Experiment Name: At_CS6879_Shoots-Roots_P Parameter: Plant Line Value: CS6879 vs. WS
  misc_feature: MA Experiment 20000452 PARAMETER Experiment Name: At_CS6879_Shoots-Roots_P Parameter: Tissue Value: Shoots
  misc_feature: MA Experiment ID: 20000794 Result: Down-regulated in Transcription
  misc_feature: MA Experiment 20000794 PARAMETER Experiment Name: At_Petals_P Parameter: Age (day) Value: 23-25 days
  misc_feature: MA Experiment 20000794 PARAMETER Experiment Name: At_Petals_P Parameter: Plant Line Value: WS
  misc_feature: MA Experiment 20000794 PARAMETER Experiment Name: At_Petals_P Parameter: Tissue Value: Petals vs. Whole plant
  misc_feature: MA Experiment ID: 20001451 Result: Up-regulated in Transcription
  misc_feature: MA Experiment 20001451 PARAMETER Experiment Name: At_Far-red-induction_P Parameter: Age (day) Value: 7
  misc_feature: MA Experiment 20001451 PARAMETER Experiment Name: At_Far-red-induction_P Parameter: Light Value: Far-red vs. White
  misc_feature: MA Experiment 20001451 PARAMETER Experiment Name: At_Far-red-induction_P Parameter: Organism Value: A. thaliana
  misc_feature: MA Experiment 20001451 PARAMETER Experiment Name: At_Far-red-induction_P Parameter: Plant Line Value: Columbia
  misc_feature: MA Experiment 20001451 PARAMETER Experiment Name: At_Far-red-induction_P Parameter: Timepoint (hr) Value: 24
  misc_feature: MA Experiment 20001451 PARAMETER Experiment Name: At_Far-red-induction_P Parameter: Tissue Value: Whole Plant
  misc_feature: MA Experiment ID: 20001557 Result: Down-regulated in Transcription
  misc_feature: MA Experiment 20001557 PARAMETER Experiment Name: At_Drought_Soil_Dry_P Parameter: Age (day) Value: 27
  misc_feature: MA Experiment 20001557 PARAMETER Experiment Name: At_Drought_Soil_Dry_P Parameter: Organism Value: A. thaliana
  misc_feature: MA Experiment 20001557 PARAMETER Experiment Name: At_Drought_Soil_Dry_P Parameter: Plant Line Value: WS
  misc_feature: MA Experiment 20001557 PARAMETER Experiment Name: At_Drought_Soil_Dry_P Parameter: Post Timepoint (hr) Value: 3
  misc_feature: MA Experiment 20001557 PARAMETER Experiment Name: At_Drought_Soil_Dry_P Parameter: Post-Treatment Value: Re-Water vs. No Drought
  misc_feature: MA Experiment 20001557 PARAMETER Experiment Name: At_Drought_Soil_Dry_P Parameter: Timepoint (day) Value: 13
  misc_feature: MA Experiment 20001557 PARAMETER Experiment Name: At_Drought_Soil_Dry_P Parameter: Treatment Value: Drought vs. No Drought
  misc_feature: MA Experiment ID: 20001558 Result: Down-regulated in Transcription
  misc_feature: MA Experiment 20001558 PARAMETER Experiment Name: At_Drought_Soil_Dry_P Parameter: Age (day) Value: 27
  misc_feature: MA Experiment 20001558 PARAMETER Experiment Name: At_Drought_Soil_Dry_P Parameter: Organism Value: A. thaliana
  misc_feature: MA Experiment 20001558 PARAMETER Experiment Name: At_Drought_Soil_Dry_P Parameter: Plant Line Value: WS
  misc_feature: MA Experiment 20001558 PARAMETER Experiment Name: At_Drought_Soil_Dry_P Parameter: Post Timepoint (hr) Value: 6
  misc_feature: MA Experiment 20001558 PARAMETER Experiment Name: At_Drought_Soil_Dry_P Parameter: Post-Treatment Value: Re-Water vs. No Drought
  misc_feature: MA Experiment 20001558 PARAMETER Experiment Name: At_Drought_Soil_Dry_P Parameter: Timepoint (day) Value: 13
  misc_feature: MA Experiment 20001558 PARAMETER Experiment Name: At_Drought_Soil_Dry_P Parameter: Treatment Value: Drought vs. No Drought
  misc_feature: MA Experiment ID: 20001757 Result: Up-regulated in Transcription
  misc_feature: MA Experiment 20001757 PARAMETER Experiment Name: At_50mM_NH4NO3_L-to-H_P Parameter: Timepoint (hr) Value: 6
  misc_feature: MA Experiment 20001757 PARAMETER Experiment Name: At_50mM_NH4NO3_L-to-H_P Parameter: Tissue Value: Leaf
  misc_feature: MA Experiment 20001757 PARAMETER Experiment Name: At_50mM_NH4NO3_L-to-H_P Parameter: Treatment Value: 50mM NH4NO3 vs 100mM Mannitol
  misc_feature: MA Experiment ID: 20001904 Result: Down-regulated in Transcription
  misc_feature: MA Experiment 20001904 PARAMETER Experiment Name: At_Drought_Reproduction_P Parameter: Age (day) Value: 37
  misc_feature: MA Experiment 20001904 PARAMETER Experiment Name: At_Drought_Reproduction_P Parameter: Organism Value: A. thaliana
  misc_feature: MA Experiment 20001904 PARAMETER Experiment Name: At_Drought_Reproduction_P Parameter: Plant Line Value: WS
  misc_feature: MA Experiment 20001904 PARAMETER Experiment Name: At_Drought_Reproduction_P Parameter: Timepoint (day) Value: 7
  misc_feature: MA Experiment 20001904 PARAMETER Experiment Name: At_Drought_Reproduction_P Parameter: Tissue Value: Rosettes
  misc_feature: MA Experiment 20001904 PARAMETER Experiment Name: At_Drought_Reproduction_P Parameter: Treatment Value: Drought vs. No Drought
  misc_feature: MA Experiment ID: 20001905 Result: Down-regulated in Transcription
  misc_feature: MA Experiment 20001905 PARAMETER Experiment Name: At_Drought_Reproduction_P Parameter: Age (day) Value: 40
  misc_feature: MA Experiment 20001905 PARAMETER Experiment Name: At_Drought_Reproduction_P Parameter: Organism Value: A. thaliana
  misc_feature: MA Experiment 20001905 PARAMETER Experiment Name: At_Drought_Reproduction_P Parameter: Plant Line Value: WS
  misc_feature: MA Experiment 20001905 PARAMETER Experiment Name: At_Drought_Reproduction_P Parameter: Timepoint (day) Value: 10
  misc_feature: MA Experiment 20001905 PARAMETER Experiment Name: At_Drought_Reproduction_P Parameter: Tissue Value: Rosettes
  misc_feature: MA Experiment 20001905 PARAMETER Experiment Name: At_Drought_Reproduction_P Parameter: Treatment Value: Drought vs. No Drought
  misc_feature: MA Experiment ID: 20001911 Result: Up-regulated in Transcription
  misc_feature: MA Experiment 20001911 PARAMETER Experiment Name: At_Drought_Reproduction_P Parameter: Age (day) Value: 40
  misc_feature: MA Experiment 20001911 PARAMETER Experiment Name: At_Drought_Reproduction_P Parameter: Organism Value: A. thaliana
  misc_feature: MA Experiment 20001911 PARAMETER Experiment Name: At_Drought_Reproduction_P Parameter: Plant Line Value: WS
  misc_feature: MA Experiment 20001911 PARAMETER Experiment Name: At_Drought_Reproduction_P Parameter: Timepoint (day) Value: 10
  misc_feature: MA Experiment 20001911 PARAMETER Experiment Name: At_Drought_Reproduction_P Parameter: Tissue Value: Flowers
  misc_feature: MA Experiment 20001911 PARAMETER Experiment Name: At_Drought_Reproduction_P Parameter: Treatment Value: Drought vs. No Drought
ctcgactcctcccagcgcttcaatatctcccaagacccaaccatcggagggagggggcgagatgatgggattgagttccttggtctttaccgagtttcacagcctcggcttctctgaccttatagtttttgttgcgccactctggattgctgtggctgccggtgttttggttggttgggtttggaggcccaagtgggcttatctcgattctaaactcttgtccaattcacctaaattcctcaatcttcagcttcccacttccatcctcaaaacttcttctcaccacgttaaccccagcctttcttccaaagagaaaactgggtttgtaacggacgatgattttaggcatctatggaagttggttgaggtcaaagatggcggtccttgttggattcaaatgatggaccgatcaaccccaaccttctcatatcaagcttggaggcgagatcctgagaatgggcctccccagtaccgtagcagaactgtgtttgaggatgccactcccgagatggtcagggacttcttttgggatgatgagttccgttccaagtgggatgatatgcttttgtattcttctactctcgagcgttgcaaggacacgggcactatggttgtgcaatgggtgcgaaagttccccttcttttgtagcgacagggagtatattataggccgtcgtatatgggatgctggccgagtcttttactgcattactaagggagtacaatacccgtctgtacctagacaaaacaagccaaggcgagtcgacttgtactattcaagctggtgtatccgtgcagttgaatcaaaaagaggcgatggtgagatgacatcatgtgaggtactactatttcaccatgaagatatgggaataccgtgggagattgcaaagcttggggtgagacagggtatgtggggtgcagtcaagaagattgagccaggcctacgtgcatatcagagggctaaagcagcgggagcaggtttatccccgagtgccataatggctcacatcaacaccaaagtgagtgcagaggagttcatgaatgagaggggttcgatagcagaggttacaggagacaagccgacggggaaaaacataccaaagatactagtggtaggaggggcgattgcacttgcatgtacattggacaaagggctgttgacaaaggcggtgatattcggagtagccagaagatttgcaagaatgggaaaaaggatgtaggagagagtgtacatgtaagtagacagagaacgaatgagggaatgagagaggtgaaaagactatctctttagtcattgtcttgctggatgtatcaatcatgtaatagcaaagagaaaaagaagcgagagttattctttcagtgttgaatttctgagagcgcggaaagatagttccaccgcgctgtgctaatgaacatctccgtcttttcttgtctaagtttctgatggagtgaaggtaatagaaattataaaaacaaacacgagaggaagatattaaactgattttgcttcttctcaatcgttctaagttccatagagttctcacaattttcagt

SEQ ID NO: 77870 - protein, 405 aa, Arabidopsis thaliana
  peptide (1)..(405): Ceres Seq. ID no. 12580904
  misc_feature (157)..(236): Pfam Name: START domain Pfam Description: START domain
  misc_feature (21)..(405): Homolog of NCBI NO: 15217736 NR Description: membrane related protein CP5, putative; protein
  misc_feature (21)..(405): Homolog of NCBI NO: 22135902 NR Description: membrane related protein CP5, putative thaliana] >gi|23197608|gb|AAN15331.1| membrane related protein
  misc_feature (21)..(405): Homolog of NCBI NO: 4741929 NR Description: membrane related protein CP5 [Arabidopsis
  misc_feature (68)..(404): Homolog of NCBI NO: 18033654 NR Description: putative nodule membrane protein [Medicago sativa]
  misc_feature (36)..(88): Homolog of NCBI NO: 18033654 NR Description: putative nodule membrane protein [Medicago sativa]
  misc_feature (39)..(404): Homolog of NCBI NO: 38344869 NR Description: OSJNBa0020P07.12 [Oryza sativa (japonica
  misc_feature (48)..(404): Homolog of NCBI NO: 10178166 NR Description: membrane related protein-like [Arabidopsis
  misc_feature (102)..(404): Homolog of NCBI NO: 18423599 NR Description: membrane related protein-like; protein id: supported by cDNA: 37644., supported by cDNA: gi_19423949
  misc_feature (48)..(87): Homolog of NCBI NO: 18423599 NR Description: membrane related protein-like; protein id: supported by cDNA: 37644., supported by cDNA: gi_19423949
  misc_feature (109)..(404): Homolog of NCBI NO: 21593272 NR Description: membrane related protein-like [Arabidopsis
STPPSASISPKTQPSEGGGEMMGLSSLVFTEFHSLGFSDLIVFVAPLWIAVAAGVLVGWVWRPKWAYLDSKLLSNSPKFLNLQLPTSILKTSSHHVNPSLSSKEKTGFVTDDDFRHLWKLVEVKDGGPCWIQMMDRSTPTFSYQAWRRDPENGPPQYRSRTVFEDATPEMVRDFFWDDEFRSKWDDMLLYSSTLERCKDTGTMVVQWVRKFPFFCSDREYIIGRRIWDAGRVFYCITKGVQYPSVPRQNKPRRVDLYYSSWCIRAVESKRGDGEMTSCEVLLFHHEDMGIPWEIAKLGVRQGMWGAVKKIEPGLRAYQRAKAAGAGLSPSAIMAHINTKVSAEEFMNERGSIAEVTGDKPTGKNIPKILVVGGAIALACTLDKGLLTKAVIFGVARRFARMGKRM

SEQ ID NO: 77871 - protein, 385 aa, Arabidopsis thaliana
  peptide (1)..(385): Ceres Seq. ID no. 12580905
  misc_feature (137)..(216): Pfam Name: START domain Pfam Description: START domain
  misc_feature (1)..(385): Homolog of NCBI NO: 15217736 NR Description: membrane related protein CP5, putative; protein
  misc_feature (1)..(385): Homolog of NCBI NO: 22135902 NR Description: membrane related protein CP5, putative thaliana] >gi|23197608|gb|AAN15331.1| membrane related protein
  misc_feature (1)..(385): Homolog of NCBI NO: 4741929 NR Description: membrane related protein CP5 [Arabidopsis
  misc_feature (48)..(384): Homolog of NCBI NO: 18033654 NR Description: putative nodule membrane protein [Medicago sativa]
  misc_feature (16)..(68): Homolog of NCBI NO: 18033654 NR Description: putative nodule membrane protein [Medicago sativa]
  misc_feature (19)..(384): Homolog of NCBI NO: 38344869 NR Description: OSJNBa0020P07.12 [Oryza sativa (japonica
  misc_feature (28)..(384): Homolog of NCBI NO: 10178166 NR Description: membrane related protein-like [Arabidopsis
  misc_feature (82)..(384): Homolog of NCBI NO: 18423599 NR Description: membrane related protein-like; protein id: supported by cDNA: 37644., supported by cDNA: gi_19423949
  misc_feature (28)..(67): Homolog of NCBI NO: 18423599 NR Description: membrane related protein-like; protein id: supported by cDNA: 37644., supported by cDNA: gi_19423949
  misc_feature (89)..(384): Homolog of NCBI NO: 21593272 NR Description: membrane related protein-like [Arabidopsis
MMGLSSLVFTEFHSLGFSDLIVFVAPLWIAVAAGVLVGWVWRPKWAYLDSKLLSNSPKFLNLQLPTSILKTSSHHVNPSLSSKEKTGFVTDDDFRHLWKLVEVKDGGPCWIQMMDRSTPTFSYQAWRRDPENGPPQYRSRTVFEDATPEMVRDFFWDDEFRSKWDDMLLYSSTLERCKDTGTMVVQWVRKFPFFCSDREYIIGRRIWDAGRVFYCITKGVQYPSVPRQNKPRRVDLYYSSWCIRAVESKRGDGEMTSCEVLLFHHEDMGIPWEIAKLGVRQGMWGAVKKIEPGLRAYQRAKAAGAGLSPSAIMAHINTKVSAEEFMNERGSIAEVTGDKPTGKNIPKILVVGGAIALACTLDKGLLTKAVIFGVARRFARMGKRM

SEQ ID NO: 77872 - protein, 384 aa, Arabidopsis thaliana
  peptide (1)..(384): Ceres Seq. ID no. 12580906
  misc_feature (136)..(215): Pfam Name: START domain Pfam Description: START domain
  misc_feature (1)..(384): Homolog of NCBI NO: 15217736 NR Description: membrane related protein CP5, putative; protein
  misc_feature (1)..(384): Homolog of NCBI NO: 22135902 NR Description: membrane related protein CP5, putative thaliana] >gi|23197608|gb|AAN15331.1| membrane related protein
  misc_feature (1)..(384): Homolog of NCBI NO: 4741929 NR Description: membrane related protein CP5 [Arabidopsis
  misc_feature (47)..(383): Homolog of NCBI NO: 18033654 NR Description: putative nodule membrane protein [Medicago sativa]
  misc_feature (15)..(67): Homolog of NCBI NO: 18033654 NR Description: putative nodule membrane protein [Medicago sativa]
  misc_feature (18)..(383): Homolog of NCBI NO: 38344869 NR Description: OSJNBa0020P07.12 [Oryza sativa (japonica
  misc_feature (27)..(383): Homolog of NCBI NO: 10178166 NR Description: membrane related protein-like [Arabidopsis
  misc_feature (81)..(383): Homolog of NCBI NO: 18423599 NR Description: membrane related protein-like; protein id: supported by cDNA: 37644., supported by cDNA: gi_19423949
  misc_feature (27)..(66): Homolog of NCBI NO: 18423599 NR Description: membrane related protein-like; protein id: supported by cDNA: 37644., supported by cDNA: gi_19423949
  misc_feature (88)..(383): Homolog of NCBI NO: 21593272 NR Description: membrane related protein-like [Arabidopsis
MGLSSLVFTEFHSLGFSDLIVFVAPLWIAVAAGVLVGWVWRPKWAYLDSKLLSNSPKFLNLQLPTSILKTSSHHVNPSLSSKEKTGFVTDDDFRHLWKLVEVKDGGPCWIQMMDRSTPTFSYQAWRRDPENGPPQYRSRTVFEDATPEMVRDFFWDDEFRSKWDDMLLYSSTLERCKDTGTMVVQWVRKFPFFCSDREYIIGRRIWDAGRVFYCITKGVQYPSVPRQNKPRRVDLYYSSWCIRAVESKRGDGEMTSCEVLLFHHEDMGIPWEIAKLGVRQGMWGAVKKIEPGLRAYQRAKAAGAGLSPSAIMAHINTKVSAEEFMNERGSIAEVTGDKPTGKNIPKILVVGGAIALACTLDKGLLTKAVIFGVARRFARMGKRM

SEQ ID NO: 77873 - DNA, 1694 bp, Arabidopsis thaliana
  misc_feature (1)..(1694): Ceres Seq. ID no. 12580919
  misc_feature: MA Experiment ID: 108434 Result: Down-regulated in Transcription
  misc_feature: MA Experiment 108434 PARAMETER Experiment Name: At_Root_Tips_cDNA_P Parameter: Tissue Value: Root Tips
  misc_feature: MA Experiment ID: 108463 Result: Up-regulated in Transcription
  misc_feature: MA Experiment 108463 PARAMETER Experiment Name: At_Germinating_Seeds_cDNA_P Parameter: Age (day) Value: 3 vs. 0
  misc_feature: MA Experiment 108463 PARAMETER Experiment Name: At_Germinating_Seeds_cDNA_P Parameter: Tissue Value: Germinating Seeds
  misc_feature: MA Experiment ID: 108464 Result: Up-regulated in Transcription
  misc_feature: MA Experiment 108464 PARAMETER Experiment Name: At_Germinating_Seeds_cDNA_P Parameter: Age (day) Value: 4 vs. 0
  misc_feature: MA Experiment 108464 PARAMETER Experiment Name: At_Germinating_Seeds_cDNA_P Parameter: Tissue Value: Germinating Seeds
  misc_feature: MA Experiment ID: 108473 Result: Up-regulated in Transcription
  misc_feature: MA Experiment 108473 PARAMETER Experiment Name: At_Drought_Flowers_cDNA_P Parameter: Timepoint (hr) Value: 7 d
  misc_feature: MA Experiment 108473 PARAMETER Experiment Name: At_Drought_Flowers_cDNA_P Parameter: Tissue Value: Flower
  misc_feature: MA Experiment 108473 PARAMETER Experiment Name: At_Drought_Flowers_cDNA_P Parameter: Treatment Value: Drought vs. No Drought
  misc_feature: MA Experiment ID: 108561 Result: Up-regulated in Transcription
  misc_feature: MA Experiment 108561 PARAMETER Experiment Name: At_100uM_ABA_cDNA_P Parameter: Timepoint (hr) Value: 6
  misc_feature: MA Experiment 108561 PARAMETER Experiment Name: At_100uM_ABA_cDNA_P Parameter: Tissue Value: Aerial
  misc_feature: MA Experiment 108561 PARAMETER Experiment Name: At_100uM_ABA_cDNA_P Parameter: Treatment Value: 100uM ABA vs. No Treatment
  misc_feature: MA Experiment ID: 108572 Result: Up-regulated in Transcription
  misc_feature: MA Experiment 108572 PARAMETER Experiment Name: At_Drought_cDNA_P Parameter: Timepoint (hr) Value: 1
  misc_feature: MA Experiment 108572 PARAMETER Experiment Name: At_Drought_cDNA_P Parameter: Tissue Value: Aerial
  misc_feature: MA Experiment 108572 PARAMETER Experiment Name: At_Drought_cDNA_P Parameter: Treatment Value: Drought vs. No Drought
  misc_feature: MA Experiment ID: 108573 Result: Up-regulated in Transcription
  misc_feature: MA Experiment 108573 PARAMETER Experiment Name: At_Drought_cDNA_P Parameter: Timepoint (hr) Value: 6
  misc_feature: MA Experiment 108573 PARAMETER Experiment Name: At_Drought_cDNA_P Parameter: Tissue Value: Aerial
  misc_feature: MA Experiment 108573 PARAMETER Experiment Name: At_Drought_cDNA_P Parameter: Treatment Value: Drought vs. No Drought
  misc_feature: MA Experiment ID: 108574 Result: Up-regulated in Transcription
  misc_feature: MA Experiment 108574 PARAMETER Experiment Name: At_Wounding__cDNA_P Parameter: Timepoint (hr) Value: 1
  misc_feature: MA Experiment 108574 PARAMETER Experiment Name: At_Wounding__cDNA_P Parameter: Tissue Value: Aerial
  misc_feature: MA Experiment 108574 PARAMETER Experiment Name: At_Wounding__cDNA_P Parameter: Treatment Value: Wounding vs. No Wounding
  misc_feature: MA Experiment ID: 108585 Result: Up-regulated in Transcription
  misc_feature: MA Experiment 108585 PARAMETER Experiment Name: At_5mM_NaNP_cDNA_P Parameter: Timepoint (hr) Value: 6
  misc_feature: MA Experiment 108585 PARAMETER Experiment Name: At_5mM_NaNP_cDNA_P Parameter: Tissue Value: Aerial
  misc_feature: MA Experiment 108585 PARAMETER Experiment Name: At_5mM_NaNP_cDNA_P Parameter: Treatment Value: null
  misc_feature: MA Experiment ID: 108595 Result: Up-regulated in Transcription
  misc_feature: MA Experiment 108595 PARAMETER Experiment Name: At_Ler-pi_Ovule_cDNA_P Parameter: Plant Line Value: null
  misc_feature: MA Experiment ID: 108605 Result: Up-regulated in Transcription
  misc_feature: MA Experiment 108605 PARAMETER Experiment Name: At_100uM_ABA_cDNA_P Parameter: Timepoint (hr) Value: 6
  misc_feature: MA Experiment 108605 PARAMETER Experiment Name: At_100uM_ABA_cDNA_P Parameter: Tissue Value: Aerial
  misc_feature: MA Experiment 108605 PARAMETER Experiment Name: At_100uM_ABA_cDNA_P Parameter: Treatment Value: 100uM ABA vs. No Treatment
  misc_feature: MA Experiment ID: 108607 Result: Up-regulated in Transcription
  misc_feature: MA Experiment 108607 PARAMETER Experiment Name: At_100uM_ABA_cDNA_P Parameter: Timepoint (hr) Value: 4
  misc_feature: MA Experiment 108607 PARAMETER Experiment Name: At_100uM_ABA_cDNA_P Parameter: Tissue Value: Aerial
  misc_feature: MA Experiment 108607 PARAMETER Experiment Name: At_100uM_ABA_cDNA_P Parameter: Treatment Value: 100uM ABA vs. No Treatment
  misc_feature: MA Experiment ID: 108608 Result: Up-regulated in Transcription
  misc_feature: MA Experiment 108608 PARAMETER Experiment Name: At_100uM_ABA_cDNA_P Parameter: Timepoint (hr) Value: 1
  misc_feature: MA Experiment 108608 PARAMETER Experiment Name: At_100uM_ABA_cDNA_P Parameter: Tissue Value: Aerial
  misc_feature: MA Experiment 108608 PARAMETER Experiment Name: At_100uM_ABA_cDNA_P Parameter: Treatment Value: 100uM ABA vs. No Treatment
  misc_feature: MA Experiment ID: 108609 Result: Up-regulated in Transcription
  misc_feature: MA Experiment 108609 PARAMETER Experiment Name: At_100uM_ABA_cDNA_P Parameter: Timepoint (hr) Value: 24
  misc_feature: MA Experiment 108609 PARAMETER Experiment Name: At_100uM_ABA_cDNA_P Parameter: Tissue Value: Aerial
  misc_feature: MA Experiment 108609 PARAMETER Experiment Name: At_100uM_ABA_cDNA_P Parameter: Treatment Value: 100uM ABA vs. No Treatment
  misc_feature: MA Experiment ID: 108668 Result: Up-regulated in Transcription
  misc_feature: MA Experiment 108668 PARAMETER Experiment Name: At_2mM_SA_cDNA_P Parameter: Plant Line Value: WS
  misc_feature: MA Experiment 108668 PARAMETER Experiment Name: At_2mM_SA_cDNA_P Parameter: Timepoint (hr) Value: 6
  misc_feature: MA Experiment 108668 PARAMETER Experiment Name: At_2mM_SA_cDNA_P Parameter: Treatment Value: 2mM SA vs. No Treatment
  misc_feature: MA Experiment ID: 20000069 Result: Up-regulated in Transcription
  misc_feature: MA Experiment 20000069 PARAMETER Experiment Name: At_100uM_ABA_Mutants_cDNA_P Parameter: Plant Line Value: CS23
  misc_feature: MA Experiment 20000069 PARAMETER Experiment Name: At_100uM_ABA_Mutants_cDNA_P Parameter: Timepoint (hr) Value: 6
  misc_feature: MA Experiment 20000069 PARAMETER Experiment Name: At_100uM_ABA_Mutants_cDNA_P Parameter: Tissue Value: Aerial
  misc_feature: MA Experiment 20000069 PARAMETER Experiment Name: At_100uM_ABA_Mutants_cDNA_P Parameter: Treatment Value: 100uM ABA vs. No Treatment
  misc_feature: MA Experiment ID: 20000070 Result: Up-regulated in Transcription
  misc_feature: MA Experiment 20000070 PARAMETER Experiment Name: At_100uM_ABA_Mutants_cDNA_P Parameter: Plant Line Value: CS24
  misc_feature: MA Experiment 20000070 PARAMETER Experiment Name: At_100uM_ABA_Mutants_cDNA_P Parameter: Timepoint (hr) Value: 6
  misc_feature: MA Experiment 20000070 PARAMETER Experiment Name: At_100uM_ABA_Mutants_cDNA_P Parameter: Tissue Value: Aerial
  misc_feature: MA Experiment 20000070 PARAMETER Experiment Name: At_100uM_ABA_Mutants_cDNA_P Parameter: Treatment Value: 100uM ABA vs. No Treatment
  misc_feature: MA Experiment ID: 20000072 Result: Up-regulated in Transcription
  misc_feature: MA Experiment 20000072 PARAMETER Experiment Name: At_100uM_ABA_Mutants_cDNA_P Parameter: Plant Line Value: CS8105
  misc_feature: MA Experiment 20000072 PARAMETER Experiment Name: At_100uM_ABA_Mutants_cDNA_P Parameter: Timepoint (hr) Value: 6
  misc_feature: MA Experiment 20000072 PARAMETER Experiment Name: At_100uM_ABA_Mutants_cDNA_P Parameter: Tissue Value: Aerial
  misc_feature: MA Experiment 20000072 PARAMETER Experiment Name: At_100uM_ABA_Mutants_cDNA_P Parameter: Treatment Value: 100uM ABA vs. No Treatment
  misc_feature: MA Experiment ID: 20000086 Result: Up-regulated in Transcription
  misc_feature: MA Experiment 20000086 PARAMETER Experiment Name: At_100uM_ABA_Mutants_cDNA_P Parameter: Plant Line Value: CS22
  misc_feature: MA Experiment 20000086 PARAMETER Experiment Name: At_100uM_ABA_Mutants_cDNA_P Parameter: Timepoint (hr) Value: 6
  misc_feature: MA Experiment 20000086 PARAMETER Experiment Name: At_100uM_ABA_Mutants_cDNA_P Parameter: Tissue Value: Aerial
  misc_feature: MA Experiment 20000086 PARAMETER Experiment Name: At_100uM_ABA_Mutants_cDNA_P Parameter: Treatment Value: 100uM ABA vs. No Treatment
  misc_feature: MA Experiment ID: 20000087 Result: Up-regulated in Transcription
  misc_feature: MA Experiment 20000087 PARAMETER Experiment Name: At_100uM_ABA_Mutants_cDNA_P Parameter: Plant Line Value: WS
  misc_feature: MA Experiment 20000087 PARAMETER Experiment Name: At_100uM_ABA_Mutants_cDNA_P Parameter: Timepoint (hr) Value: 6
  misc_feature: MA Experiment 20000087 PARAMETER Experiment Name: At_100uM_ABA_Mutants_cDNA_P Parameter: Tissue Value: Aerial
  misc_feature: MA Experiment 20000087 PARAMETER Experiment Name: At_100uM_ABA_Mutants_cDNA_P Parameter: Treatment Value: 100uM ABA vs. No Treatment
  misc_feature: MA Experiment ID: 20000088 Result: Up-regulated in Transcription
  misc_feature: MA Experiment 20000088 PARAMETER Experiment Name: At_100uM_ABA_Mutants_cDNA_P Parameter: Plant Line Value: Landsberg
  misc_feature: MA Experiment 20000088 PARAMETER Experiment Name: At_100uM_ABA_Mutants_cDNA_P Parameter: Timepoint (hr) Value: 6
  misc_feature: MA Experiment 20000088 PARAMETER Experiment Name: At_100uM_ABA_Mutants_cDNA_P Parameter: Tissue Value: Aerial
  misc_feature: MA Experiment 20000088 PARAMETER Experiment Name: At_100uM_ABA_Mutants_cDNA_P Parameter: Treatment Value: 100uM ABA vs. No Treatment
  misc_feature: MA Experiment ID: 20000117 Result: Up-regulated in Transcription
  misc_feature: MA Experiment 20000117 PARAMETER Experiment Name: At_100uM_ABA_Mutants_cDNA_P Parameter: Plant Line Value: Columbia
  misc_feature: MA Experiment 20000117 PARAMETER Experiment Name: At_100uM_ABA_Mutants_cDNA_P Parameter: Timepoint (hr) Value: 6
  misc_feature: MA Experiment 20000117 PARAMETER Experiment Name: At_100uM_ABA_Mutants_cDNA_P Parameter: Tissue Value: Aerial
  misc_feature: MA Experiment 20000117 PARAMETER Experiment Name: At_100uM_ABA_Mutants_cDNA_P Parameter: Treatment Value: 100uM ABA vs. No Treatment
  misc_feature: MA Experiment ID: 20000144 Result: Down-regulated in Transcription
  misc_feature: MA Experiment 20000144 PARAMETER Experiment Name: At_42deg_Heat_cDNA_P Parameter: Temperature (deg C) Value: 42 vs. 22
  misc_feature: MA Experiment 20000144 PARAMETER Experiment Name: At_42deg_Heat_cDNA_P Parameter: Timepoint (hr) Value: 1
  misc_feature: MA Experiment 20000144 PARAMETER Experiment Name: At_42deg_Heat_cDNA_P Parameter: Tissue Value: Aerial
  misc_feature: MA Experiment ID: 20000166 Result: Up-regulated in Transcription
  misc_feature: MA Experiment 20000166 PARAMETER Experiment Name: At_100uM_ABA_P Parameter: Age (day) Value: 14
  misc_feature: MA Experiment 20000166 PARAMETER Experiment Name: At_100uM_ABA_P Parameter: Organism Value: A. thaliana
  misc_feature: MA Experiment 20000166 PARAMETER Experiment Name: At_100uM_ABA_P Parameter: Plant Line Value: WS
  misc_feature: MA Experiment 20000166 PARAMETER Experiment Name: At_100uM_ABA_P Parameter: Timepoint (hr) Value: 1
  misc_feature: MA Experiment 20000166 PARAMETER Experiment Name: At_100uM_ABA_P Parameter: Tissue Value: Aerial
  misc_feature: MA Experiment 20000166 PARAMETER Experiment Name: At_100uM_ABA_P Parameter: Treatment Value: 100uM ABA vs. No Treatment
  misc_feature: MA Experiment ID: 20000169 Result: Up-regulated in Transcription
  misc_feature: MA Experiment 20000169 PARAMETER Experiment Name: At_100uM_ABA_P Parameter: Age (day) Value: 14
  misc_feature: MA Experiment 20000169 PARAMETER Experiment Name: At_100uM_ABA_P Parameter: Organism Value: A. thaliana
  misc_feature: MA Experiment 20000169 PARAMETER Experiment Name: At_100uM_ABA_P Parameter: Plant Line Value: WS
  misc_feature: MA Experiment 20000169 PARAMETER Experiment Name: At_100uM_ABA_P Parameter: Timepoint (hr) Value: 6
  misc_feature: MA Experiment 20000169 PARAMETER Experiment Name: At_100uM_ABA_P Parameter: Tissue Value: Aerial
  misc_feature: MA Experiment 20000169 PARAMETER Experiment Name: At_100uM_ABA_P Parameter: Treatment Value: 100uM ABA vs. No Treatment
  misc_feature: MA Experiment ID: 20000171 Result: Down-regulated in Transcription
  misc_feature: MA Experiment 20000171 PARAMETER Experiment Name: At_42deg_Heat_P Parameter: Age (day) Value: 14
  misc_feature: MA Experiment 20000171 PARAMETER Experiment Name: At_42deg_Heat_P Parameter: Organism Value: A. thaliana
  misc_feature: MA Experiment 20000171 PARAMETER Experiment Name: At_42deg_Heat_P Parameter: Plant Line Value: WS
  misc_feature: MA Experiment 20000171 PARAMETER Experiment Name: At_42deg_Heat_P Parameter: Temperature (deg C) Value: 42 vs. 22
  misc_feature: MA Experiment 20000171 PARAMETER Experiment Name: At_42deg_Heat_P Parameter: Timepoint (hr) Value: 1
  misc_feature: MA Experiment 20000171 PARAMETER Experiment Name: At_42deg_Heat_P Parameter: Tissue Value: Aerial
  misc_feature: MA Experiment ID: 20000173 Result: Down-regulated in Transcription
  misc_feature: MA Experiment 20000173 PARAMETER Experiment Name: At_42deg_Heat_P Parameter: Age (day) Value: 14
  misc_feature: MA Experiment 20000173 PARAMETER Experiment Name: At_42deg_Heat_P Parameter: Organism Value: A. thaliana
  misc_feature: MA Experiment 20000173 PARAMETER Experiment Name: At_42deg_Heat_P Parameter: Plant Line Value: WS
  misc_feature: MA Experiment 20000173 PARAMETER Experiment Name: At_42deg_Heat_P Parameter: Temperature (deg C) Value: 42 vs. 22
  misc_feature: MA Experiment 20000173 PARAMETER Experiment Name: At_42deg_Heat_P Parameter: Timepoint (hr) Value: 6
  misc_feature: MA Experiment 20000173 PARAMETER Experiment Name: At_42deg_Heat_P Parameter: Tissue Value: Aerial
  misc_feature: MA Experiment ID: 20000180 Result: Up-regulated in Transcription
  misc_feature: MA Experiment 20000180 PARAMETER Experiment Name: At_Germinating_Seeds_P Parameter: Age (hr) Value: 24 vs. 0
  misc_feature: MA Experiment 20000180 PARAMETER Experiment Name: At_Germinating_Seeds_P Parameter: Tissue Value: Germinating Seeds
  misc_feature: MA Experiment ID: 20000182 Result: Up-regulated in Transcription
  misc_feature: MA Experiment 20000182 PARAMETER Experiment Name: At_2mM_SA_P Parameter: Age (day) Value: 14
  misc_feature: MA Experiment 20000182 PARAMETER Experiment Name: At_2mM_SA_P Parameter: Organism Value: A. thaliana
  misc_feature: MA Experiment 20000182 PARAMETER Experiment Name: At_2mM_SA_P Parameter: Plant Line Value: WS
  misc_feature: MA Experiment 20000182 PARAMETER Experiment Name: At_2mM_SA_P Parameter: Timepoint (hr) Value: 6
  misc_feature: MA Experiment 20000182 PARAMETER Experiment Name: At_2mM_SA_P Parameter: Tissue Value: Aerial
  misc_feature: MA Experiment 20000182 PARAMETER Experiment Name: At_2mM_SA_P Parameter: Treatment Value: 2mM SA vs. No Treatment
  misc_feature: MA Experiment ID: 20000184 Result: Down-regulated in Transcription
  misc_feature: MA Experiment 20000184 PARAMETER Experiment Name: At_Shoots__P Parameter: Age (day) Value: 7
  misc_feature: MA Experiment 20000184 PARAMETER Experiment Name: At_Shoots__P Parameter: Tissue Value: Shoots vs. Whole Plant
  misc_feature: MA Experiment ID: 20000185 Result: Up-regulated in Transcription
  misc_feature: MA Experiment 20000185 PARAMETER Experiment Name: At_Roots__P Parameter: Age (day) Value: 7 vs. 21
  misc_feature: MA Experiment 20000185 PARAMETER Experiment Name: At_Roots__P Parameter: Organism Value: A. thaliana
  misc_feature: MA Experiment 20000185 PARAMETER Experiment Name: At_Roots__P Parameter: Tissue Value: Roots vs. Whole Plant
  misc_feature: MA Experiment ID: 20000213 Result: Up-regulated in Transcription
  misc_feature: MA Experiment 20000213 PARAMETER Experiment Name: At_4deg_Cold_P Parameter: Timepoint (hr) Value: 2
  misc_feature: MA Experiment ID: 20000267 Result: Up-regulated in Transcription
  misc_feature: MA Experiment 20000267 PARAMETER Experiment Name: At_Drought_P Parameter: Age (day) Value: 7
  misc_feature: MA Experiment 20000267 PARAMETER Experiment Name: At_Drought_P Parameter: Organism Value: A. thaliana
  misc_feature: MA Experiment 20000267 PARAMETER Experiment Name: At_Drought_P Parameter: Plant Line Value: WS
  misc_feature: MA Experiment 20000267 PARAMETER Experiment Name: At_Drought_P Parameter: Timepoint (hr) Value: 6
  misc_feature: MA Experiment 20000267 PARAMETER Experiment Name: At_Drought_P Parameter: Tissue Value: Whole Plant
  misc_feature: MA Experiment 20000267 PARAMETER Experiment Name: At_Drought_P Parameter: Treatment Value: Drought vs. No Drought
  misc_feature: MA Experiment ID: 20000436 Result: Up-regulated in Transcription
  misc_feature: MA Experiment 20000436 PARAMETER Experiment Name: At_Drought_P Parameter: Age (day) Value: 7
  misc_feature: MA Experiment 20000436 PARAMETER Experiment Name: At_Drought_P Parameter: Organism Value: A. thaliana
  misc_feature: MA Experiment 20000436 PARAMETER Experiment Name: At_Drought_P Parameter: Plant Line Value: WS
  misc_feature: MA Experiment 20000436 PARAMETER Experiment Name: At_Drought_P Parameter: Timepoint (hr) Value: 12
  misc_feature: MA Experiment 20000436 PARAMETER Experiment Name: At_Drought_P Parameter: Tissue Value: Whole Plant
  misc_feature: MA Experiment 20000436 PARAMETER Experiment Name: At_Drought_P Parameter: Treatment Value: Drought vs. No Drought
  misc_feature: MA Experiment ID: 20000437 Result: Up-regulated in Transcription
  misc_feature: MA Experiment 20000437 PARAMETER Experiment Name: At_Drought_P Parameter: Age (day) Value: 8
  misc_feature: MA Experiment 20000437 PARAMETER Experiment Name: At_Drought_P Parameter: Organism Value: A. thaliana
  misc_feature: MA Experiment 20000437 PARAMETER Experiment Name: At_Drought_P Parameter: Plant Line Value: WS
  misc_feature: MA Experiment 20000437 PARAMETER Experiment Name: At_Drought_P Parameter: Timepoint (hr) Value: 24
  misc_feature: MA Experiment 20000437 PARAMETER Experiment Name: At_Drought_P Parameter: Tissue Value: Whole Plant
  misc_feature: MA Experiment 20000437 PARAMETER Experiment Name: At_Drought_P Parameter: Treatment Value: Drought vs. No Drought
  misc_feature: MA Experiment ID: 20000439 Result: Up-regulated in Transcription
  misc_feature: MA Experiment 20000439 PARAMETER Experiment Name: At_Roots__P Parameter: Age (day) Value: 14 vs. 21
  misc_feature: MA Experiment 20000439 PARAMETER Experiment Name: At_Roots__P Parameter: Organism Value: A. thaliana
  misc_feature: MA Experiment 20000439 PARAMETER Experiment Name: At_Roots__P Parameter: Tissue Value: Roots vs. Whole Plant
  misc_feature: MA Experiment ID: 20000453 Result: Up-regulated in Transcription
  misc_feature: MA Experiment 20000453 PARAMETER Experiment Name: At_100uM_ABA_P Parameter: Age (day) Value: 15
  misc_feature: MA Experiment 20000453 PARAMETER Experiment Name: At_100uM_ABA_P Parameter: Organism Value: A. thaliana
  misc_feature: MA Experiment 20000453 PARAMETER Experiment Name: At_100uM_ABA_P Parameter: Plant Line Value: WS
  misc_feature: MA Experiment 20000453 PARAMETER Experiment Name: At_100uM_ABA_P Parameter: Timepoint (hr) Value: 24
  misc_feature: MA Experiment 20000453 PARAMETER Experiment Name: At_100uM_ABA_P Parameter: Tissue Value: Aerial
  misc_feature: MA Experiment 20000453 PARAMETER Experiment Name: At_100uM_ABA_P Parameter: Treatment Value: 100uM ABA vs. No Treatment
  misc_feature: MA Experiment ID: 20000455 Result: Up-regulated in Transcription
  misc_feature: MA Experiment 20000455 PARAMETER Experiment Name: At_100uM_ABA_P Parameter: Age (day) Value: 16
  misc_feature: MA Experiment 20000455 PARAMETER Experiment Name: At_100uM_ABA_P Parameter: Organism Value: A. thaliana
  misc_feature: MA Experiment 20000455 PARAMETER Experiment Name: At_100uM_ABA_P Parameter: Plant Line Value: WS
  misc_feature: MA Experiment 20000455 PARAMETER Experiment Name: At_100uM_ABA_P Parameter: Timepoint (hr) Value: 48
  misc_feature: MA Experiment 20000455 PARAMETER Experiment Name: At_100uM_ABA_P Parameter: Tissue Value: Aerial
  misc_feature: MA Experiment 20000455 PARAMETER Experiment Name: At_100uM_ABA_P Parameter: Treatment Value: 100uM ABA vs. No Treatment
  misc_feature: MA Experiment ID: 20000794 Result: Up-regulated in Transcription
  misc_feature: MA Experiment 20000794 PARAMETER Experiment Name: At_Petals_P Parameter: Age (day) Value: 23-25 days
  misc_feature: MA Experiment 20000794 PARAMETER Experiment Name: At_Petals_P Parameter: Plant Line Value: WS
  misc_feature: MA Experiment 20000794 PARAMETER Experiment Name: At_Petals_P Parameter: Tissue Value: Petals vs. Whole plant
  misc_feature: MA Experiment ID: 20001247 Result: Up-regulated in Transcription
  misc_feature: MA Experiment 20001247 PARAMETER Experiment Name: At_Far-red-induction_P Parameter: Age (day) Value: 7
  misc_feature: MA Experiment 20001247 PARAMETER Experiment Name: At_Far-red-induction_P Parameter: Light Value: Far-red vs. White
  misc_feature: MA Experiment 20001247 PARAMETER Experiment Name: At_Far-red-induction_P Parameter: Organism Value: A. thaliana
  misc_feature: MA Experiment 20001247 PARAMETER Experiment Name: At_Far-red-induction_P Parameter: Plant Line Value: Columbia
  misc_feature: MA Experiment 20001247 PARAMETER Experiment Name: At_Far-red-induction_P Parameter: Timepoint (hr) Value: 1
  misc_feature: MA Experiment 20001247 PARAMETER Experiment Name: At_Far-red-induction_P Parameter: Tissue Value: Whole Plant
  misc_feature: MA Experiment ID: 20001451 Result: Up-regulated in Transcription
  misc_feature: MA Experiment 20001451 PARAMETER Experiment Name: At_Far-red-induction_P Parameter: Age (day) Value: 7
  misc_feature: MA Experiment 20001451 PARAMETER Experiment Name: At_Far-red-induction_P Parameter: Light Value: Far-red vs. White
  misc_feature: MA Experiment 20001451 PARAMETER Experiment Name: At_Far-red-induction_P Parameter: Organism Value: A. thaliana
  misc_feature: MA Experiment 20001451 PARAMETER Experiment Name: At_Far-red-induction_P Parameter: Plant Line Value: Columbia
  misc_feature: MA Experiment 20001451 PARAMETER Experiment Name: At_Far-red-induction_P Parameter: Timepoint (hr) Value: 24
  misc_feature: MA Experiment 20001451 PARAMETER Experiment Name: At_Far-red-induction_P Parameter: Tissue Value: Whole Plant
  misc_feature: MA Experiment ID: 20001554 Result: Up-regulated in Transcription
  misc_feature: MA Experiment 20001554 PARAMETER Experiment Name: At_Drought_Soil_Dry_P Parameter: Age (day) Value: 21
  misc_feature: MA Experiment 20001554 PARAMETER Experiment Name: At_Drought_Soil_Dry_P Parameter: Organism Value: A. thaliana
  misc_feature: MA Experiment 20001554 PARAMETER Experiment Name: At_Drought_Soil_Dry_P Parameter: Plant Line Value: WS
  misc_feature: MA Experiment 20001554 PARAMETER Experiment Name: At_Drought_Soil_Dry_P Parameter: Post Timepoint (hr) Value: None
  misc_feature: MA Experiment 20001554 PARAMETER Experiment Name: At_Drought_Soil_Dry_P Parameter: Post-Treatment Value: None
  misc_feature: MA Experiment 20001554 PARAMETER Experiment Name: At_Drought_Soil_Dry_P Parameter: Timepoint (day) Value: 7
  misc_feature: MA Experiment 20001554 PARAMETER Experiment Name: At_Drought_Soil_Dry_P Parameter: Treatment Value: Drought vs. No Drought
  misc_feature: MA Experiment ID: 20001555 Result: Up-regulated in Transcription
  misc_feature: MA Experiment 20001555 PARAMETER Experiment Name: At_Drought_Soil_Dry_P Parameter: Age (day) Value: 24
  misc_feature: MA Experiment 20001555 PARAMETER Experiment Name: At_Drought_Soil_Dry_P Parameter: Organism Value: A. thaliana
  misc_feature: MA Experiment 20001555 PARAMETER Experiment Name: At_Drought_Soil_Dry_P Parameter: Plant Line Value: WS
  misc_feature: MA Experiment 20001555 PARAMETER Experiment Name: At_Drought_Soil_Dry_P Parameter: Post Timepoint (hr) Value: None
  misc_feature: MA Experiment 20001555 PARAMETER Experiment Name: At_Drought_Soil_Dry_P Parameter: Post-Treatment Value: None
  misc_feature: MA Experiment 20001555 PARAMETER Experiment Name: At_Drought_Soil_Dry_P Parameter: Timepoint (day) Value: 10
  misc_feature: MA Experiment 20001555 PARAMETER Experiment Name: At_Drought_Soil_Dry_P Parameter: Treatment Value: Drought vs. No Drought
  misc_feature: MA Experiment ID: 20001905 Result: Up-regulated in Transcription
  misc_feature: MA Experiment 20001905 PARAMETER Experiment Name: At_Drought_Reproduction_P Parameter: Age (day) Value: 40
  misc_feature: MA Experiment 20001905 PARAMETER Experiment Name: At_Drought_Reproduction_P Parameter: Organism Value: A. thaliana
  misc_feature: MA Experiment 20001905 PARAMETER Experiment Name: At_Drought_Reproduction_P Parameter: Plant Line Value: WS
  misc_feature: MA Experiment 20001905 PARAMETER Experiment Name: At_Drought_Reproduction_P Parameter: Timepoint (day) Value: 10
  misc_feature: MA Experiment 20001905 PARAMETER Experiment Name: At_Drought_Reproduction_P Parameter: Tissue Value: Rosettes
  misc_feature: MA Experiment 20001905 PARAMETER Experiment Name: At_Drought_Reproduction_P Parameter: Treatment Value: Drought vs. No Drought
  misc_feature: MA Experiment ID: 20001906 Result: Up-regulated in Transcription
  misc_feature: MA Experiment 20001906 PARAMETER Experiment Name: At_Drought_Reproduction_P Parameter: Age (day) Value: 35
  misc_feature: MA Experiment 20001906 PARAMETER Experiment Name: At_Drought_Reproduction_P Parameter: Organism Value: A. thaliana
  misc_feature: MA Experiment 20001906 PARAMETER Experiment Name: At_Drought_Reproduction_P Parameter: Plant Line Value: WS
  misc_feature: MA Experiment 20001906 PARAMETER Experiment Name: At_Drought_Reproduction_P Parameter: Timepoint (day) Value: 5
  misc_feature: MA Experiment 20001906 PARAMETER Experiment Name: At_Drought_Reproduction_P Parameter: Tissue Value: Siliques
  misc_feature: MA Experiment 20001906 PARAMETER Experiment Name: At_Drought_Reproduction_P Parameter: Treatment Value: Drought vs. No Drought
aaaacaataatccagccaccgtaggggtaattccgtaaatttgtaacagaaactccattcccgcggcgtatgcagagggcaatcccgtaaacttaacccatctccggtgatgaataatatcaattccttcacgccggagtgattttccacaaaaaataagatatgaaagcaaatcgcggcggcggagagcacggccaacacgaggctctaaagctttccagtttcttcttcatgccggagcggccacgtgattacctcgtgcttttcacacgtttctccgtcctcacgtgcctcatcgtctccgtatctcttgttctccgcgccacttttttatccccttccgctcgagactattccaccacctacggtctcaaattaaccgccgtacctcaaaaagccatagctctccctccgtccgcatccgtcggaccaaccaatatctcccatatcttcttctctatcgccggagcagctgagacatggatcgatcggagccagtacatctccttatggtggcgaaacacgacacgtggcttcgtctggctcgatgaaccggtgaaaatccctgaaaatcactccgatgtcagattctcgatcccgactcgagtttctgatccaggctggactcgattcaaattctccagctcaagagccgcggttcgaatcgctcgtataatctgggatagttatcggttaaatctaccaaatgtccggtggttcgtcatgggagatgacgataccgtcttcttcaccgagaatctcgtcaaggttctctcaaagtacgaccacgagcagatgtggtacatcggaggaaactcagagagcgtcgagcaagacgtgatgcacgcgtacgatatggcgtttggcggcggtggtttcgctctgagccgtccattagcggcgcgtttggccgccgcgatggatgattgtctccaacgttatttctatttttacggttctgatcagagaatcgcgtcttgcatcagcgagatcggcgttccgttcaccgaagaacgcggttttcatcagcttgacataagaggagatccatacgggtttctagcggcgcatccattggcaccgcttgtatcgttgcatcaccttgtttacttagacccaatgttccctaacaaaaacccgatcgagtcgttacagaccctaatgaaaccttataccttagacccgaatcgaatactccaacagattaattgtcatgatcgcaaacgtcaatggtctatatccatctcttggggatacaccattcagatatacacttacttcttgactgctacggagctgactacgccgttgcagaccttcaaaacttggcggtcttccagcgatggacctttcgtgtttaacactcggcccttgaaacctgacccctgtgagcgtccggtcacttatttcatggatggtgccgaggatgtacgggatagtgggacgaaaacttggtatagcataggggataagaactatggtcattgcggaaagattgagcatactcgattaactaaagtgaagaggatattggtgacttcaatgaagacggatcctgagtattggaacaaggcaccgaggagacagtgttgtgaggtgatggaaggaaaagtaggaaaaagaaaagagaaagaaatgttgttaaggattagaaaatgcagatctttggagaagatataaaaaaagcgttttaa

SEQ ID NO: 77874 - protein, 505 aa, Arabidopsis thaliana; identical to SEQ ID NO: 30704
  peptide (1)..(505): Ceres Seq. ID no. 12580920
  misc_feature (224)..(478): Pfam Name: Protein of unknown function, DUF604 Pfam Description: Protein of unknown function, DUF604
  misc_feature (1)..(505): Homolog of NCBI NO: 15229746 NR Description: unknown protein; protein id: At3g11420.1
  misc_feature (27)..(505): Homolog of NCBI NO: 18404516 NR Description: putative zinc finger protein; protein id: [Arabidopsis thaliana] >gi|7459605|pir||T02539 hypothetical
  misc_feature (74)..(292): Homolog of NCBI NO: 34902078 NR Description: unknown protein [Oryza sativa (japonica
  misc_feature (282)..(499): Homolog of NCBI NO: 34902078 NR Description: unknown protein [Oryza sativa (japonica
  misc_feature (85)..(503): Homolog of NCBI NO: 37536418 NR Description: hypothetical protein [Oryza sativa (japonica group)] >gi|22002140|gb|AAM88624.1| hypothetical protein [Oryza
  misc_feature (91)..(503): Homolog of NCBI NO: 15529153 NR Description: AT4g23490/F16G20_190 [Arabidopsis thaliana]
  misc_feature (91)..(503): Homolog of NCBI NO: 18416156 NR Description: Expressed protein; protein id: At4g23490.1, by cDNA: gi_15529152 [Arabidopsis thaliana]
  misc_feature (73)..(483): Homolog of NCBI NO: 15238082 NR Description: putative protein; protein id: At5g41460.1 thaliana] >gi|9758054|dbj|BAB08517.1|
  misc_feature (5)..(503): Homolog of NCBI NO: 32488507 NR Description: OSJNBa0011J08.14 [Oryza sativa (japonica
  misc_feature (91)..(503): Homolog of NCBI NO: 15223433 NR Description: hypothetical protein; protein id: At1g01570.1

SEQ ID NO: 77875 - protein, 482 aa, Arabidopsis thaliana; identical to SEQ ID NO: 30705
  peptide (1)..(482): Ceres Seq. ID no. 12580921
  misc_feature (201)..(455): Pfam Name: Protein of unknown function, DUF604 Pfam Description: Protein of unknown function, DUF604
  misc_feature (1)..(482): Homolog of NCBI NO: 15229746 NR Description: unknown protein; protein id: At3g11420.1
  misc_feature (4)..(482): Homolog of NCBI NO: 18404516 NR Description: putative zinc finger protein; protein id: [Arabidopsis thaliana] >gi|7459605|pir||T02539 hypothetical
  misc_feature (51)..(269): Homolog of NCBI NO: 34902078 NR Description: unknown protein [Oryza sativa (japonica
  misc_feature (259)..(476): Homolog of NCBI NO: 34902078 NR Description: unknown protein [Oryza sativa (japonica
  misc_feature (62)..(480): Homolog of NCBI NO: 37536418 NR Description: hypothetical protein [Oryza sativa (japonica group)] >gi|22002140|gb|AAM88624.1| hypothetical protein [Oryza
  misc_feature (68)..(480): Homolog of NCBI NO: 15529153 NR Description: AT4g23490/F16G20_190 [Arabidopsis thaliana]
  misc_feature (68)..(480): Homolog of NCBI NO: 18416156 NR Description: Expressed protein; protein id: At4g23490.1, by cDNA: gi_15529152 [Arabidopsis thaliana]
  misc_feature (50)..(460): Homolog of NCBI NO: 15238082 NR Description: putative protein; protein id: At5g41460.1 thaliana] >gi|9758054|dbj|BAB08517.1|
  misc_feature (1)..(480): Homolog of NCBI NO: 32488507 NR Description: OSJNBa0011J08.14 [Oryza sativa (japonica
  misc_feature (68)..(480): Homolog of NCBI NO: 15223433 NR Description: hypothetical protein; protein id: At1g01570.1

SEQ ID NO: 77876 - protein, 318 aa, Arabidopsis thaliana; identical to SEQ ID NO: 30706
  peptide (1)..(318): Ceres Seq. ID no. 12580922
  misc_feature (37)..(291): Pfam Name: Protein of unknown function, DUF604 Pfam Description: Protein of unknown function, DUF604
  misc_feature (1)..(318): Homolog of NCBI NO: 15229746 NR Description: unknown protein; protein id: At3g11420.1
  misc_feature (1)..(318): Homolog of NCBI NO: 18404516 NR Description: putative zinc finger protein; protein id: [Arabidopsis thaliana] >gi|7459605|pir||T02539 hypothetical
  misc_feature (1)..(105): Homolog of NCBI NO: 34902078 NR Description: unknown protein [Oryza sativa (japonica
  misc_feature (95)..(312): Homolog of NCBI NO: 34902078 NR Description: unknown protein [Oryza sativa (japonica
  misc_feature (1)..(316): Homolog of NCBI NO: 37536418 NR Description: hypothetical protein [Oryza sativa (japonica group)] >gi|22002140|gb|AAM88624.1| hypothetical protein [Oryza
  misc_feature (1)..(316): Homolog of NCBI NO: 15529153 NR Description: AT4g23490/F16G20_190 [Arabidopsis thaliana]
  misc_feature (1)..(316): Homolog of NCBI NO: 18416156 NR Description: Expressed protein; protein id: At4g23490.1, by cDNA: gi_15529152 [Arabidopsis thaliana]
  misc_feature (1)..(296): Homolog of NCBI NO: 15238082 NR Description: putative protein; protein id: At5g41460.1 thaliana] >gi|9758054|dbj|BAB08517.1|
  misc_feature (1)..(316): Homolog of NCBI NO: 32488507 NR Description: OSJNBa0011J08.14 [Oryza sativa (japonica
  misc_feature (1)..(316): Homolog of NCBI NO: 15223433 NR Description: hypothetical protein; protein id: At1g01570.1

SEQ ID NO: 77877 - DNA, 1196 bp, Arabidopsis thaliana
  misc_feature (1)..(1196): Ceres Seq. ID no. 12580938
  misc_feature: MA Experiment ID: 20000314 Result: Down-regulated in Transcription
  misc_feature: MA Experiment 20000314 PARAMETER Experiment Name: At_14day_Shoots-Roots_Sub_P Parameter: Age (day) Value: 14
  misc_feature: MA Experiment 20000314 PARAMETER Experiment Name: At_14day_Shoots-Roots_Sub_P Parameter: Organism Value: A. thaliana
  misc_feature: MA Experiment 20000314 PARAMETER Experiment Name: At_14day_Shoots-Roots_Sub_P Parameter: Plant Line Value: WS
  misc_feature: MA Experiment 20000314 PARAMETER Experiment Name: At_14day_Shoots-Roots_Sub_P Parameter: Tissue Value: Roots vs. Whole Plant
  misc_feature: MA Experiment ID: 20000346 Result: Up-regulated in Transcription
  misc_feature: MA Experiment 20000346 PARAMETER Experiment Name: At_2mM_SA_Sub_P Parameter: Age (day) Value: 14
  misc_feature: MA Experiment 20000346 PARAMETER Experiment Name: At_2mM_SA_Sub_P Parameter: Organism Value: A. thaliana
  misc_feature: MA Experiment 20000346 PARAMETER Experiment Name: At_2mM_SA_Sub_P Parameter: Plant Line Value: WS
  misc_feature: MA Experiment 20000346 PARAMETER Experiment Name: At_2mM_SA_Sub_P Parameter: Timepoint (hr) Value: 1
  misc_feature: MA Experiment 20000346 PARAMETER Experiment Name: At_2mM_SA_Sub_P Parameter: Tissue Value: Aerial
  misc_feature: MA Experiment 20000346 PARAMETER Experiment Name: At_2mM_SA_Sub_P Parameter: Treatment Value: 2mM SA vs. No Treatment
  misc_feature: MA Experiment ID: 20000355 Result: Down-regulated in Transcription
  misc_feature: MA Experiment 20000355 PARAMETER Experiment Name: At_Siliques_Sub_P Parameter: Age (day) Value: 21
  misc_feature: MA Experiment 20000355 PARAMETER Experiment Name: At_Siliques_Sub_P Parameter: Organism Value: A. thaliana
  misc_feature: MA Experiment 20000355 PARAMETER Experiment Name: At_Siliques_Sub_P Parameter: Plant Line Value: WS
  misc_feature: MA Experiment 20000355 PARAMETER Experiment Name: At_Siliques_Sub_P Parameter: Tissue Value: Less Than 5mm Siliques vs. Whole Plant
gaagaagaagcagtaacaaatttggtgaagtcacgagaatcaacgatgacggcgacgaacaagcaagtcatattgaaagactacgtgagtggtttccctacggaatccgatttcgatttcactaccaccaccgtcgaacttagggttccggaaggtactaactctgttctagtgaagaatctctacttgtcatgcgatccttacatgagaattcgcatggggaaacctgatccttccactgctgctcttgctcaagcttacactcccggccagccaatccaagggtatggagtgtctagaataatagaatctggacatccagattacaagaaaggagatttactctggggtatagttgcatgggaggagtacagtgttatcactccaatgactcacgcgcatttcaagatccaacatactgatgttccattatcttattacactggacttttaggtatgcctggtatgactgcctatgctgggttttatgaagtttgttctccaaaggaaggagagacagtttatgtgtcagctgcatctggtgctgttggtcagcttgtgggacaacttgctaagatgatgggctgttatgttgttggaagcgctggaagtaaagagaaggttgatcttctgaagaccaagtttgggtttgatgatgcatttaactacaaggaagaatctgaccttactgctgccctaaaaaggtgtttccctaatggcattgacatatactttgagaatgtaggaggcaaaatgctagatgcagtgcttgtgaacatgaacatgcacgggcgtatcgctgtctgtggaatgatctcacagtacaatcttgagaaccaggaaggtgtacacaacctatccaacataatctacaaaagaatccgcattcaaggctttgtagtgtctgatttctacgacaaatactcaaagttcttggagtttgtgcttccccacattagagaagggaagataacgtacgtggaagatgtagctgatgggcttgagaaagctcccgaagctcttgtgggactcttccatggtaagaatgttgggaaacaagttgttgttgttgctcgtgagtgaaactatgtttgatacttgtactttatccaattagagtttgtgtgggtggtttttgttttatggataaagataatgtttgttatggtttcgaatcaaatagatacaaaattcgg

SEQ ID NO: 77878 - protein, 360 aa, Arabidopsis thaliana
  peptide (1)..(360): Ceres Seq. ID no. 12580939
  misc_feature (149)..(357): Pfam Name: Zinc-binding dehydrogenase Pfam Description: Zinc-binding dehydrogenase
  misc_feature (16)..(360): Homolog of NCBI NO: 15237888 NR Description: quinone oxidoreductase -like protein; protein id:
  misc_feature (16)..(360): Homolog of NCBI NO: 21539447 NR Description: quinone oxidoreductase-like protein [Arabidopsis
  misc_feature (16)..(360): Homolog of NCBI NO: 22326861 NR Description: quinone oxidoreductase - like protein; protein At5g17000.1, supported by cDNA: gi_16604343, supported by cDNA: [Arabidopsis thaliana] >gi|16604344|gb|AAL24178.1|
  misc_feature (16)..(360): Homolog of NCBI NO: 17529140 NR Description: putative quinone oxidoreductase [Arabidopsis
  misc_feature (16)..(360): Homolog of NCBI NO: 15237890 NR Description: quinone oxidoreductase - like protein; protein At5g16990.1, supported by cDNA: gi_17529037, supported by cDNA:
  misc_feature (16)..(360): Homolog of NCBI NO: 21554121 NR Description: quinone oxidoreductase-like protein [Arabidopsis
  misc_feature (16)..(360): Homolog of NCBI NO: 1362014 NR Description: probable NADPH2:quinone reductase (EC 1.6.5.5) P2
  misc_feature (16)..(360): Homolog of NCBI NO: 11358742 NR Description: quinone oxidoreductase-like protein - Arabidopsis
  misc_feature (17)..(360): Homolog of NCBI NO: 15228456 NR Description: putative NADP-dependent oxidoreductase; protein At3g03080.1 [Arabidopsis thaliana]
  misc_feature (17)..(355): Homolog of NCBI NO: 11357163 NR Description: allyl alcohol dehydrogenase-like protein -
EEEAVTNLVKSRESTMTATNKQVILKDYVSGFPTESDFDFTTTTVELRVPEGTNSVLVKNLYLSCDPYMRIRMGKPDPSTAALAQAYTPGQPIQGYGVSRIIESGHPDYKKGDLLWGIVAWEEYSVITPMTHAHFKIQHTDVPLSYYTGLLGMPGMTAYAGFYEVCSPKEGETVYVSAASGAVGQLVGQLAKMMGCYVVGSAGSKEKVDLLKTKFGFDDAFNYKEESDLTAALKRCFPNGIDIYFENVGGKMLDAVLVNMNMHGRIAVCGMISQYNLENQEGVHNLSNIIYKRIRIQGFVVSDFYDKYSKFLEFVLPHIREGKITYVEDVADGLEKAPEALVGLFHGKNVGKQVVVVARE

SEQ ID NO: 77879 - protein, 345 aa, Arabidopsis thaliana; identical to SEQ ID NO: 76666
  peptide (1)..(345): Ceres Seq. ID no. 12580940
  misc_feature (134)..(342): Pfam Name: Zinc-binding dehydrogenase Pfam Description: Zinc-binding dehydrogenase
  misc_feature (1)..(345): Homolog of NCBI NO: 15237888 NR Description: quinone oxidoreductase -like protein; protein id:
  misc_feature (1)..(345): Homolog of NCBI NO: 21539447 NR Description: quinone oxidoreductase-like protein [Arabidopsis
  misc_feature (1)..(345): Homolog of NCBI NO: 22326861 NR Description: quinone oxidoreductase - like protein; protein At5g17000.1, supported by cDNA: gi_16604343, supported by cDNA: [Arabidopsis thaliana] >gi|16604344|gb|AAL24178.1|
  misc_feature (1)..(345): Homolog of NCBI NO: 17529140 NR Description: putative quinone oxidoreductase [Arabidopsis
  misc_feature (1)..(345): Homolog of NCBI NO: 15237890 NR Description: quinone oxidoreductase - like protein; protein At5g16990.1, supported by cDNA: gi_17529037, supported by cDNA:
  misc_feature (1)..(345): Homolog of NCBI NO: 21554121 NR Description: quinone oxidoreductase-like protein [Arabidopsis
  misc_feature (1)..(345): Homolog of NCBI NO: 1362014 NR Description: probable NADPH2:quinone reductase (EC 1.6.5.5) P2
  misc_feature (1)..(345): Homolog of NCBI NO: 11358742 NR Description: quinone oxidoreductase-like protein - Arabidopsis
  misc_feature (2)..(345): Homolog of NCBI NO: 15228456 NR Description: putative NADP-dependent oxidoreductase; protein At3g03080.1 [Arabidopsis thaliana]
  misc_feature (2)..(340): Homolog of NCBI NO: 11357163 NR Description: allyl alcohol dehydrogenase-like protein -

SEQ ID NO: 77880 - protein, 292 aa, Arabidopsis thaliana; identical to SEQ ID NO: 76667
  peptide (1)..(292): Ceres Seq. ID no. 12580941
  misc_feature (81)..(289): Pfam Name: Zinc-binding dehydrogenase Pfam Description: Zinc-binding dehydrogenase
  misc_feature (1)..(292): Homolog of NCBI NO: 15237888 NR Description: quinone oxidoreductase -like protein; protein id:
  misc_feature (1)..(292): Homolog of NCBI NO: 21539447 NR Description: quinone oxidoreductase-like protein [Arabidopsis
  misc_feature (1)..(292): Homolog of NCBI NO: 22326861 NR Description: quinone oxidoreductase - like protein; protein At5g17000.1, supported by cDNA: gi_16604343, supported by cDNA: [Arabidopsis thaliana] >gi|16604344|gb|AAL24178.1|
  misc_feature (1)..(292): Homolog of NCBI NO: 17529140 NR Description: putative quinone oxidoreductase [Arabidopsis
  misc_feature (1)..(292): Homolog of NCBI NO: 15237890 NR Description: quinone oxidoreductase - like protein; protein At5g16990.1, supported by cDNA: gi_17529037, supported by cDNA:
  misc_feature (1)..(292): Homolog of NCBI NO: 21554121 NR Description: quinone oxidoreductase-like protein [Arabidopsis
  misc_feature (1)..(292): Homolog of NCBI NO: 1362014 NR Description: probable NADPH2:quinone reductase (EC 1.6.5.5) P2
  misc_feature (1)..(292): Homolog of NCBI NO: 11358742 NR Description: quinone oxidoreductase-like protein - Arabidopsis
  misc_feature (1)..(292): Homolog of NCBI NO: 15228456 NR Description: putative NADP-dependent oxidoreductase; protein At3g03080.1 [Arabidopsis thaliana]
  misc_feature (1)..(287): Homolog of NCBI NO: 11357163 NR Description: allyl alcohol dehydrogenase-like protein -

SEQ ID NO: 77881 - DNA, 2039 bp, Arabidopsis thaliana
  misc_feature (1)..(2039): Ceres Seq. ID no. 12580942
  misc_feature: MA Experiment ID: 20000169 Result: Up-regulated in Transcription
  misc_feature: MA Experiment 20000169 PARAMETER Experiment Name: At_100uM_ABA_P Parameter: Age (day) Value: 14
  misc_feature: MA Experiment 20000169 PARAMETER Experiment Name: At_100uM_ABA_P Parameter: Organism Value: A. thaliana
  misc_feature: MA Experiment 20000169 PARAMETER Experiment Name: At_100uM_ABA_P Parameter: Plant Line Value: WS
  misc_feature: MA Experiment 20000169 PARAMETER Experiment Name: At_100uM_ABA_P Parameter: Timepoint (hr) Value: 6
  misc_feature: MA Experiment 20000169 PARAMETER Experiment Name: At_100uM_ABA_P Parameter: Tissue Value: Aerial
  misc_feature: MA Experiment 20000169 PARAMETER Experiment Name: At_100uM_ABA_P Parameter: Treatment Value: 100uM ABA vs. No Treatment
  misc_feature: MA Experiment ID: 20000185 Result: Down-regulated in Transcription
  misc_feature: MA Experiment 20000185 PARAMETER Experiment Name: At_Roots__P Parameter: Age (day) Value: 7 vs. 21
  misc_feature: MA Experiment 20000185 PARAMETER Experiment Name: At_Roots__P Parameter: Organism Value: A. thaliana
  misc_feature: MA Experiment 20000185 PARAMETER Experiment Name: At_Roots__P Parameter: Tissue Value: Roots vs. Whole Plant
  misc_feature: MA Experiment ID: 20000264 Result: Up-regulated in Transcription
  misc_feature: MA Experiment 20000264 PARAMETER Experiment Name: At_Open_Flower_P Parameter: Age (day) Value: 21
  misc_feature: MA Experiment 20000264 PARAMETER Experiment Name: At_Open_Flower_P Parameter: Plant Line Value: WS
  misc_feature: MA Experiment 20000264 PARAMETER Experiment Name: At_Open_Flower_P Parameter: Tissue Value: Open Flower vs. Whole Plant
  misc_feature: MA Experiment ID: 20000436 Result: Up-regulated in Transcription
  misc_feature: MA Experiment 20000436 PARAMETER Experiment Name: At_Drought_P Parameter: Age (day) Value: 7
  misc_feature: MA Experiment 20000436 PARAMETER Experiment Name: At_Drought_P Parameter: Organism Value: A. thaliana
  misc_feature: MA Experiment 20000436 PARAMETER Experiment Name: At_Drought_P Parameter: Plant Line Value: WS
  misc_feature: MA Experiment 20000436 PARAMETER Experiment Name: At_Drought_P Parameter: Timepoint (hr) Value: 12
  misc_feature: MA Experiment 20000436 PARAMETER Experiment Name: At_Drought_P Parameter: Tissue Value: Whole Plant
  misc_feature: MA Experiment 20000436 PARAMETER Experiment Name: At_Drought_P Parameter: Treatment Value: Drought vs. No Drought
  misc_feature: MA Experiment ID: 20000437 Result: Up-regulated in Transcription
  misc_feature: MA Experiment 20000437 PARAMETER Experiment Name: At_Drought_P Parameter: Age (day) Value: 8
  misc_feature: MA Experiment 20000437 PARAMETER Experiment Name: At_Drought_P Parameter: Organism Value: A. thaliana
  misc_feature: MA Experiment 20000437 PARAMETER Experiment Name: At_Drought_P Parameter: Plant Line Value: WS
  misc_feature: MA Experiment 20000437 PARAMETER Experiment Name: At_Drought_P Parameter: Timepoint (hr) Value: 24
  misc_feature: MA Experiment 20000437 PARAMETER Experiment Name: At_Drought_P Parameter: Tissue Value: Whole Plant
  misc_feature: MA Experiment 20000437 PARAMETER Experiment Name: At_Drought_P Parameter: Treatment Value: Drought vs. No Drought
  misc_feature: MA Experiment ID: 20000439 Result: Down-regulated in Transcription
  misc_feature: MA Experiment 20000439 PARAMETER Experiment Name: At_Roots__P Parameter: Age (day) Value: 14 vs. 21
  misc_feature: MA Experiment 20000439 PARAMETER Experiment Name: At_Roots__P Parameter: Organism Value: A. thaliana
  misc_feature: MA Experiment 20000439 PARAMETER Experiment Name: At_Roots__P Parameter: Tissue Value: Roots vs. Whole Plant
  misc_feature: MA Experiment ID: 20000453 Result: Up-regulated in Transcription
  misc_feature: MA Experiment 20000453 PARAMETER Experiment Name: At_100uM_ABA_P Parameter: Age (day) Value: 15
  misc_feature: MA Experiment 20000453 PARAMETER Experiment Name: At_100uM_ABA_P Parameter: Organism Value: A. thaliana
  misc_feature: MA Experiment 20000453 PARAMETER Experiment Name: At_100uM_ABA_P Parameter: Plant Line Value: WS
  misc_feature: MA Experiment 20000453 PARAMETER Experiment Name: At_100uM_ABA_P Parameter: Timepoint (hr) Value: 24
  misc_feature: MA Experiment 20000453 PARAMETER Experiment Name: At_100uM_ABA_P Parameter: Tissue Value: Aerial
  misc_feature: MA Experiment 20000453 PARAMETER Experiment Name: At_100uM_ABA_P Parameter: Treatment Value: 100uM ABA vs. No Treatment
  misc_feature: MA Experiment ID: 20000794 Result: Up-regulated in Transcription
  misc_feature: MA Experiment 20000794 PARAMETER Experiment Name: At_Petals_P Parameter: Age (day) Value: 23-25 days
  misc_feature: MA Experiment 20000794 PARAMETER Experiment Name: At_Petals_P Parameter: Plant Line Value: WS
  misc_feature: MA Experiment 20000794 PARAMETER Experiment Name: At_Petals_P Parameter: Tissue Value: Petals vs. Whole plant
  misc_feature: MA Experiment ID: 20001559 Result: Up-regulated in Transcription
  misc_feature: MA Experiment 20001559 PARAMETER Experiment Name: At_Drought_Soil_Dry_P Parameter: Age (day) Value: 28
  misc_feature: MA Experiment 20001559 PARAMETER Experiment Name: At_Drought_Soil_Dry_P Parameter: Organism Value: A. thaliana
  misc_feature: MA Experiment 20001559 PARAMETER Experiment Name: At_Drought_Soil_Dry_P Parameter: Plant Line Value: WS
  misc_feature: MA Experiment 20001559 PARAMETER Experiment Name: At_Drought_Soil_Dry_P Parameter: Post Timepoint (hr) Value: 29
  misc_feature: MA Experiment 20001559 PARAMETER Experiment Name: At_Drought_Soil_Dry_P Parameter: Post-Treatment Value: Re-Water vs. No Drought
  misc_feature: MA Experiment 20001559 PARAMETER Experiment Name: At_Drought_Soil_Dry_P Parameter: Timepoint (day) Value: 14
  misc_feature: MA Experiment 20001559 PARAMETER Experiment Name: At_Drought_Soil_Dry_P Parameter: Treatment Value: Drought vs. No Drought
  misc_feature: MA Experiment ID: 20001904 Result: Up-regulated in Transcription
  misc_feature: MA Experiment 20001904 PARAMETER Experiment Name: At_Drought_Reproduction_P Parameter: Age (day) Value: 37
  misc_feature: MA Experiment 20001904 PARAMETER Experiment Name: At_Drought_Reproduction_P Parameter: Organism Value: A. thaliana
  misc_feature: MA Experiment 20001904 PARAMETER Experiment Name: At_Drought_Reproduction_P Parameter: Plant Line Value: WS
  misc_feature: MA Experiment 20001904 PARAMETER Experiment Name: At_Drought_Reproduction_P Parameter: Timepoint (day) Value: 7
  misc_feature: MA Experiment 20001904 PARAMETER Experiment Name: At_Drought_Reproduction_P Parameter: Tissue Value: Rosettes
  misc_feature: MA Experiment 20001904 PARAMETER Experiment Name: At_Drought_Reproduction_P Parameter: Treatment Value: Drought vs. No Drought
  misc_feature: MA Experiment ID: 20001905 Result: Up-regulated in Transcription
  misc_feature: MA Experiment 20001905 PARAMETER Experiment Name: At_Drought_Reproduction_P Parameter: Age (day) Value: 40
  misc_feature: MA Experiment 20001905 PARAMETER Experiment Name: At_Drought_Reproduction_P Parameter: Organism Value: A. thaliana
  misc_feature: MA Experiment 20001905 PARAMETER Experiment Name: At_Drought_Reproduction_P Parameter: Plant Line Value: WS
  misc_feature: MA Experiment 20001905 PARAMETER Experiment Name: At_Drought_Reproduction_P Parameter: Timepoint (day) Value: 10
  misc_feature: MA Experiment 20001905 PARAMETER Experiment Name: At_Drought_Reproduction_P Parameter: Tissue Value: Rosettes
  misc_feature: MA Experiment 20001905 PARAMETER Experiment Name: At_Drought_Reproduction_P Parameter: Treatment Value: Drought vs. No Drought
  misc_feature: MA Experiment ID: 20001906 Result: Up-regulated in Transcription
  misc_feature: MA Experiment 20001906 PARAMETER Experiment Name: At_Drought_Reproduction_P Parameter: Age (day) Value: 35
  misc_feature: MA Experiment 20001906 PARAMETER Experiment Name: At_Drought_Reproduction_P Parameter: Organism Value: A. thaliana
  misc_feature: MA Experiment 20001906 PARAMETER Experiment Name: At_Drought_Reproduction_P Parameter: Plant Line Value: WS
  misc_feature: MA Experiment 20001906 PARAMETER Experiment Name: At_Drought_Reproduction_P Parameter: Timepoint (day) Value: 5
  misc_feature: MA Experiment 20001906 PARAMETER Experiment Name: At_Drought_Reproduction_P Parameter: Tissue Value: Siliques
  misc_feature: MA Experiment 20001906 PARAMETER Experiment Name: At_Drought_Reproduction_P Parameter: Treatment Value: Drought vs. No Drought
  misc_feature: MA Experiment ID: 20001908 Result: Up-regulated in Transcription
  misc_feature: MA Experiment 20001908 PARAMETER Experiment Name: At_Drought_Reproduction_P Parameter: Age (day) Value: 40
  misc_feature: MA Experiment 20001908 PARAMETER Experiment Name: At_Drought_Reproduction_P Parameter: Organism Value: A. thaliana
  misc_feature: MA Experiment 20001908 PARAMETER Experiment Name: At_Drought_Reproduction_P Parameter: Plant Line Value: WS
  misc_feature: MA Experiment 20001908 PARAMETER Experiment Name: At_Drought_Reproduction_P Parameter: Timepoint (day) Value: 10
  misc_feature: MA Experiment 20001908 PARAMETER Experiment Name: At_Drought_Reproduction_P Parameter: Tissue Value: Siliques
  misc_feature: MA Experiment 20001908 PARAMETER Experiment Name: At_Drought_Reproduction_P Parameter: Treatment Value: Drought vs. No Drought
aaatagtttgatttctgttgttgagtttatgcgatatcccaactggtgaaactgtgtttattggttcagacagagataaatggcttcaaagattattgctggcaagccggatgataccgagtatgaaatcattgaaggtgagtctgagagcgctttagcagcggggacaagcccttggatgaattcatcaacgttgaagcttcgacatcgaattggaagaggtcccttcggtgatgtttggctggctactcatcatcagtcaactgaggactatgatgagcatcatgaagtggccatcaaaatgctttatcccatcaaggaagatcaaagaagggttgtggtagataagtttgaagatctcttctctaaatgtcaaggactagagaatgtctgtctgctcaggggagtctctagtatcaatggaaagatatgtgtcgtcatgaaattctacgagggctctcttggtgacaagatggctcggcttaaaggaggaaagctttcactgccagatgttttgagatacggggttgatctggctacagggatcctggagttgcactcaaaagggtttctcattctcaatctcaagccctctaactttcttctcagtgataacgacaaggccatcctcggggatgttgggatcccttatctccttcttagtatccctttaccaagttctgatatgacagagagacttggaactccaaactatatggcaccagaacagtggcaaccggatgtcagaggtcccatgtcctttgagactgattcttggggatttggttgcagcattgttgaaatgctgactggtgtacaaccttggtctgggagatctgccgatgaaatatatgatttggtggtgagaaagcaagaaaagcttagtatccccagtagcataccgcctcctctcgagaacctacttcggggttgctttatgtatgatcttcgaagccgaccttcgatgactgacatcttactcgtcttaaagagcttgcagaactcggaggaggaacaggtcaggagaggcattgatagtagagaaatcaggaagagctcggctactcttggttatacagaatggtttctttcaaaggatcatctgcaagtgcgcgacaccgtgcgttcaagaaagcctgccaattcgtgtaagcatgagaacatggatgtgccagaaggaatggtggttggtttagaacgtgactccacagacccagatggatttgtgctagttaaagtccatggtgtacatgatccattaagggttcacgtatctgttcttgaacgggtaactaacggcttagcttctggagattgggtgcgtctgaaggtcaggaaagacaagaggcactctccggttggtgttctccattcaattgaccgtgagggaaatgtagctgttggatttattgggttgccaactctctggaaagggacatcatcgcagcttcagatggctaaagtatacagtgtgggtcaatttgtgaaactcaaagccaatgttgtcatcccgagattcaaatggatgcgtaaaggtagaggtatttgggcaactggcaggatctctcaggttctaccaaacggttgccttgaagtggacttccctggaatgttaccttttggagaggaacatggaagctatcttgcagatccggctgaagtagagattgtgaatttcaatacatgtcaaggagctgtggaaaaatatcaacatctggaggattttcattgggctgtgagacctttgcttattgctatgggtctattgacagcgatgaagttagggatctgtgtcaggaagaaaataggaaggtcaaaggatgggaaacaacgcgatggctcgactggacaaggtgactgtaagattccggatggtaagggctctgacaaatctaaatggcttgtgttcttttaggtctgctatgagacacagaccttgtctggtccatatattatactgttctagtcataataacgtttcatgtacataatgacgtttttcttttttgctctttaaaattaccaaaaagctttcacgc

SEQ ID NO: 77882 - protein, 611 aa, Arabidopsis thaliana; identical to SEQ ID NO: 45166
  peptide (1)..(611): Ceres Seq. ID no. 12580943
  misc_feature (29)..(331): Homolog of NCBI NO: 18420244 NR Description: protein kinase like protein; protein id:
  misc_feature (5)..(309): Homolog of NCBI NO: 34393850 NR Description: putative serine/threonine protein kinase [Oryza
  misc_feature (45)..(300): Homolog of NCBI NO: 34334393 NR Description: NIMA-related kinase 2 [Chlamydomonas reinhardtii]
  misc_feature (5)..(311): Homolog of NCBI NO: 34901608 NR Description: P0571D04.18 [Oryza sativa (japonica
  misc_feature (41)..(308): Homolog of NCBI NO: 25146954 NR Description: Protein kinase [Caenorhabditis elegans] Hypothetical protein F19H6.1 [Caenorhabditis elegans]
  misc_feature (33)..(309): Homolog of NCBI NO: 38345798 NR Description: OSJNBa0085I10.15 [Oryza sativa (japonica
  misc_feature (40)..(302): Homolog of NCBI NO: 39588025 NR Description: Hypothetical protein CBG00136 [Caenorhabditis
  misc_feature (47)..(316): Homolog of NCBI NO: 27085282 NR Description: serine/threonine protein kinase [Oryza sativa
  misc_feature (29)..(312): Homolog of NCBI NO: 32490474 NR Description: putative serine/threonine-protein kinase ctr1
  misc_feature (24)..(300): Homolog of NCBI NO: 34334391 NR Description: NIMA-related kinase 1 [Chlamydomonas reinhardtii]

SEQ ID NO: 77883 - protein, 578 aa, Arabidopsis thaliana; identical to SEQ ID NO: 45167
  peptide (1)..(578): Ceres Seq. ID no. 12580944
  misc_feature (1)..(298): Homolog of NCBI NO: 18420244 NR Description: protein kinase like protein; protein id:
  misc_feature (1)..(276): Homolog of NCBI NO: 34393850 NR Description: putative serine/threonine protein kinase [Oryza
  misc_feature (12)..(267): Homolog of NCBI NO: 34334393 NR Description: NIMA-related kinase 2 [Chlamydomonas reinhardtii]
  misc_feature (1)..(278): Homolog of NCBI NO: 34901608 NR Description: P0571D04.18 [Oryza sativa (japonica
  misc_feature (8)..(275): Homolog of NCBI NO: 25146954 NR Description: Protein kinase [Caenorhabditis elegans] Hypothetical protein F19H6.1 [Caenorhabditis elegans]
  misc_feature (1)..(276): Homolog of NCBI NO: 38345798 NR Description: OSJNBa0085I10.15 [Oryza sativa (japonica
  misc_feature (7)..(269): Homolog of NCBI NO: 39588025 NR Description: Hypothetical protein CBG00136 [Caenorhabditis
  misc_feature (14)..(283): Homolog of NCBI NO: 27085282 NR Description: serine/threonine protein kinase [Oryza sativa
  misc_feature (1)..(279): Homolog of NCBI NO: 32490474 NR Description: putative serine/threonine-protein kinase ctr1
  misc_feature (1)..(267): Homolog of NCBI NO: 34334391 NR Description: NIMA-related kinase 1 [Chlamydomonas reinhardtii]

SEQ ID NO: 77884 - protein, 537 aa, Arabidopsis thaliana; identical to SEQ ID NO: 45168
  peptide (1)..(537): Ceres Seq. ID no. 12580945
  misc_feature (1)..(257): Homolog of NCBI NO: 18420244 NR Description: protein kinase like protein; protein id:
  misc_feature (1)..(235): Homolog of NCBI NO: 34393850 NR Description: putative serine/threonine protein kinase [Oryza
  misc_feature (1)..(226): Homolog of NCBI NO: 34334393 NR Description: NIMA-related kinase 2 [Chlamydomonas reinhardtii]
  misc_feature (1)..(237): Homolog of NCBI NO: 34901608 NR Description: P0571D04.18 [Oryza sativa (japonica
  misc_feature (1)..(234): Homolog of NCBI NO: 25146954 NR Description: Protein kinase [Caenorhabditis elegans] Hypothetical protein F19H6.1 [Caenorhabditis elegans]
  misc_feature (1)..(235): Homolog of NCBI NO: 38345798 NR Description: OSJNBa0085I10.15 [Oryza sativa (japonica
  misc_feature (1)..(228): Homolog of NCBI NO: 39588025 NR Description: Hypothetical protein CBG00136 [Caenorhabditis
  misc_feature (1)..(242): Homolog of NCBI NO: 27085282 NR Description: serine/threonine protein kinase [Oryza sativa
  misc_feature (1)..(238): Homolog of NCBI NO: 32490474 NR Description: putative serine/threonine-protein kinase ctr1
  misc_feature (1)..(226): Homolog of NCBI NO: 34334391 NR Description: NIMA-related kinase 1 [Chlamydomonas reinhardtii]

SEQ ID NO: 77885 - DNA, 2434 bp, Arabidopsis thaliana
  misc_feature (1)..(2434): Ceres Seq. ID no. 12580946
  misc_feature: MA Experiment ID: 20000184 Result: Down-regulated in Transcription
  misc_feature: MA Experiment 20000184 PARAMETER Experiment Name: At_Shoots__P Parameter: Age (day) Value: 7
  misc_feature: MA Experiment 20000184 PARAMETER Experiment Name: At_Shoots__P Parameter: Tissue Value: Shoots vs. Whole Plant
  misc_feature: MA Experiment ID: 20001905 Result: Down-regulated in Transcription
  misc_feature: MA Experiment 20001905 PARAMETER Experiment Name: At_Drought_Reproduction_P Parameter: Age (day) Value: 40
  misc_feature: MA Experiment 20001905 PARAMETER Experiment Name: At_Drought_Reproduction_P Parameter: Organism Value: A. thaliana
  misc_feature: MA Experiment 20001905 PARAMETER Experiment Name: At_Drought_Reproduction_P Parameter: Plant Line Value: WS
  misc_feature: MA Experiment 20001905 PARAMETER Experiment Name: At_Drought_Reproduction_P Parameter: Timepoint (day) Value: 10
  misc_feature: MA Experiment 20001905 PARAMETER Experiment Name: At_Drought_Reproduction_P Parameter: Tissue Value: Rosettes
  misc_feature: MA Experiment 20001905 PARAMETER Experiment Name: At_Drought_Reproduction_P Parameter: Treatment Value: Drought vs. No Drought
cttcttctttctttagtgtttccaacttaaccctctctcttttcttgcaaacttttgctcggaattctatgctttgctgatctattgttttctctctgcaaaagtaatgagaagctttttgctatgttaagctttagatctgctattatttgttcctgtgagtcttttatatcttgtgtggtttctttgagaccttaagcagccattgtcacaagctgagctctctttctttctctctagttcaagattctaactttggagcaagtaagcaagtcagagagaggacaaattagctgaaatgctggagattgaaagccctacgagtctctgtttccgtacaaacactacttgtaatgctctgcttcgagagcttcagaaaatatgggttgatattggtgagagtgatgctgagaaagaccggatgctaatggaattggagaaggaatgtcttgaaatctacagaagaaaagtggacgaggctgctaattccaaggcacagcttcatcagtcattggtatcaattgaagctgaaattgcttctttactggctgctcttggagtgttcaacagccactcaccgatgaaagcaaaggaaggttcaaaatcattgaaagaaaaacttgctgctgtgaggccaatgcttgaggacttaagattgcaaaaagatgaaagaatgaagcaatttgtggatataaaagcacaaattgagaagatgagtggtgaaatatctggatacagtgaccaactcaacaaaacgatggtcggttctttggctcttgatgaacaagacctgactcttcggaagcttaacgagtatcaaacacatctccgctcgctccagaaagagaagtcggatcgtctgaacaaggttttggactatgtgaatgaggtgcacactctatgtggtgttcttggagtcgactttggtcaaactgttagtgaggttcatccgagcttacataggactgaccatgagcagtctacaaacatttctgatgatacattggatggtctacaccacatgattcataagctgaaaaccgaaaggagcgttcggtttcaaaagttaaaggatgtagcgggttcactttttgagctatggaatctaatggacacatctcaagaagaaagaacgaaatttgcaagtgtcagttatgttgtaagatcatcagaatctgatatcactgagccaaatatcctctctagtgaaacaattgaacaggtgtctgcagaagtagactgttttaataagctgaaagctagcagaatgaaggagcttgtgatgaaaagaaggactgagttagagaatctttgcagattggctcacattgaggctgacacaagcacatcgcttgagaaatcaactgctttgattgattctggattagtggacccttcagagcttcttacaaatattgaattgcatataaacaaaatcaaagaagaagcacatagccggaaagaaataatcgataggattgaccgctggttatctgcgtgcgaagaggaaaactggctagaagaatacaatcaggatgaaacccggtatagtgccggaagaggtggacatgtaaacctcaagcatgcagaacgcgcccggatcacagtaaacaagatcccatcaatggttgacaatctcatcaagaaaacacttctatgggaggacgaaacacggaaatcatttctatatgatggtgttcgattggtatccatacttgaagattataaattgacaaggaaacaacaggaagaggaaaagagacgataccgggatcaaaagaagatgcaggatctgttaataaagcggagggaatcaatttatggatcaaaaccgagtccaagaagaagcaacagtgtaagaaagaccaacggatacaatggggatgcatctgtgcctcctacgccccgcagaaactcagctggagcaacaaataacgacataatgaccaccccaagatcatactcaagccatcgccaaaacggatatttcaaggaagtaagaagactgtcaacagctcctttgaactttgtggcaataccaaaggaagactctgtctctacatacacttcggtttgcggctctgaaccagattcaccgttatataactaagtctcattaggcagcagttggttcaaccacaagaacttgagatggagtaggagttgggagttagatgaatgtaatcaaaaggaggagttactgatacagatcaagtaaccgtagacaattagtggtcgtatgtgtgtgactttgagttgacttgtgacggatacttcagggtaatagaagagtagaaaatggatgttatgttgagttgttaatttgttatagtagcttcaaaatatttcttttaatttcatcttttctttggtatgttgttcaatttgtgtggatgtgtcatgtgtgtatattttatacagattacttactctc

SEQ ID NO: 77886 - protein, 603 aa, Arabidopsis thaliana; identical to SEQ ID NO: 77257
  peptide (1)..(603): Ceres Seq. ID no. 12580947
  misc_feature (38)..(257): Pfam Name: Microtubule associated protein (MAP65/ASE1 family) Pfam Description: Microtubule associated protein (MAP65/ASE1
  misc_feature (256)..(603): Homolog of NCBI NO: 8778239 NR Description: F10B6.9 [Arabidopsis thaliana]
  misc_feature (1)..(257): Homolog of NCBI NO: 8778239 NR Description: F10B6.9 [Arabidopsis thaliana]
  misc_feature (26)..(257): Homolog of NCBI NO: 15223872 NR Description: hypothetical protein; protein id: At1g14690.1
  misc_feature (256)..(416): Homolog of NCBI NO: 15223872 NR Description: hypothetical protein; protein id: At1g14690.1
  misc_feature (475)..(602): Homolog of NCBI NO: 15223872 NR Description: hypothetical protein; protein id: At1g14690.1
  misc_feature (1)..(601): Homolog of NCBI NO: 25410943 NR Description: hypothetical protein At2g01910 [imported] - thaliana >gi|4522009|gb|AAD21782.1| unknown protein [Arabidopsis
  misc_feature (42)..(601): Homolog of NCBI NO: 30677965 NR Description: microtubule associated protein (MAP65/ASE1)
  misc_feature (16)..(601): Homolog of NCBI NO: 27357984 NR Description: Unknown protein [Oryza sativa (japonica
  misc_feature (16)..(600): Homolog of NCBI NO: 11558252 NR Description: microtubule-associated protein MAP65-1a
  misc_feature (17)..(600): Homolog of NCBI NO: 15240485 NR Description: putative protein; protein id: At5g55230.1 thaliana] >gi|9758120|dbj|BAB08592.1| similarity to unknown protein [Arabidopsis thaliana]

SEQ ID NO: 77887 - protein, 562 aa, Arabidopsis thaliana; identical to SEQ ID NO: 77258
  peptide (1)..(562): Ceres Seq. ID no. 12580948
  misc_feature (1)..(216): Pfam Name: Microtubule associated protein (MAP65/ASE1 family) Pfam Description: Microtubule associated protein (MAP65/ASE1
  misc_feature (215)..(562): Homolog of NCBI NO: 8778239 NR Description: F10B6.9 [Arabidopsis thaliana]
  misc_feature (1)..(216): Homolog of NCBI NO: 8778239 NR Description: F10B6.9 [Arabidopsis thaliana]
  misc_feature (1)..(216): Homolog of NCBI NO: 15223872 NR Description: hypothetical protein; protein id: At1g14690.1
  misc_feature (215)..(375): Homolog of NCBI NO: 15223872 NR Description: hypothetical protein; protein id: At1g14690.1
  misc_feature (434)..(561): Homolog of NCBI NO: 15223872 NR Description: hypothetical protein; protein id: At1g14690.1
  misc_feature (1)..(560): Homolog of NCBI NO: 25410943 NR Description: hypothetical protein At2g01910 [imported] - thaliana >gi|4522009|gb|AAD21782.1| unknown protein [Arabidopsis
  misc_feature (1)..(560): Homolog of NCBI NO: 30677965 NR Description: microtubule associated protein (MAP65/ASE1)
  misc_feature (1)..(560): Homolog of NCBI NO: 27357984 NR Description: Unknown protein [Oryza sativa (japonica
  misc_feature (1)..(559): Homolog of NCBI NO: 11558252 NR Description: microtubule-associated protein MAP65-1a
  misc_feature (1)..(559): Homolog of NCBI NO: 15240485 NR Description: putative protein; protein id: At5g55230.1 thaliana] >gi|9758120|dbj|BAB08592.1| similarity to unknown protein [Arabidopsis thaliana]

SEQ ID NO: 77888 - protein, 560 aa, Arabidopsis thaliana; identical to SEQ ID NO: 77259
  peptide (1)..(560): Ceres Seq. ID no. 12580949
  misc_feature (1)..(214): Pfam Name: Microtubule associated protein (MAP65/ASE1 family) Pfam Description: Microtubule associated protein (MAP65/ASE1
  misc_feature (213)..(560): Homolog of NCBI NO: 8778239 NR Description: F10B6.9 [Arabidopsis thaliana]
  misc_feature (1)..(214): Homolog of NCBI NO: 8778239 NR Description: F10B6.9 [Arabidopsis thaliana]
  misc_feature (1)..(214): Homolog of NCBI NO: 15223872 NR Description: hypothetical protein; protein id: At1g14690.1
  misc_feature (213)..(373): Homolog of NCBI NO: 15223872 NR Description: hypothetical protein; protein id: At1g14690.1
  misc_feature (432)..(559): Homolog of NCBI NO: 15223872 NR Description: hypothetical protein; protein id: At1g14690.1
  misc_feature (1)..(558): Homolog of NCBI NO: 25410943 NR Description: hypothetical protein At2g01910 [imported] - thaliana >gi|4522009|gb|AAD21782.1| unknown protein [Arabidopsis
  misc_feature (1)..(558): Homolog of NCBI NO: 30677965 NR Description: microtubule associated protein (MAP65/ASE1)
  misc_feature (1)..(558): Homolog of NCBI NO: 27357984 NR Description: Unknown protein [Oryza sativa (japonica
  misc_feature (1)..(557): Homolog of NCBI NO: 11558252 NR Description: microtubule-associated protein MAP65-1a
  misc_feature (1)..(557): Homolog of NCBI NO: 15240485 NR Description: putative protein; protein id: At5g55230.1 thaliana] >gi|9758120|dbj|BAB08592.1| similarity to unknown protein [Arabidopsis thaliana]

SEQ ID NO: 77889 - DNA, 1099 bp, Arabidopsis thaliana
  misc_feature (1)..(1099): Ceres Seq. ID no. 12580954
  misc_feature: MA Experiment ID: 108434 Result: Up-regulated in Transcription
  misc_feature: MA Experiment 108434 PARAMETER Experiment Name: At_Root_Tips_cDNA_P Parameter: Tissue Value: Root Tips
  misc_feature: MA Experiment ID: 108461 Result: Up-regulated in Transcription
  misc_feature: MA Experiment 108461 PARAMETER Experiment Name: At_Germinating_Seeds_cDNA_P Parameter: Age (day) Value: 1 vs. 0
  misc_feature: MA Experiment 108461 PARAMETER Experiment Name: At_Germinating_Seeds_cDNA_P Parameter: Tissue Value: Germinating Seeds
  misc_feature: MA Experiment ID: 108501 Result: Down-regulated in Transcription
  misc_feature: MA Experiment 108501 PARAMETER Experiment Name: At_ap2_floral_buds_cDNA_P Parameter: Plant Line Value: ap2 (Ler.)
  misc_feature: MA Experiment 108501 PARAMETER Experiment Name: At_ap2_floral_buds_cDNA_P Parameter: Tissue Value: Closed Flower
  misc_feature: MA Experiment ID: 108561 Result: Down-regulated in Transcription
  misc_feature: MA Experiment 108561 PARAMETER Experiment Name: At_100uM_ABA_cDNA_P Parameter: Timepoint (hr) Value: 6
  misc_feature: MA Experiment 108561 PARAMETER Experiment Name: At_100uM_ABA_cDNA_P Parameter: Tissue Value: Aerial
  misc_feature: MA Experiment 108561 PARAMETER Experiment Name: At_100uM_ABA_cDNA_P Parameter: Treatment Value: 100uM ABA vs. No Treatment
  misc_feature: MA Experiment ID: 108577 Result: Down-regulated in Transcription
  misc_feature: MA Experiment 108577 PARAMETER Experiment Name: At_42deg_Heat_cDNA_P Parameter: Temperature (deg C) Value: 42 vs. 22
  misc_feature: MA Experiment 108577 PARAMETER Experiment Name: At_42deg_Heat_cDNA_P Parameter: Timepoint (hr) Value: 6
  misc_feature: MA Experiment 108577 PARAMETER Experiment Name: At_42deg_Heat_cDNA_P Parameter: Tissue Value: Aerial
  misc_feature: MA Experiment ID: 108585 Result: Down-regulated in Transcription
  misc_feature: MA Experiment 108585 PARAMETER Experiment Name: At_5mM_NaNP_cDNA_P Parameter: Timepoint (hr) Value: 6
  misc_feature: MA Experiment 108585 PARAMETER Experiment Name: At_5mM_NaNP_cDNA_P Parameter: Tissue Value: Aerial
  misc_feature: MA Experiment 108585 PARAMETER Experiment Name: At_5mM_NaNP_cDNA_P Parameter: Treatment Value: null
  misc_feature: MA Experiment ID: 108595 Result: Down-regulated in Transcription
  misc_feature: MA Experiment 108595 PARAMETER Experiment Name: At_Ler-pi_Ovule_cDNA_P Parameter: Plant Line Value: null
  misc_feature: MA Experiment ID: 108609 Result: Down-regulated in Transcription
  misc_feature: MA Experiment 108609 PARAMETER Experiment Name: At_100uM_ABA_cDNA_P Parameter: Timepoint (hr) Value: 24
  misc_feature: MA Experiment 108609 PARAMETER Experiment Name: At_100uM_ABA_cDNA_P Parameter: Tissue Value: Aerial
  misc_feature: MA Experiment 108609 PARAMETER Experiment Name: At_100uM_ABA_cDNA_P Parameter: Treatment Value: 100uM ABA vs. No Treatment
  misc_feature: MA Experiment ID: 20000111 Result: Down-regulated in Transcription
  misc_feature: MA Experiment 20000111 PARAMETER Experiment Name: At_42deg_Heat_cDNA_P Parameter: Temperature (deg C) Value: 42 vs. 22
  misc_feature: MA Experiment 20000111 PARAMETER Experiment Name: At_42deg_Heat_cDNA_P Parameter: Timepoint (hr) Value: 6
  misc_feature: MA Experiment 20000111 PARAMETER Experiment Name: At_42deg_Heat_cDNA_P Parameter: Tissue Value: Aerial
  misc_feature: MA Experiment ID: 20000113 Result: Down-regulated in Transcription
  misc_feature: MA Experiment 20000113 PARAMETER Experiment Name: At_42deg_Heat_cDNA_P Parameter: Temperature (deg C) Value: 42 vs. 22
  misc_feature: MA Experiment 20000113 PARAMETER Experiment Name: At_42deg_Heat_cDNA_P Parameter: Timepoint (hr) Value: 8
  misc_feature: MA Experiment 20000113 PARAMETER Experiment Name: At_42deg_Heat_cDNA_P Parameter: Tissue Value: Aerial
  misc_feature: MA Experiment ID: 20000173 Result: Down-regulated in Transcription
  misc_feature: MA Experiment 20000173 PARAMETER Experiment Name: At_42deg_Heat_P Parameter: Age (day) Value: 14
  misc_feature: MA Experiment 20000173 PARAMETER Experiment Name: At_42deg_Heat_P Parameter: Organism Value: A. thaliana
  misc_feature: MA Experiment 20000173 PARAMETER Experiment Name: At_42deg_Heat_P Parameter: Plant Line Value: WS
  misc_feature: MA Experiment 20000173 PARAMETER Experiment Name: At_42deg_Heat_P Parameter: Temperature (deg C) Value: 42 vs. 22
  misc_feature: MA Experiment 20000173 PARAMETER Experiment Name: At_42deg_Heat_P Parameter: Timepoint (hr) Value: 6
  misc_feature: MA Experiment 20000173 PARAMETER Experiment Name: At_42deg_Heat_P Parameter: Tissue Value: Aerial
  misc_feature: MA Experiment ID: 20000185 Result: Down-regulated in Transcription
  misc_feature: MA Experiment 20000185 PARAMETER Experiment Name: At_Roots__P Parameter: Age (day) Value: 7 vs. 21
  misc_feature: MA Experiment 20000185 PARAMETER Experiment Name: At_Roots__P Parameter: Organism Value: A. thaliana
  misc_feature: MA Experiment 20000185 PARAMETER Experiment Name: At_Roots__P Parameter: Tissue Value: Roots vs. Whole Plant
  misc_feature: MA Experiment ID: 20000437 Result: Down-regulated in Transcription
  misc_feature: MA Experiment 20000437 PARAMETER Experiment Name: At_Drought_P Parameter: Age (day) Value: 8
  misc_feature: MA Experiment 20000437 PARAMETER Experiment Name: At_Drought_P Parameter: Organism Value: A. thaliana
  misc_feature: MA Experiment 20000437 PARAMETER Experiment Name: At_Drought_P Parameter: Plant Line Value: WS
  misc_feature: MA Experiment 20000437 PARAMETER Experiment Name: At_Drought_P Parameter: Timepoint (hr) Value: 24
  misc_feature: MA Experiment 20000437 PARAMETER Experiment Name: At_Drought_P Parameter: Tissue Value: Whole Plant
  misc_feature: MA Experiment 20000437 PARAMETER Experiment Name: At_Drought_P Parameter: Treatment Value: Drought vs. No Drought
  misc_feature: MA Experiment ID: 20000453 Result: Down-regulated in Transcription
  misc_feature: MA Experiment 20000453 PARAMETER Experiment Name: At_100uM_ABA_P Parameter: Age (day) Value: 15
  misc_feature: MA Experiment 20000453 PARAMETER Experiment Name: At_100uM_ABA_P Parameter: Organism Value: A. thaliana
  misc_feature: MA Experiment 20000453 PARAMETER Experiment Name: At_100uM_ABA_P Parameter: Plant Line Value: WS
  misc_feature: MA Experiment 20000453 PARAMETER Experiment Name: At_100uM_ABA_P Parameter: Timepoint (hr) Value: 24
  misc_feature: MA Experiment 20000453 PARAMETER Experiment Name: At_100uM_ABA_P Parameter: Tissue Value: Aerial
  misc_feature: MA Experiment 20000453 PARAMETER Experiment Name: At_100uM_ABA_P Parameter: Treatment Value: 100uM ABA vs. No Treatment
  misc_feature: MA Experiment ID: 20000794 Result: Down-regulated in Transcription
  misc_feature: MA Experiment 20000794 PARAMETER Experiment Name: At_Petals_P Parameter: Age (day) Value: 23-25 days
  misc_feature: MA Experiment 20000794 PARAMETER Experiment Name: At_Petals_P Parameter: Plant Line Value: WS
  misc_feature: MA Experiment 20000794 PARAMETER Experiment Name: At_Petals_P Parameter: Tissue Value: Petals vs. Whole plant
  misc_feature: MA Experiment ID: 20001247 Result: Down-regulated in Transcription
  misc_feature: MA Experiment 20001247 PARAMETER Experiment Name: At_Far-red-induction_P Parameter: Age (day) Value: 7
  misc_feature: MA Experiment 20001247 PARAMETER Experiment Name: At_Far-red-induction_P Parameter: Light Value: Far-red vs. White
  misc_feature: MA Experiment 20001247 PARAMETER Experiment Name: At_Far-red-induction_P Parameter: Organism Value: A. thaliana
  misc_feature: MA Experiment 20001247 PARAMETER Experiment Name: At_Far-red-induction_P Parameter: Plant Line Value: Columbia
  misc_feature: MA Experiment 20001247 PARAMETER Experiment Name: At_Far-red-induction_P Parameter: Timepoint (hr) Value: 1
  misc_feature: MA Experiment 20001247 PARAMETER Experiment Name: At_Far-red-induction_P Parameter: Tissue Value: Whole Plant
  misc_feature: MA Experiment ID: 20001451 Result: Down-regulated in Transcription
  misc_feature: MA Experiment 20001451 PARAMETER Experiment Name: At_Far-red-induction_P Parameter: Age (day) Value: 7
  misc_feature: MA Experiment 20001451 PARAMETER Experiment Name: At_Far-red-induction_P Parameter: Light Value: Far-red vs. White
  misc_feature: MA Experiment 20001451 PARAMETER Experiment Name: At_Far-red-induction_P Parameter: Organism Value: A. thaliana
  misc_feature: MA Experiment 20001451 PARAMETER Experiment Name: At_Far-red-induction_P Parameter: Plant Line Value: Columbia
  misc_feature: MA Experiment 20001451 PARAMETER Experiment Name: At_Far-red-induction_P Parameter: Timepoint (hr) Value: 24
  misc_feature: MA Experiment 20001451 PARAMETER Experiment Name: At_Far-red-induction_P Parameter: Tissue Value: Whole Plant
  misc_feature: MA Experiment ID: 20001458 Result: Up-regulated in Transcription
  misc_feature: MA Experiment 20001458 PARAMETER Experiment Name: At_50mM_NH4NO3_L-to-H_P Parameter: Age (day) Value: Undefined
  misc_feature: MA Experiment 20001458 PARAMETER Experiment Name: At_50mM_NH4NO3_L-to-H_P Parameter: Organism Value: Undefined
  misc_feature: MA Experiment 20001458 PARAMETER Experiment Name: At_50mM_NH4NO3_L-to-H_P Parameter: Plant Line Value: Undefined
  misc_feature: MA Experiment 20001458 PARAMETER Experiment Name: At_50mM_NH4NO3_L-to-H_P Parameter: Timepoint (hr) Value: 2
  misc_feature: MA Experiment 20001458 PARAMETER Experiment Name: At_50mM_NH4NO3_L-to-H_P Parameter: Tissue Value: Siliques
  misc_feature: MA Experiment 20001458 PARAMETER Experiment Name: At_50mM_NH4NO3_L-to-H_P Parameter: Treatment Value: 50mM NH4NO3 vs. 100mM Manitol
  misc_feature: MA Experiment ID: 20001557 Result: Down-regulated in Transcription
  misc_feature: MA Experiment 20001557 PARAMETER Experiment Name: At_Drought_Soil_Dry_P Parameter: Age (day) Value: 27
  misc_feature: MA Experiment 20001557 PARAMETER Experiment Name: At_Drought_Soil_Dry_P Parameter: Organism Value: A. thaliana
  misc_feature: MA Experiment 20001557 PARAMETER Experiment Name: At_Drought_Soil_Dry_P Parameter: Plant Line Value: WS
  misc_feature: MA Experiment 20001557 PARAMETER Experiment Name: At_Drought_Soil_Dry_P Parameter: Post Timepoint (hr) Value: 3
  misc_feature: MA Experiment 20001557 PARAMETER Experiment Name: At_Drought_Soil_Dry_P Parameter: Post-Treatment Value: Re-Water vs. No Drought
  misc_feature: MA Experiment 20001557 PARAMETER Experiment Name: At_Drought_Soil_Dry_P Parameter: Timepoint (day) Value: 13
  misc_feature: MA Experiment 20001557 PARAMETER Experiment Name: At_Drought_Soil_Dry_P Parameter: Treatment Value: Drought vs. No Drought
  misc_feature: MA Experiment ID: 20001757 Result: Up-regulated in Transcription
  misc_feature: MA Experiment 20001757 PARAMETER Experiment Name: At_50mM_NH4NO3_L-to-H_P Parameter: Timepoint (hr) Value: 6
  misc_feature: MA Experiment 20001757 PARAMETER Experiment Name: At_50mM_NH4NO3_L-to-H_P Parameter: Tissue Value: Leaf
  misc_feature: MA Experiment 20001757 PARAMETER Experiment Name: At_50mM_NH4NO3_L-to-H_P Parameter: Treatment Value: 50mM NH4NO3 vs 100mM Mannitol
  misc_feature: MA Experiment ID: 20001904 Result: Down-regulated in Transcription
  misc_feature: MA Experiment 20001904 PARAMETER Experiment Name: At_Drought_Reproduction_P Parameter: Age (day) Value: 37
  misc_feature: MA Experiment 20001904 PARAMETER Experiment Name: At_Drought_Reproduction_P Parameter: Organism Value: A. thaliana
  misc_feature: MA Experiment 20001904 PARAMETER Experiment Name: At_Drought_Reproduction_P Parameter: Plant Line Value: WS
  misc_feature: MA Experiment 20001904 PARAMETER Experiment Name: At_Drought_Reproduction_P Parameter: Timepoint (day) Value: 7
  misc_feature: MA Experiment 20001904 PARAMETER Experiment Name: At_Drought_Reproduction_P Parameter: Tissue Value: Rosettes
  misc_feature: MA Experiment 20001904 PARAMETER Experiment Name: At_Drought_Reproduction_P Parameter: Treatment Value: Drought vs. No Drought
  misc_feature: MA Experiment ID: 20001906 Result: Down-regulated in Transcription
  misc_feature: MA Experiment 20001906 PARAMETER Experiment Name: At_Drought_Reproduction_P Parameter: Age (day) Value: 35
  misc_feature: MA Experiment 20001906 PARAMETER Experiment Name: At_Drought_Reproduction_P Parameter: Organism Value: A. thaliana
  misc_feature: MA Experiment 20001906 PARAMETER Experiment Name: At_Drought_Reproduction_P Parameter: Plant Line Value: WS
  misc_feature: MA Experiment 20001906 PARAMETER Experiment Name: At_Drought_Reproduction_P Parameter: Timepoint (day) Value: 5
  misc_feature: MA Experiment 20001906 PARAMETER Experiment Name: At_Drought_Reproduction_P Parameter: Tissue Value: Siliques
  misc_feature: MA Experiment 20001906 PARAMETER Experiment Name: At_Drought_Reproduction_P Parameter: Treatment Value: Drought vs. No Drought
  misc_feature: MA Experiment ID: 20001908 Result: Down-regulated in Transcription
  misc_feature: MA Experiment 20001908 PARAMETER Experiment Name: At_Drought_Reproduction_P Parameter: Age (day) Value: 40
  misc_feature: MA Experiment 20001908 PARAMETER Experiment Name: At_Drought_Reproduction_P Parameter: Organism Value: A. thaliana
  misc_feature: MA Experiment 20001908 PARAMETER Experiment Name: At_Drought_Reproduction_P Parameter: Plant Line Value: WS
  misc_feature: MA Experiment 20001908 PARAMETER Experiment Name: At_Drought_Reproduction_P Parameter: Timepoint (day) Value: 10
  misc_feature: MA Experiment 20001908 PARAMETER Experiment Name: At_Drought_Reproduction_P Parameter: Tissue Value: Siliques
  misc_feature: MA Experiment 20001908 PARAMETER Experiment Name: At_Drought_Reproduction_P Parameter: Treatment Value: Drought vs. No Drought
aatccttttccttcttcttgttgccctagtacgagaggaccgggaaggacgcaatatataggatactagatagagagtgactgaaggagagaaaaacaaaaatggcgattgtttccgtctctaactcttttctcactttcaattctcccaatcagctccgatttagccgaagaagattctctgccatggcttcttcaactactggagtgagagtcgctgaaggagaaggcaatttgccaaaacttgtccttacttctcctcagaacagcgaggctgagatatatctcttcggaggctgcattacttcttggaaagttgcgagcggtaaagatcttctttttgtcagaccagatgctgtcttcaataagattaagcccattagcggagggattccacattgttttccacagtttggacctgggctaattcaacagcatgggtttggaaggaacatggactggtctgttgtcgattcccagaatgcagatgacaatgctgctgttactcttgagcttaaggatggtccctatagtcgagccatgtgggactttgctttccaggctctatacaaggtcattgttggcgcggactccctttccactgagctaaagattacaaacacagacgataaaccattttctttcagcactgcgttgcatacttacttccgtgcttcttctgcgggggcctccgtgagaggtctaaagggttgtaaaactctcaataaggatccagaccctaagaacccaatagagggtaaagaagacagggatgcagtcacttttcctggatttgtggataccgtctatcttgatgctcccaatgaattgcagtttgataatggcttgggtgataaaataatcatcaaaaacacaaattggtcggatgcggtcttgtggaacccgcatactcagatggaggcttgttacagagactttgtgtgcgtggaaaatgcaaagcttggggatgtcaagctagagccgggacagtcttggactgcaacacaacttctcagcatcagttgaaaacattgtactttaaacttataatgtccagtggatccattttcttaagcaataaaagttttatttcctctccc

SEQ ID NO: 77890 - protein, 307 aa, Arabidopsis thaliana; identical to SEQ ID NO: 23063
  peptide (1)..(307): Ceres Seq. ID no. 12580955
  misc_feature (46)..(305): Pfam Name: Aldose 1-epimerase Pfam Description: Aldose 1-epimerase
  misc_feature (1)..(307): Homolog of NCBI NO: 15240009 NR Description: apospory-associated protein C-like; protein id:
  misc_feature (36)..(306): Homolog of NCBI NO: 6970044 NR Description: apospory-associated protein C; APOC
  misc_feature (36)..(279): Homolog of NCBI NO: 38344152 NR Description: OSJNBa0041A02.19 [Oryza sativa (japonica
  misc_feature (29)..(287): Homolog of NCBI NO: 15242099 NR Description: apospory-associated protein C; protein id:
  misc_feature (45)..(279): Homolog of NCBI NO: 2501555 NR Description: POSSIBLE APOSPORY-ASSOCIATED PROTEIN C
  misc_feature (38)..(279): Homolog of NCBI NO: 40253263 NR Description: putative Aldose 1-epimerase [Oryza sativa
  misc_feature (36)..(287): Homolog of NCBI NO: 19387263 NR Description: putative apospory-associated protein C [Oryza
  misc_feature (40)..(307): Homolog of NCBI NO: 16612258 NR Description: AT3g01590/F4P13_13 [Arabidopsis thaliana]
  misc_feature (40)..(307): Homolog of NCBI NO: 18395868 NR Description: expressed protein; protein id: At3g01590.1, by cDNA: 41354., supported by cDNA: gi_16612257, supported by gi_20258972 [Arabidopsis thaliana]
  misc_feature (40)..(306): Homolog of NCBI NO: 21593295 NR Description: possible apospory-associated like protein

SEQ ID NO: 77891 - protein, 279 aa, Arabidopsis thaliana; identical to SEQ ID NO: 23064
  peptide (1)..(279): Ceres Seq. ID no. 12580956
  misc_feature (18)..(277): Pfam Name: Aldose 1-epimerase Pfam Description: Aldose 1-epimerase
  misc_feature (1)..(279): Homolog of NCBI NO: 15240009 NR Description: apospory-associated protein C-like; protein id:
  misc_feature (8)..(278): Homolog of NCBI NO: 6970044 NR Description: apospory-associated protein C; APOC
  misc_feature (8)..(251): Homolog of NCBI NO: 38344152 NR Description: OSJNBa0041A02.19 [Oryza sativa (japonica
  misc_feature (1)..(259): Homolog of NCBI NO: 15242099 NR Description: apospory-associated protein C; protein id:
  misc_feature (17)..(251): Homolog of NCBI NO: 2501555 NR Description: POSSIBLE APOSPORY-ASSOCIATED PROTEIN C
  misc_feature (10)..(251): Homolog of NCBI NO: 40253263 NR Description: putative Aldose 1-epimerase [Oryza sativa
  misc_feature (8)..(259): Homolog of NCBI NO: 19387263 NR Description: putative apospory-associated protein C [Oryza
  misc_feature (12)..(279): Homolog of NCBI NO: 16612258 NR Description: AT3g01590/F4P13_13 [Arabidopsis thaliana]
  misc_feature (12)..(279): Homolog of NCBI NO: 18395868 NR Description: expressed protein; protein id: At3g01590.1, by cDNA: 41354., supported by cDNA: gi_16612257, supported by gi_20258972 [Arabidopsis thaliana]
  misc_feature (12)..(278): Homolog of NCBI NO: 21593295 NR Description: possible apospory-associated like protein

SEQ ID NO: 77892 - protein, 190 aa, Arabidopsis thaliana; identical to SEQ ID NO: 23065
  peptide (1)..(190): Ceres Seq. ID no. 12580957
  misc_feature (1)..(188): Pfam Name: Aldose 1-epimerase Pfam Description: Aldose 1-epimerase
  misc_feature (1)..(190): Homolog of NCBI NO: 15240009 NR Description: apospory-associated protein C-like; protein id:
  misc_feature (1)..(189): Homolog of NCBI NO: 6970044 NR Description: apospory-associated protein C; APOC
  misc_feature (1)..(162): Homolog of NCBI NO: 38344152 NR Description: OSJNBa0041A02.19 [Oryza sativa (japonica
  misc_feature (1)..(170): Homolog of NCBI NO: 15242099 NR Description: apospory-associated protein C; protein id:
  misc_feature (1)..(162): Homolog of NCBI NO: 2501555 NR Description: POSSIBLE APOSPORY-ASSOCIATED PROTEIN C
  misc_feature (1)..(162): Homolog of NCBI NO: 40253263 NR Description: putative Aldose 1-epimerase [Oryza sativa
  misc_feature (1)..(170): Homolog of NCBI NO: 19387263 NR Description: putative apospory-associated protein C [Oryza
  misc_feature (1)..(190): Homolog of NCBI NO: 16612258 NR Description: AT3g01590/F4P13_13 [Arabidopsis thaliana]
  misc_feature (1)..(190): Homolog of NCBI NO: 18395868 NR Description: expressed protein; protein id: At3g01590.1, by cDNA: 41354., supported by cDNA: gi_16612257, supported by gi_20258972 [Arabidopsis thaliana]
  misc_feature (1)..(189): Homolog of NCBI NO: 21593295 NR Description: possible apospory-associated like protein

SEQ ID NO: 77893 - DNA, 2736 bp, Arabidopsis thaliana
  misc_feature (1)..(2736): Ceres Seq. ID no. 12580958
  misc_feature: MA Experiment ID: 20000234 Result: Down-regulated in Transcription
  misc_feature: MA Experiment 20000234 PARAMETER Experiment Name: At_Siliques_P Parameter: Age (day) Value: 21
  misc_feature: MA Experiment 20000234 PARAMETER Experiment Name: At_Siliques_P Parameter: Organism Value: A. thaliana
  misc_feature: MA Experiment 20000234 PARAMETER Experiment Name: At_Siliques_P Parameter: Plant Line Value: WS
  misc_feature: MA Experiment 20000234 PARAMETER Experiment Name: At_Siliques_P Parameter: Tissue Value: Less Than 5mm Siliques vs. Whole Plant
  misc_feature: MA Experiment ID: 20000264 Result: Down-regulated in Transcription
  misc_feature: MA Experiment 20000264 PARAMETER Experiment Name: At_Open_Flower_P Parameter: Age (day) Value: 21
  misc_feature: MA Experiment 20000264 PARAMETER Experiment Name: At_Open_Flower_P Parameter: Plant Line Value: WS
  misc_feature: MA Experiment 20000264 PARAMETER Experiment Name: At_Open_Flower_P Parameter: Tissue Value: Open Flower vs. Whole Plant
  misc_feature: MA Experiment ID: 20000265 Result: Down-regulated in Transcription
  misc_feature: MA Experiment 20000265 PARAMETER Experiment Name: At_Open_Flower_P Parameter: Age (day) Value: 21
  misc_feature: MA Experiment 20000265 PARAMETER Experiment Name: At_Open_Flower_P Parameter: Plant Line Value: WS
  misc_feature: MA Experiment 20000265 PARAMETER Experiment Name: At_Open_Flower_P Parameter: Tissue Value: Closed Flower vs. Whole Plant
  misc_feature: MA Experiment ID: 20000794 Result: Down-regulated in Transcription
  misc_feature: MA Experiment 20000794 PARAMETER Experiment Name: At_Petals_P Parameter: Age (day) Value: 23-25 days
  misc_feature: MA Experiment 20000794 PARAMETER Experiment Name: At_Petals_P Parameter: Plant Line Value: WS
  misc_feature: MA Experiment 20000794 PARAMETER Experiment Name: At_Petals_P Parameter: Tissue Value: Petals vs. Whole plant
  misc_feature: MA Experiment ID: 20001248 Result: Up-regulated in Transcription
  misc_feature: MA Experiment 20001248 PARAMETER Experiment Name: At_Far-red-induction_P Parameter: Age (day) Value: 7
  misc_feature: MA Experiment 20001248 PARAMETER Experiment Name: At_Far-red-induction_P Parameter: Light Value: Far-red vs. White
  misc_feature: MA Experiment 20001248 PARAMETER Experiment Name: At_Far-red-induction_P Parameter: Organism Value: A. thaliana
  misc_feature: MA Experiment 20001248 PARAMETER Experiment Name: At_Far-red-induction_P Parameter: Plant Line Value: Columbia
  misc_feature: MA Experiment 20001248 PARAMETER Experiment Name: At_Far-red-induction_P Parameter: Timepoint (hr) Value: 4
  misc_feature: MA Experiment 20001248 PARAMETER Experiment Name: At_Far-red-induction_P Parameter: Tissue Value: Whole Plant
  misc_feature: MA Experiment ID: 20001450 Result: Up-regulated in Transcription
  misc_feature: MA Experiment 20001450 PARAMETER Experiment Name: At_Far-red-induction_P Parameter: Age (day) Value: 7
  misc_feature: MA Experiment 20001450 PARAMETER Experiment Name: At_Far-red-induction_P Parameter: Light Value: Far-red vs. White
  misc_feature: MA Experiment 20001450 PARAMETER Experiment Name: At_Far-red-induction_P Parameter: Organism Value: A. thaliana
  misc_feature: MA Experiment 20001450 PARAMETER Experiment Name: At_Far-red-induction_P Parameter: Plant Line Value: Columbia
  misc_feature: MA Experiment 20001450 PARAMETER Experiment Name: At_Far-red-induction_P Parameter: Timepoint (hr) Value: 8
  misc_feature: MA Experiment 20001450 PARAMETER Experiment Name: At_Far-red-induction_P Parameter: Tissue Value: Whole Plant
  misc_feature: MA Experiment ID: 20001757 Result: Up-regulated in Transcription
  misc_feature: MA Experiment 20001757 PARAMETER Experiment Name: At_50mM_NH4NO3_L-to-H_P Parameter: Timepoint (hr) Value: 6
  misc_feature: MA Experiment 20001757 PARAMETER Experiment Name: At_50mM_NH4NO3_L-to-H_P Parameter: Tissue Value: Leaf
  misc_feature: MA Experiment 20001757 PARAMETER Experiment Name: At_50mM_NH4NO3_L-to-H_P Parameter: Treatment Value: 50mM NH4NO3 vs 100mM Mannitol
ggcggctgcggccatttttttcttctttctctcttctattctatctcttaaaccctagatttgatctgggtttttcctgattccatttagggtttctctatcttcttttttttcttcttcttcttctttctctttggtcgcatccccttttatccgagaaggatctatccaaatctttgtttgtcgaatctcctctcatggctaccgttgctcctcctgctgatcaagctacagatctgttgcagaaactatccttggactcgccagcaaaagcttcagagatccctgagcctaacaagaagactgccgtctaccagtatggaggcgttgatgttcatggtcaagttccttcttatgatcgatctttgacaccaatgcttcccagtgatgctgctgacccttcagtttgctatgttcctaatccttacaatccctaccagtattacaatgtatatgggagtggtcaagagtggactgactacccagcttacacaaatcctgagggtgttgacatgaattctggaatttatggagagaatgggactgttgtgtatcctcagggttatgggtatgcagcgtatccttactcgccagcaactagccctgctccacagcttggcggggaagggcagttgtacggtgctcagcagtatcagtatcctaactattttccaaacagtggaccgtatgcttcatctgtggctacacctacccagccggatctctctgcaaacaaacctgctggtgtgaagacactacctgcggatagcaataatgttgcttctgctgctggtatcacaaaaggaagtaatggatcagctccagtgaaaccaactaaccaggctacccttaacacctcaagtaatttgtatggtatgggtgctccaggaggaggtttggctgctggttatcaggaccccaggtatgcctatgaagggtattatgctcctgtgccgtggcacgatggctctaagtactctgatgtgcagagacctgtttctggtagtggagttgcatcctcctattctaagtctagcacagtaccttcatcgaggaatcaaaactaccgctcaaattctcactacacgagcgtgcaccagccttcatcagtgactggctatggtacagctcaggggtactacaacaggatgtatcagaacaagttatatggtcagtatggtagcacagggagatctgctttgggttatggttcatctgggtatgattcaagaacaaatggaagaggatgggcggccacagacaacaaatacagaagctggggcaggggtaacagttactattacggaaatgagaacaatgtagatggtttgaatgaacttaacaggggacctagagctaagggcacaaagaaccagaagggaaatctagatgatagcttagaggttaaggagcagactggagaatcaaatgtaactgaggttggggaggcggataacacatgtgttgttcctgacagagaacagtacaataaagaagatttcccagtggattatgcaaatgccatgttctttatcatcaagtcatacagtgaagatgatgtgcacaagagcattaaatataatgtttgggctagcacaccaaatggaaacaagaagcttgctgcagcataccaggaagctcaacagaaagctggcggctgtcccatctttctgtttttctcggtcaatgcaagtggacaatttgttggtcttgctgaaatgacaggaccagttgatttcaacacaaatgtggagtactggcagcaagataagtggaccggctctttccccctcaagtggcatattgtgaaggatgtgccaaacagtttactgaagcatattactttagagaacaatgagaacaaacctgttaccaacagcagagacacacaagaggttaagttggagcaaggtttgaagattgtgaaaattttcaaggagcatagcagcaagacttgcattttggatgatttctcattctacgaggttcgacagaagactatcttggagaagaaagccaagcaaacccagaaacaggtaagcgaggagaaggtaaccgatgaaaagaaggaatctgcaactgcagagtcagcgagcaaggaatctcctgcagctgttcaaacgtccagtgatgttaaggttgctgagaatgggtctgttgctaaaccagtcacaggcgatgtggtggcaaatggttgctaactaagaggatggtgtcgctcacggcatgggcataaaactgactagagatgaagatatgaacaatcccgtttaacgtttctcttgagaagaagattgccgtgagccttgaagcatggaaggagctttagtacctgagacggatccgtttctttgcccttagaagtttaaatcccagttatttttttttcaatcttttcttgttttcatttttccttttcttcaaaatcgcagtctcgttacaagtttatgttgggtttctttttcattttctgttgttcctaccctgtaaaaatgcgcataggacctactaaatcgtgggaagaattagagaaaaggagataaaagcagggtgggattttgttttttcatgtctgttggatttttaggcagagttttcttttcttttggtttcttgctttggtttcagacttgactctcttgagtcgtttagaatttgagatggtcttttgcctctctcgtcttgtttctgtcattctccaaagttatctgaatcaatccatgttttaagattttc

SEQ ID NO: 77894 - protein, 667 aa, Arabidopsis thaliana; identical to SEQ ID NO: 45803
  peptide (1)..(667): Ceres Seq. ID no. 12580959
  misc_feature (492)..(582): Pfam Name: YT521-B-like family Pfam Description: YT521-B-like family
  misc_feature (130)..(623): Homolog of NCBI NO: 18405397 NR Description: expressed protein; protein id: At1g55500.1, by cDNA: gi_15215791 [Arabidopsis thaliana] At1g55500/T5A14_10 [Arabidopsis thaliana]
  misc_feature (130)..(617): Homolog of NCBI NO: 25372787 NR Description: Rubisco subunit binding-protein beta subunit - Arabidopsis thaliana >gi|4204265|gb|AAD10646.1| Hypothetical
  misc_feature (2)..(659): Homolog of NCBI NO: 22773231 NR Description: Putative RNA-binding protein [Oryza sativa
  misc_feature (8)..(666): Homolog of NCBI NO: 18087662 NR Description: putative RNA-binding protein [Oryza sativa]
  misc_feature (291)..(667): Homolog of NCBI NO: 15912287 NR Description: AT5g61020/maf19_20 [Arabidopsis thaliana]
  misc_feature (291)..(667): Homolog of NCBI NO: 30697464 NR Description: expressed protein [Arabidopsis thaliana]
  misc_feature (291)..(667): Homolog of NCBI NO: 30697466 NR Description: expressed protein [Arabidopsis thaliana] contains similarity to unknown [Arabidopsis thaliana] >gi|17529254|gb|AAL38854.1| unknown
  misc_feature (87)..(660): Homolog of NCBI NO: 34395023 NR Description: high-glucose-regulated protein 8-like [Oryza
  misc_feature (78)..(413): Homolog of NCBI NO: 18405397 NR Description: expressed protein; protein id: At1g55500.1, by cDNA: gi_15215791 [Arabidopsis thaliana] At1g55500/T5A14_10 [Arabidopsis thaliana]
  misc_feature (286)..(614): Homolog of NCBI NO: 6223640 NR Description: unknown protein [Arabidopsis thaliana]

SEQ ID NO: 77895 - protein, 608 aa, Arabidopsis thaliana; identical to SEQ ID NO: 45804
  peptide (1)..(608): Ceres Seq. ID no. 12580960
  misc_feature (433)..(523): Pfam Name: YT521-B-like family Pfam Description: YT521-B-like family
  misc_feature (71)..(564): Homolog of NCBI NO: 18405397 NR Description: expressed protein; protein id: At1g55500.1, by cDNA: gi_15215791 [Arabidopsis thaliana] At1g55500/T5A14_10 [Arabidopsis thaliana]
  misc_feature (71)..(558): Homolog of NCBI NO: 25372787 NR Description: Rubisco subunit binding-protein beta subunit - Arabidopsis thaliana >gi|4204265|gb|AAD10646.1| Hypothetical
  misc_feature (1)..(600): Homolog of NCBI NO: 22773231 NR Description: Putative RNA-binding protein [Oryza sativa
  misc_feature (1)..(607): Homolog of NCBI NO: 18087662 NR Description: putative RNA-binding protein [Oryza sativa]
  misc_feature (232)..(608): Homolog of NCBI NO: 15912287 NR Description: AT5g61020/maf19_20 [Arabidopsis thaliana]
  misc_feature (232)..(608): Homolog of NCBI NO: 30697464 NR Description: expressed protein [Arabidopsis thaliana]
  misc_feature (232)..(608): Homolog of NCBI NO: 30697466 NR Description: expressed protein [Arabidopsis thaliana] contains similarity to unknown [Arabidopsis thaliana] >gi|17529254|gb|AAL38854.1| unknown
  misc_feature (28)..(601): Homolog of NCBI NO: 34395023 NR Description: high-glucose-regulated protein 8-like [Oryza
  misc_feature (19)..(354): Homolog of NCBI NO: 18405397 NR Description: expressed protein; protein id: At1g55500.1, by cDNA: gi_15215791 [Arabidopsis thaliana] At1g55500/T5A14_10 [Arabidopsis thaliana]
  misc_feature (227)..(555): Homolog of NCBI NO: 6223640 NR Description: unknown protein [Arabidopsis thaliana]

SEQ ID NO: 77896 - protein, 562 aa, Arabidopsis thaliana; identical to SEQ ID NO: 45805
  peptide (1)..(562): Ceres Seq. ID no. 12580961
  misc_feature (387)..(477): Pfam Name: YT521-B-like family Pfam Description: YT521-B-like family
  misc_feature (25)..(518): Homolog of NCBI NO: 18405397 NR Description: expressed protein; protein id: At1g55500.1, by cDNA: gi_15215791 [Arabidopsis thaliana] At1g55500/T5A14_10 [Arabidopsis thaliana]
  misc_feature (25)..(512): Homolog of NCBI NO: 25372787 NR Description: Rubisco subunit binding-protein beta subunit - Arabidopsis thaliana >gi|4204265|gb|AAD10646.1| Hypothetical
  misc_feature (1)..(554): Homolog of NCBI NO: 22773231 NR Description: Putative RNA-binding protein [Oryza sativa
  misc_feature (1)..(561): Homolog of NCBI NO: 18087662 NR Description: putative RNA-binding protein [Oryza sativa]
  misc_feature (186)..(562): Homolog of NCBI NO: 15912287 NR Description: AT5g61020/maf19_20 [Arabidopsis thaliana]
  misc_feature (186)..(562): Homolog of NCBI NO: 30697466 NR Description: expressed protein [Arabidopsis thaliana] contains similarity to unknown [Arabidopsis thaliana] >gi|17529254|gb|AAL38854.1| unknown
  misc_feature (186)..(562): Homolog of NCBI NO: 30697464 NR Description: expressed protein [Arabidopsis thaliana]
  misc_feature (1)..(555): Homolog of NCBI NO: 34395023 NR Description: high-glucose-regulated protein 8-like [Oryza
  misc_feature (1)..(308): Homolog of NCBI NO: 18405397 NR Description: expressed protein; protein id: At1g55500.1, by cDNA: gi_15215791 [Arabidopsis thaliana] At1g55500/T5A14_10 [Arabidopsis thaliana]
  misc_feature (181)..(509): Homolog of NCBI NO: 6223640 NR Description: unknown protein [Arabidopsis thaliana]

SEQ ID NO: 77897 - DNA, 1757 bp, Arabidopsis thaliana
  misc_feature (1)..(1757): Ceres Seq. ID no. 12580962
  misc_feature: MA Experiment ID: 20000307 Result: Up-regulated in Transcription
  misc_feature: MA Experiment 20000307 PARAMETER Experiment Name: At_Germinating_Seeds_Sub_P Parameter: Age (hr) Value: 24 vs. 0
  misc_feature: MA Experiment 20000307 PARAMETER Experiment Name: At_Germinating_Seeds_Sub_P Parameter: Organism Value: A. thaliana
  misc_feature: MA Experiment 20000307 PARAMETER Experiment Name: At_Germinating_Seeds_Sub_P Parameter: Plant Line Value: WS
  misc_feature: MA Experiment 20000307 PARAMETER Experiment Name: At_Germinating_Seeds_Sub_P Parameter: Tissue Value: Germinating Seeds
  misc_feature: MA Experiment ID: 20000328 Result: Down-regulated in Transcription
  misc_feature: MA Experiment 20000328 PARAMETER Experiment Name: At_42deg_Heat_Sub_P Parameter: Age (day) Value: 14
  misc_feature: MA Experiment 20000328 PARAMETER Experiment Name: At_42deg_Heat_Sub_P Parameter: Organism Value: A. thaliana
  misc_feature: MA Experiment 20000328 PARAMETER Experiment Name: At_42deg_Heat_Sub_P Parameter: Plant Line Value: WS
  misc_feature: MA Experiment 20000328 PARAMETER Experiment Name: At_42deg_Heat_Sub_P Parameter: Temperature (deg C) Value: 42 vs. 22
  misc_feature: MA Experiment 20000328 PARAMETER Experiment Name: At_42deg_Heat_Sub_P Parameter: Timepoint (hr) Value: 6
  misc_feature: MA Experiment 20000328 PARAMETER Experiment Name: At_42deg_Heat_Sub_P Parameter: Tissue Value: Aerial
  misc_feature: MA Experiment ID: 20000349 Result: Up-regulated in Transcription
  misc_feature: MA Experiment 20000349 PARAMETER Experiment Name: At_100uM_ABA_Sub_P Parameter: Age (day) Value: 14
  misc_feature: MA Experiment 20000349 PARAMETER Experiment Name: At_100uM_ABA_Sub_P Parameter: Organism Value: A. thaliana
  misc_feature: MA Experiment 20000349 PARAMETER Experiment Name: At_100uM_ABA_Sub_P Parameter: Plant Line Value: WS
  misc_feature: MA Experiment 20000349 PARAMETER Experiment Name: At_100uM_ABA_Sub_P Parameter: Timepoint (hr) Value: 6
  misc_feature: MA Experiment 20000349 PARAMETER Experiment Name: At_100uM_ABA_Sub_P Parameter: Tissue Value: Aerial
  misc_feature: MA Experiment 20000349 PARAMETER Experiment Name: At_100uM_ABA_Sub_P Parameter: Treatment Value: 100uM ABA vs. No Treatment
  misc_feature: MA Experiment ID: 20000355 Result: Down-regulated in Transcription
  misc_feature: MA Experiment 20000355 PARAMETER Experiment Name: At_Siliques_Sub_P Parameter: Age (day) Value: 21
  misc_feature: MA Experiment 20000355 PARAMETER Experiment Name: At_Siliques_Sub_P Parameter: Organism Value: A. thaliana
  misc_feature: MA Experiment 20000355 PARAMETER Experiment Name: At_Siliques_Sub_P Parameter: Plant Line Value: WS
  misc_feature: MA Experiment 20000355 PARAMETER Experiment Name: At_Siliques_Sub_P Parameter: Tissue Value: Less Than 5mm Siliques vs. Whole Plant
gattctctctttctctctttctctcgctctctatctctctctcctctgtttgttatatcaattaatcaagaagatttcttgtgtttttttttttctgttaaagaagatttcttgggagaaaataaggtggattgaaggattagtctttaggaatggtggtggaggaggagaatagaagcatggaggaaggacttcttcagcatcaaaacgacagagatgatcgtcgtatcacagcttgtgtcatcctcagcacttttgtcgctgtttgtagtgccttcagctacggatgtgccgctggttatacttcaggcgctgagactgctatcatgaaggagttagacctttctatggcacaattttcagcgtttggctcctttctgaatgtgggaggtgcggtgggggccttgttcagcggtcaattggcagtcatcctcggcagaagacgaattctgattgatatatatcttttttttttgggtggttattaacgattaaagacgttgtgggcatgcgattttttctgcgtttttggctggctctccattgctttcgcaaagaatgtcttctggctggacttgggaagaatttccttgggcataggagtcggcttgattagctacgtggtcccagtctatattgcggaaatcactccaaaacatgttcgtggcgcatttactgcttcaaaccagcttcttcaaaacagtggagtttccctgatttatttttttgggactgtaattaattggcgggttatggccgttataggtgcaattccatgcatccttcaaacgatcggtatattttttataccggaatctccaagatggctggctaaaatccgtttaagtaaagaagtagaaagttctttgcatcgacttagagggaaagatactgatgtttcaggtgaagcagctgaaattcaggttatgacaaaaatgcttgaagaagattcaaagtctagtttctctgacatgtttcagaagaagtacagacgaactcttgtggttggaattggtttaatgttgatacaacaattatctggagctagcggtatcacatattattcaaatgccatatttagaaaagctggcttttcagagagacttggatcaatgatatttggtgtgttcgtgatcccaaaagctttggttggtctgattcttgtggatagatggggaagacgaccactcctattggcttctgctgttggaatgtccatcggatccttgcttattggagttagcttcacgttacagcaaatgaatgtgcttcctgaattgatcccaattttcgtcttcgtaaacattctggtctacttcggatgttttgcattcggtataggagggctaccttgggtcattatgtctgagatctttccgataaatataaaagtttcagcaggaacaattgtagcattaacatcatggactagtgggtggttcgtgagttacgctttcaactttatgtttgaatggagcgcacaaggaacattttacatatttgcggctgtcggaggaatgtcattcatttttatttggatgctcgtaccggaaaccaaaggacaatcattggaagaattacaagcttcgcttacggggacatcctaaatgcacatttatattgtaatatactattaattttgtttggtaaaaagataaaatttattttctgttgtcagtcgcattgcaaataataaatgtattttgtaacattatttgcatattgatattaataatattttacatttttttccttcg

SEQ ID NO: 77898 - protein, 284 aa, Arabidopsis thaliana
  peptide (1)..(284): Ceres Seq. ID no. 12580963
  misc_feature (1)..(229): Pfam Name: Sugar (and other) transporter Pfam Description: Sugar (and other) transporter
  misc_feature (1)..(284): Homolog of NCBI NO: 18397139 NR Description: putative sugar transporter; protein id: supported by cDNA: gi_16604315 [Arabidopsis thaliana] AT3g05160/T12H1_13 [Arabidopsis thaliana]
  misc_feature (1)..(229): Homolog of NCBI NO: 6729026 NR Description: putative sugar transporter [Arabidopsis thaliana]
  misc_feature (1)..(284): Homolog of NCBI NO: 18397141 NR Description: Expressed protein; protein id: At3g05165.1
  misc_feature (1)..(250): Homolog of NCBI NO: 20260272 NR Description: putative sugar transporter [Arabidopsis thaliana]
  misc_feature (1)..(127): Homolog of NCBI NO: 6729026 NR Description: putative sugar transporter [Arabidopsis thaliana]
  misc_feature (206)..(277): Homolog of NCBI NO: 6729026 NR Description: putative sugar transporter [Arabidopsis thaliana]
  misc_feature (1)..(284): Homolog of NCBI NO: 15081630 NR Description: AT3g05160/T12H1_13 [Arabidopsis thaliana]
  misc_feature (1)..(280): Homolog of NCBI NO: 18421108 NR Description: sugar transporter-like protein; protein id:
  misc_feature (1)..(280): Homolog of NCBI NO: 14585699 NR Description: sugar-porter family protein 1 [Arabidopsis
  misc_feature (1)..(280): Homolog of NCBI NO: 18421106 NR Description: sugar transporter-like protein; protein id: supported by cDNA: gi_14585698, supported by cDNA: gi_15294181
MAVIGAIPCILQTIGIFFIPESPRWLAKIRLSKEVESSLHRLRGKDTDVSGEAAEIQVMTKMLEEDSKSSFSDMFQKKYRRTLVVGIGLMLIQQLSGASGITYYSNAIFRKAGFSERLGSMIFGVFVIPKALVGLILVDRWGRRPLLLASAVGMSIGSLLIGVSFTLQQMNVLPELIPIFVFVNILVYFGCFAFGIGGLPWVIMSEIFPINIKVSAGTIVALTSWTSGWFVSYAFNFMFEWSAQGTFYIFAAVGGMSFIFIWMLVPETKGQSLEELQASLTGTS

SEQ ID NO: 77899 - protein, 226 aa, Arabidopsis thaliana
  peptide (1)..(226): Ceres Seq. ID no. 12580964
  misc_feature (1)..(171): Pfam Name: Sugar (and other) transporter Pfam Description: Sugar (and other) transporter
  misc_feature (1)..(226): Homolog of NCBI NO: 18397139 NR Description: putative sugar transporter; protein id: supported by cDNA: gi_16604315 [Arabidopsis thaliana] AT3g05160/T12H1_13 [Arabidopsis thaliana]
  misc_feature (1)..(171): Homolog of NCBI NO: 6729026 NR Description: putative sugar transporter [Arabidopsis thaliana]
  misc_feature (1)..(226): Homolog of NCBI NO: 18397141 NR Description: Expressed protein; protein id: At3g05165.1
  misc_feature (1)..(192): Homolog of NCBI NO: 20260272 NR Description: putative sugar transporter [Arabidopsis thaliana]
  misc_feature (1)..(69): Homolog of NCBI NO: 6729026 NR Description: putative sugar transporter [Arabidopsis thaliana]
  misc_feature (148)..(219): Homolog of NCBI NO: 6729026 NR Description: putative sugar transporter [Arabidopsis thaliana]
  misc_feature (1)..(226): Homolog of NCBI NO: 15081630 NR Description: AT3g05160/T12H1_13 [Arabidopsis thaliana]
  misc_feature (1)..(222): Homolog of NCBI NO: 18421108 NR Description: sugar transporter-like protein; protein id:
  misc_feature (1)..(222): Homolog of NCBI NO: 14585699 NR Description: sugar-porter family protein 1 [Arabidopsis
  misc_feature (1)..(222): Homolog of NCBI NO: 18421106 NR Description: sugar transporter-like protein; protein id: supported by cDNA: gi_14585698, supported by cDNA: gi_15294181
MTKMLEEDSKSSFSDMFQKKYRRTLVVGIGLMLIQQLSGASGITYYSNAIFRKAGFSERLGSMIFGVFVIPKALVGLILVDRWGRRPLLLASAVGMSIGSLLIGVSFTLQQMNVLPELIPIFVFVNILVYFGCFAFGIGGLPWVIMSEIFPINIKVSAGTIVALTSWTSGWFVSYAFNFMFEWSAQGTFYIFAAVGGMSFIFIWMLVPETKGQSLEELQASLTGTS

SEQ ID NO: 77900 - protein, 223 aa, Arabidopsis thaliana
  peptide (1)..(223): Ceres Seq. ID no. 12580965
  misc_feature (1)..(168): Pfam Name: Sugar (and other) transporter Pfam Description: Sugar (and other) transporter
  misc_feature (1)..(223): Homolog of NCBI NO: 18397139 NR Description: putative sugar transporter; protein id: supported by cDNA: gi_16604315 [Arabidopsis thaliana] AT3g05160/T12H1_13 [Arabidopsis thaliana]
  misc_feature (1)..(168): Homolog of NCBI NO: 6729026 NR Description: putative sugar transporter [Arabidopsis thaliana]
  misc_feature (1)..(223): Homolog of NCBI NO: 18397141 NR Description: Expressed protein; protein id: At3g05165.1
  misc_feature (1)..(189): Homolog of NCBI NO: 20260272 NR Description: putative sugar transporter [Arabidopsis thaliana]
  misc_feature (1)..(66): Homolog of NCBI NO: 6729026 NR Description: putative sugar transporter [Arabidopsis thaliana]
  misc_feature (145)..(216): Homolog of NCBI NO: 6729026 NR Description: putative sugar transporter [Arabidopsis thaliana]
  misc_feature (1)..(223): Homolog of NCBI NO: 15081630 NR Description: AT3g05160/T12H1_13 [Arabidopsis thaliana]
  misc_feature (1)..(219): Homolog of NCBI NO: 18421108 NR Description: sugar transporter-like protein; protein id:
  misc_feature (1)..(219): Homolog of NCBI NO: 14585699 NR Description: sugar-porter family protein 1 [Arabidopsis
  misc_feature (1)..(219): Homolog of NCBI NO: 18421106 NR Description: sugar transporter-like protein; protein id: supported by cDNA: gi_14585698, supported by cDNA: gi_15294181
MLEEDSKSSFSDMFQKKYRRTLVVGIGLMLIQQLSGASGITYYSNAIFRKAGFSERLGSMIFGVFVIPKALVGLILVDRWGRRPLLLASAVGMSIGSLLIGVSFTLQQMNVLPELIPIFVFVNILVYFGCFAFGIGGLPWVIMSEIFPINIKVSAGTIVALTSWTSGWFVSYAFNFMFEWSAQGTFYIFAAVGGMSFIFIWMLVPETKGQSLEELQASLTGTS

SEQ ID NO: 77901 - DNA, 1981 bp, Arabidopsis thaliana
  misc_feature (1)..(1981): Ceres Seq. ID no. 12580966
  misc_feature: MA Experiment ID: 108434 Result: Up-regulated in Transcription
  misc_feature: MA Experiment 108434 PARAMETER Experiment Name: At_Root_Tips_cDNA_P Parameter: Tissue Value: Root Tips
  misc_feature: MA Experiment ID: 108464 Result: Up-regulated in Transcription
  misc_feature: MA Experiment 108464 PARAMETER Experiment Name: At_Germinating_Seeds_cDNA_P Parameter: Age (day) Value: 4 vs. 0
  misc_feature: MA Experiment 108464 PARAMETER Experiment Name: At_Germinating_Seeds_cDNA_P Parameter: Tissue Value: Germinating Seeds
  misc_feature: MA Experiment ID: 108489 Result: Down-regulated in Transcription
  misc_feature: MA Experiment ID: 108576 Result: Up-regulated in Transcription
  misc_feature: MA Experiment 108576 PARAMETER Experiment Name: At_42deg_Heat_cDNA_P Parameter: Temperature (deg C) Value: 42 vs. 22
  misc_feature: MA Experiment 108576 PARAMETER Experiment Name: At_42deg_Heat_cDNA_P Parameter: Timepoint (hr) Value: 1
  misc_feature: MA Experiment 108576 PARAMETER Experiment Name: At_42deg_Heat_cDNA_P Parameter: Tissue Value: Aerial
  misc_feature: MA Experiment ID: 108577 Result: Up-regulated in Transcription
  misc_feature: MA Experiment 108577 PARAMETER Experiment Name: At_42deg_Heat_cDNA_P Parameter: Temperature (deg C) Value: 42 vs. 22
  misc_feature: MA Experiment 108577 PARAMETER Experiment Name: At_42deg_Heat_cDNA_P Parameter: Timepoint (hr) Value: 6
  misc_feature: MA Experiment 108577 PARAMETER Experiment Name: At_42deg_Heat_cDNA_P Parameter: Tissue Value: Aerial
  misc_feature: MA Experiment ID: 108595 Result: Up-regulated in Transcription
  misc_feature: MA Experiment 108595 PARAMETER Experiment Name: At_Ler-pi_Ovule_cDNA_P Parameter: Plant Line Value: null
  misc_feature: MA Experiment ID: 108667 Result: Up-regulated in Transcription
  misc_feature: MA Experiment 108667 PARAMETER Experiment Name: At_2mM_SA_cDNA_P Parameter: Plant Line Value: WS
  misc_feature: MA Experiment 108667 PARAMETER Experiment Name: At_2mM_SA_cDNA_P Parameter: Timepoint (hr) Value: 1
  misc_feature: MA Experiment 108667 PARAMETER Experiment Name: At_2mM_SA_cDNA_P Parameter: Treatment Value: 2mM SA vs. No Treatment
  misc_feature: MA Experiment ID: 20000093 Result: Up-regulated in Transcription
  misc_feature: MA Experiment 20000093 PARAMETER Experiment Name: At_42deg_Heat_cDNA_P Parameter: Temperature (deg C) Value: 42 vs. 22
  misc_feature: MA Experiment 20000093 PARAMETER Experiment Name: At_42deg_Heat_cDNA_P Parameter: Timepoint (hr) Value: 0.5
  misc_feature: MA Experiment 20000093 PARAMETER Experiment Name: At_42deg_Heat_cDNA_P Parameter: Tissue Value: Aerial
  misc_feature: MA Experiment ID: 20000111 Result: Up-regulated in Transcription
  misc_feature: MA Experiment 20000111 PARAMETER Experiment Name: At_42deg_Heat_cDNA_P Parameter: Temperature (deg C) Value: 42 vs. 22
  misc_feature: MA Experiment 20000111 PARAMETER Experiment Name: At_42deg_Heat_cDNA_P Parameter: Timepoint (hr) Value: 6
  misc_feature: MA Experiment 20000111 PARAMETER Experiment Name: At_42deg_Heat_cDNA_P Parameter: Tissue Value: Aerial
  misc_feature: MA Experiment ID: 20000112 Result: Up-regulated in Transcription
  misc_feature: MA Experiment 20000112 PARAMETER Experiment Name: At_42deg_Heat_cDNA_P Parameter: Temperature (deg C) Value: 42 vs. 22
  misc_feature: MA Experiment 20000112 PARAMETER Experiment Name: At_42deg_Heat_cDNA_P Parameter: Timepoint (hr) Value: 2
  misc_feature: MA Experiment 20000112 PARAMETER Experiment Name: At_42deg_Heat_cDNA_P Parameter: Tissue Value: Aerial
  misc_feature: MA Experiment ID: 20000113 Result: Up-regulated in Transcription
  misc_feature: MA Experiment 20000113 PARAMETER Experiment Name: At_42deg_Heat_cDNA_P Parameter: Temperature (deg C) Value: 42 vs. 22
  misc_feature: MA Experiment 20000113 PARAMETER Experiment Name: At_42deg_Heat_cDNA_P Parameter: Timepoint (hr) Value: 8
  misc_feature: MA Experiment 20000113 PARAMETER Experiment Name: At_42deg_Heat_cDNA_P Parameter: Tissue Value: Aerial
  misc_feature: MA Experiment ID: 20000144 Result: Up-regulated in Transcription
  misc_feature: MA Experiment 20000144 PARAMETER Experiment Name: At_42deg_Heat_cDNA_P Parameter: Temperature (deg C) Value: 42 vs. 22
  misc_feature: MA Experiment 20000144 PARAMETER Experiment Name: At_42deg_Heat_cDNA_P Parameter: Timepoint (hr) Value: 1
  misc_feature: MA Experiment 20000144 PARAMETER Experiment Name: At_42deg_Heat_cDNA_P Parameter: Tissue Value: Aerial
  misc_feature: MA Experiment ID: 20000171 Result: Up-regulated in Transcription
  misc_feature: MA Experiment 20000171 PARAMETER Experiment Name: At_42deg_Heat_P Parameter: Age (day) Value: 14
  misc_feature: MA Experiment 20000171 PARAMETER Experiment Name: At_42deg_Heat_P Parameter: Organism Value: A. thaliana
  misc_feature: MA Experiment 20000171 PARAMETER Experiment Name: At_42deg_Heat_P Parameter: Plant Line Value: WS
  misc_feature: MA Experiment 20000171 PARAMETER Experiment Name: At_42deg_Heat_P Parameter: Temperature (deg C) Value: 42 vs. 22
  misc_feature: MA Experiment 20000171 PARAMETER Experiment Name: At_42deg_Heat_P Parameter: Timepoint (hr) Value: 1
  misc_feature: MA Experiment 20000171 PARAMETER Experiment Name: At_42deg_Heat_P Parameter: Tissue Value: Aerial
  misc_feature: MA Experiment ID: 20000173 Result: Up-regulated in Transcription
  misc_feature: MA Experiment 20000173 PARAMETER Experiment Name: At_42deg_Heat_P Parameter: Age (day) Value: 14
  misc_feature: MA Experiment 20000173 PARAMETER Experiment Name: At_42deg_Heat_P Parameter: Organism Value: A. thaliana
  misc_feature: MA Experiment 20000173 PARAMETER Experiment Name: At_42deg_Heat_P Parameter: Plant Line Value: WS
  misc_feature: MA Experiment 20000173 PARAMETER Experiment Name: At_42deg_Heat_P Parameter: Temperature (deg C) Value: 42 vs. 22
  misc_feature: MA Experiment 20000173 PARAMETER Experiment Name: At_42deg_Heat_P Parameter: Timepoint (hr) Value: 6
  misc_feature: MA Experiment 20000173 PARAMETER Experiment Name: At_42deg_Heat_P Parameter: Tissue Value: Aerial
  misc_feature: MA Experiment ID: 20000437 Result: Up-regulated in Transcription
  misc_feature: MA Experiment 20000437 PARAMETER Experiment Name: At_Drought_P Parameter: Age (day) Value: 8
  misc_feature: MA Experiment 20000437 PARAMETER Experiment Name: At_Drought_P Parameter: Organism Value: A. thaliana
  misc_feature: MA Experiment 20000437 PARAMETER Experiment Name: At_Drought_P Parameter: Plant Line Value: WS
  misc_feature: MA Experiment 20000437 PARAMETER Experiment Name: At_Drought_P Parameter: Timepoint (hr) Value: 24
  misc_feature: MA Experiment 20000437 PARAMETER Experiment Name: At_Drought_P Parameter: Tissue Value: Whole Plant
  misc_feature: MA Experiment 20000437 PARAMETER Experiment Name: At_Drought_P Parameter: Treatment Value: Drought vs. No Drought
  misc_feature: MA Experiment ID: 20000441 Result: Up-regulated in Transcription
  misc_feature: MA Experiment 20000441 PARAMETER Experiment Name: At_1uM_BR-BRZ__P Parameter: Tissue Value: Shoot Apices
  misc_feature: MA Experiment 20000441 PARAMETER Experiment Name: At_1uM_BR-BRZ__P Parameter: Treatment Value: 1uM BR vs. No Treatment
  misc_feature: MA Experiment ID: 20000443 Result: Up-regulated in Transcription
  misc_feature: MA Experiment 20000443 PARAMETER Experiment Name: At_1uM_BR-BRZ__P Parameter: Tissue Value: Shoot Apices
  misc_feature: MA Experiment 20000443 PARAMETER Experiment Name: At_1uM_BR-BRZ__P Parameter: Treatment Value: 1uM BRZ vs. No Treatment
  misc_feature: MA Experiment ID: 20000709 Result: Up-regulated in Transcription
  misc_feature: MA Experiment 20000709 PARAMETER Experiment Name: At_15mM_NH4NO3_L-to-H_P Parameter: Age (hr) Value: 14
  misc_feature: MA Experiment 20000709 PARAMETER Experiment Name: At_15mM_NH4NO3_L-to-H_P Parameter: Organism Value: A. thaliana
  misc_feature: MA Experiment 20000709 PARAMETER Experiment Name: At_15mM_NH4NO3_L-to-H_P Parameter: Plant Line Value: WS
  misc_feature: MA Experiment 20000709 PARAMETER Experiment Name: At_15mM_NH4NO3_L-to-H_P Parameter: Timepoint (hr) Value: 4
  misc_feature: MA Experiment 20000709 PARAMETER Experiment Name: At_15mM_NH4NO3_L-to-H_P Parameter: Tissue Value: Aerial
  misc_feature: MA Experiment 20000709 PARAMETER Experiment Name: At_15mM_NH4NO3_L-to-H_P Parameter: Treatment Value: 15mM NH4NO3 vs. 30mM Mannitol
  misc_feature: MA Experiment ID: 20001248 Result: Down-regulated in Transcription
  misc_feature: MA Experiment 20001248 PARAMETER Experiment Name: At_Far-red-induction_P Parameter: Age (day) Value: 7
  misc_feature: MA Experiment 20001248 PARAMETER Experiment Name: At_Far-red-induction_P Parameter: Light Value: Far-red vs. White
  misc_feature: MA Experiment 20001248 PARAMETER Experiment Name: At_Far-red-induction_P Parameter: Organism Value: A. thaliana
  misc_feature: MA Experiment 20001248 PARAMETER Experiment Name: At_Far-red-induction_P Parameter: Plant Line Value: Columbia
  misc_feature: MA Experiment 20001248 PARAMETER Experiment Name: At_Far-red-induction_P Parameter: Timepoint (hr) Value: 4
  misc_feature: MA Experiment 20001248 PARAMETER Experiment Name: At_Far-red-induction_P Parameter: Tissue Value: Whole Plant
  misc_feature: MA Experiment ID: 20001554 Result: Up-regulated in Transcription
  misc_feature: MA Experiment 20001554 PARAMETER Experiment Name: At_Drought_Soil_Dry_P Parameter: Age (day) Value: 21
  misc_feature: MA Experiment 20001554 PARAMETER Experiment Name: At_Drought_Soil_Dry_P Parameter: Organism Value: A. thaliana
  misc_feature: MA Experiment 20001554 PARAMETER Experiment Name: At_Drought_Soil_Dry_P Parameter: Plant Line Value: WS
  misc_feature: MA Experiment 20001554 PARAMETER Experiment Name: At_Drought_Soil_Dry_P Parameter: Post Timepoint (hr) Value: None
  misc_feature: MA Experiment 20001554 PARAMETER Experiment Name: At_Drought_Soil_Dry_P Parameter: Post-Treatment Value: None
  misc_feature: MA Experiment 20001554 PARAMETER Experiment Name: At_Drought_Soil_Dry_P Parameter: Timepoint (day) Value: 7
  misc_feature: MA Experiment 20001554 PARAMETER Experiment Name: At_Drought_Soil_Dry_P Parameter: Treatment Value: Drought vs. No Drought
  misc_feature: MA Experiment ID: 20001555 Result: Up-regulated in Transcription
  misc_feature: MA Experiment 20001555 PARAMETER Experiment Name: At_Drought_Soil_Dry_P Parameter: Age (day) Value: 24
  misc_feature: MA Experiment 20001555 PARAMETER Experiment Name: At_Drought_Soil_Dry_P Parameter: Organism Value: A. thaliana
  misc_feature: MA Experiment 20001555 PARAMETER Experiment Name: At_Drought_Soil_Dry_P Parameter: Plant Line Value: WS
  misc_feature: MA Experiment 20001555 PARAMETER Experiment Name: At_Drought_Soil_Dry_P Parameter: Post Timepoint (hr) Value: None
  misc_feature: MA Experiment 20001555 PARAMETER Experiment Name: At_Drought_Soil_Dry_P Parameter: Post-Treatment Value: None
  misc_feature: MA Experiment 20001555 PARAMETER Experiment Name: At_Drought_Soil_Dry_P Parameter: Timepoint (day) Value: 10
  misc_feature: MA Experiment 20001555 PARAMETER Experiment Name: At_Drought_Soil_Dry_P Parameter: Treatment Value: Drought vs. No Drought
  misc_feature: MA Experiment ID: 20001556 Result: Up-regulated in Transcription
  misc_feature: MA Experiment 20001556 PARAMETER Experiment Name: At_Drought_Soil_Dry_P Parameter: Age (day) Value: 26
  misc_feature: MA Experiment 20001556 PARAMETER Experiment Name: At_Drought_Soil_Dry_P Parameter: Organism Value: A. thaliana
  misc_feature: MA Experiment 20001556 PARAMETER Experiment Name: At_Drought_Soil_Dry_P Parameter: Plant Line Value: WS
  misc_feature: MA Experiment 20001556 PARAMETER Experiment Name: At_Drought_Soil_Dry_P Parameter: Post Timepoint (hr) Value: None
  misc_feature: MA Experiment 20001556 PARAMETER Experiment Name: At_Drought_Soil_Dry_P Parameter: Post-Treatment Value: None
  misc_feature: MA Experiment 20001556 PARAMETER Experiment Name: At_Drought_Soil_Dry_P Parameter: Timepoint (day) Value: 12
  misc_feature: MA Experiment 20001556 PARAMETER Experiment Name: At_Drought_Soil_Dry_P Parameter: Treatment Value: Drought vs. No Drought
  misc_feature: MA Experiment ID: 20001905 Result: Up-regulated in Transcription
  misc_feature: MA Experiment 20001905 PARAMETER Experiment Name: At_Drought_Reproduction_P Parameter: Age (day) Value: 40
  misc_feature: MA Experiment 20001905 PARAMETER Experiment Name: At_Drought_Reproduction_P Parameter: Organism Value: A. thaliana
  misc_feature: MA Experiment 20001905 PARAMETER Experiment Name: At_Drought_Reproduction_P Parameter: Plant Line Value: WS
  misc_feature: MA Experiment 20001905 PARAMETER Experiment Name: At_Drought_Reproduction_P Parameter: Timepoint (day) Value: 10
  misc_feature: MA Experiment 20001905 PARAMETER Experiment Name: At_Drought_Reproduction_P Parameter: Tissue Value: Rosettes
  misc_feature: MA Experiment 20001905 PARAMETER Experiment Name: At_Drought_Reproduction_P Parameter: Treatment Value: Drought vs. No Drought
  misc_feature: MA Experiment ID: 20001911 Result: Up-regulated in Transcription
  misc_feature: MA Experiment 20001911 PARAMETER Experiment Name: At_Drought_Reproduction_P Parameter: Age (day) Value: 40
  misc_feature: MA Experiment 20001911 PARAMETER Experiment Name: At_Drought_Reproduction_P Parameter: Organism Value: A. thaliana
  misc_feature: MA Experiment 20001911 PARAMETER Experiment Name: At_Drought_Reproduction_P Parameter: Plant Line Value: WS
  misc_feature: MA Experiment 20001911 PARAMETER Experiment Name: At_Drought_Reproduction_P Parameter: Timepoint (day) Value: 10
  misc_feature: MA Experiment 20001911 PARAMETER Experiment Name: At_Drought_Reproduction_P Parameter: Tissue Value: Flowers
  misc_feature: MA Experiment 20001911 PARAMETER Experiment Name: At_Drought_Reproduction_P Parameter: Treatment Value: Drought vs. No Drought
aaaacattttgttctaatcccgcaactgctaaaaacaaacccttttgtcaaaaatctctcctttcggtggtgacaggaaatggcagaagcagcatacacagtagcatcagacagtgaaaacactggagaggagaaatcatcatcatctccttcattacccgaaatcgcccttggtatcgacattggtacttctcaatgcagtatagctgtttggaacggttctcaagttcacatcttgaggaacacaagaaaccagaagctcatcaaatcatttgtcactttcaaagatgaagttcctgctggtggtgttagcaaccagctcgcacatgagcaggaaatgctaaccggagccgctatcttcaacatgaagcggctcgttggtcgtgtagacactgatcctgtggttcacgctagcaagaaccttcctttcttggttcaaactcttgatattggagttagaccgtttattgcagctttggtgaacaatgcttggagatcaacaacaccagaggaagttttagctatatttctggtggagttacgtctgatggctgaagctcagttgaaacgtcctgtgagaaatgtagtgcttacggttccggtttcgttctctaggttccagctcacacggttcgaaagagcttgcgctatggctggacttcatgttcttcgtttgatgccggaaccaactgctattgcgttgctttatgcgcaacagcagcagatgactacccatgataacatgggaagcggaagcgagaggcttgcggttatattcaatatgggagctggttactgcgatgttgcggttactgctactgctggtggtgtttcacagataaaagctttagctggtagccccattgggggtgaagacattttgcagaacacaattcgccatatcgctccacctaatgaagaagcttcggggttgcttcgtgtagcggcacaggacgcgattcacaggctaacggatcaagaaaatgtccaaattgaagtggatttgggaaatggtaacaagatatccaaggttcttgataggttagagtttgaggaagtgaaccagaaggtatttgaggaatgtgagagacttgttgtgcagtgcctgcgagatgcgagagtcaatggtggtgatatcgatgatttgataatggttggagggtgttcgtacatcccgaaagtaagaactattatcaagaacgtatgcaagaaggatgagatatacaaaggcgtgaatcctttagaagctgcggttagaggagctgctttggaaggtgcggtgacttcagggattcatgatccttttgggagcttagatctgttaaccatacaagccacacctcttgcagttggagtaagagctaacggaaacaaattcatacccgtgattccgcgtaacacaatggttccagcgcggaaagacctcttcttcacaacggttcaagacaaccagaaggaagctctgatcattatatacgaaggagaaggagagactgttgaagagaatcatcttcttggttatttcaagctcgttgggattccgccagcaccgaaaggtgttccagagatcaatgtgtgtatggacattgatgcatcaaatgctttacgggttttcgcagctgtgttgatgccgggatcttcgagtccagtggttcctgtgattgaggtgaggatgcctacggttgatgatggacatggttggtgtgctcaagctttgaatgtgaaatatggagctactcttgatttgattactcttcagagaaagatgtaagattaaaataaaatggtgttggtgatagattttagattagatgtaagatacgaggatgcttcgtatagaaaagagtttgtaaagtttgtgtgtgttttggggtttgtcgttgaagtggtaaacaatgtttatgtgtgtaatgaagtaataatgctttgcagattgtataataaactagagagtttggactttggacactttcttttgagc

SEQ ID NO: 77902 - protein, 563 aa, Arabidopsis thaliana
  peptide (1)..(563): Ceres Seq. ID no. 12580967
  misc_feature (319)..(505): Pfam Name: Hsp70 protein Pfam Description: Hsp70 protein
  misc_feature (1)..(563): Homolog of NCBI NO: 15225187 NR Description: 70kD heat shock protein; protein id: At2g32120.1, by cDNA: 98979. [Arabidopsis thaliana] >gi|25295956|pir||B84729
  misc_feature (1)..(563): Homolog of NCBI NO: 21618151 NR Description: 70kD heat shock protein [Arabidopsis thaliana]
  misc_feature (30)..(524): Homolog of NCBI NO: 15230534 NR Description: heat shock protein 70; protein id: At3g12580.1 thaliana] >gi|9294373|dbj|BAB02269.1| 70 kDa heat shock protein
  misc_feature (30)..(524): Homolog of NCBI NO: 3962377 NR Description: heat shock protein 70 [Arabidopsis thaliana]
  misc_feature (17)..(514): Homolog of NCBI NO: 32699500 NR Description: 78 kDa glucose-regulated protein homolog (GRP 78) (Immunoglobulin heavy chain binding protein homolog)
  misc_feature (17)..(514): Homolog of NCBI NO: 11277118 NR Description: dnaK-type molecular chaperone BiP [imported] - awamori >gi|2648051|emb|CAA73106.1| BiP protein [Aspergillus
  misc_feature (30)..(524): Homolog of NCBI NO: 6969976 NR Description: high molecular weight heat shock protein [Malus x
  misc_feature (30)..(524): Homolog of NCBI NO: 34908140 NR Description: putative HSP70 [Oryza sativa (japonica
  misc_feature (28)..(513): Homolog of NCBI NO: 15219109 NR Description: heat shock protein hsp70, putative; protein id: [Arabidopsis thaliana] >gi|25295976|pir||B86295 hypothetical
  misc_feature (30)..(524): Homolog of NCBI NO: 2827002 NR Description: HSP70 [Triticum aestivum]
MAEAAYTVASDSENTGEEKSSSSPSLPEIALGIDIGTSQCSIAVWNGSQVHILRNTRNQKLIKSFVTFKDEVPAGGVSNQLAHEQEMLTGAAIFNMKRLVGRVDTDPVVHASKNLPFLVQTLDIGVRPFIAALVNNAWRSTTPEEVLAIFLVELRLMAEAQLKRPVRNVVLTVPVSFSRFQLTRFERACAMAGLHVLRLMPEPTAIALLYAQQQQMTTHDNMGSGSERLAVIFNMGAGYCDVAVTATAGGVSQIKALAGSPIGGEDILQNTIRHIAPPNEEASGLLRVAAQDAIHRLTDQENVQIEVDLGNGNKISKVLDRLEFEEVNQKVFEECERLVVQCLRDARVNGGDIDDLIMVGGCSYIPKVRTIIKNVCKKDEIYKGVNPLEAAVRGAALEGAVTSGIHDPFGSLDLLTIQATPLAVGVRANGNKFIPVIPRNTMVPARKDLFFTTVQDNQKEALIIIYEGEGETVEENHLLGYFKLVGIPPAPKGVPEINVCMDIDASNALRVFAAVLMPGSSSPVVPVIEVRMPTVDDGHGWCAQALNVKYGATLDLITLQRKM

SEQ ID NO: 77903 - protein, 477 aa, Arabidopsis thaliana
  peptide (1)..(477): Ceres Seq. ID no. 12580968
  misc_feature (233)..(419): Pfam Name: Hsp70 protein Pfam Description: Hsp70 protein
  misc_feature (1)..(477): Homolog of NCBI NO: 15225187 NR Description: 70kD heat shock protein; protein id: At2g32120.1, by cDNA: 98979. [Arabidopsis thaliana] >gi|25295956|pir||B84729
  misc_feature (1)..(477): Homolog of NCBI NO: 21618151 NR Description: 70kD heat shock protein [Arabidopsis thaliana]
  misc_feature (1)..(438): Homolog of NCBI NO: 15230534 NR Description: heat shock protein 70; protein id: At3g12580.1 thaliana] >gi|9294373|dbj|BAB02269.1| 70 kDa heat shock protein
  misc_feature (1)..(438): Homolog of NCBI NO: 3962377 NR Description: heat shock protein 70 [Arabidopsis thaliana]
  misc_feature (1)..(428): Homolog of NCBI NO: 32699500 NR Description: 78 kDa glucose-regulated protein homolog (GRP 78) (Immunoglobulin heavy chain binding protein homolog)
  misc_feature (1)..(428): Homolog of NCBI NO: 11277118 NR Description: dnaK-type molecular chaperone BiP [imported] - awamori >gi|2648051|emb|CAA73106.1| BiP protein [Aspergillus
  misc_feature (1)..(438): Homolog of NCBI NO: 6969976 NR Description: high molecular weight heat shock protein [Malus x
  misc_feature (1)..(438): Homolog of NCBI NO: 34908140 NR Description: putative HSP70 [Oryza sativa (japonica
  misc_feature (1)..(427): Homolog of NCBI NO: 15219109 NR Description: heat shock protein hsp70, putative; protein id: [Arabidopsis thaliana] >gi|25295976|pir||B86295 hypothetical
  misc_feature (1)..(438): Homolog of NCBI NO: 2827002 NR Description: HSP70 [Triticum aestivum]
MLTGAAIFNMKRLVGRVDTDPVVHASKNLPFLVQTLDIGVRPFIAALVNNAWRSTTPEEVLAIFLVELRLMAEAQLKRPVRNVVLTVPVSFSRFQLTRFERACAMAGLHVLRLMPEPTAIALLYAQQQQMTTHDNMGSGSERLAVIFNMGAGYCDVAVTATAGGVSQIKALAGSPIGGEDILQNTIRHIAPPNEEASGLLRVAAQDAIHRLTDQENVQIEVDLGNGNKISKVLDRLEFEEVNQKVFEECERLVVQCLRDARVNGGDIDDLIMVGGCSYIPKVRTIIKNVCKKDEIYKGVNPLEAAVRGAALEGAVTSGIHDPFGSLDLLTIQATPLAVGVRANGNKFIPVIPRNTMVPARKDLFFTTVQDNQKEALIIIYEGEGETVEENHLLGYFKLVGIPPAPKGVPEINVCMDIDASNALRVFAAVLMPGSSSPVVPVIEVRMPTVDDGHGWCAQALNVKYGATLDLITLQRKM

SEQ ID NO: 77904 - protein, 468 aa, Arabidopsis thaliana
  peptide (1)..(468): Ceres Seq. ID no. 12580969
  misc_feature (224)..(410): Pfam Name: Hsp70 protein Pfam Description: Hsp70 protein
  misc_feature (1)..(468): Homolog of NCBI NO: 15225187 NR Description: 70kD heat shock protein; protein id: At2g32120.1, by cDNA: 98979. [Arabidopsis thaliana] >gi|25295956|pir||B84729
  misc_feature (1)..(468): Homolog of NCBI NO: 21618151 NR Description: 70kD heat shock protein [Arabidopsis thaliana]
  misc_feature (1)..(429): Homolog of NCBI NO: 15230534 NR Description: heat shock protein 70; protein id: At3g12580.1 thaliana] >gi|9294373|dbj|BAB02269.1| 70 kDa heat shock protein
  misc_feature (1)..(429): Homolog of NCBI NO: 3962377 NR Description: heat shock protein 70 [Arabidopsis thaliana]
  misc_feature (1)..(419): Homolog of NCBI NO: 32699500 NR Description: 78 kDa glucose-regulated protein homolog (GRP 78) (Immunoglobulin heavy chain binding protein homolog)
  misc_feature (1)..(419): Homolog of NCBI NO: 11277118 NR Description: dnaK-type molecular chaperone BiP [imported] - awamori >gi|2648051|emb|CAA73106.1| BiP protein [Aspergillus
  misc_feature (1)..(429): Homolog of NCBI NO: 6969976 NR Description: high molecular weight heat shock protein [Malus x
  misc_feature (1)..(429): Homolog of NCBI NO: 34908140 NR Description: putative HSP70 [Oryza sativa (japonica
  misc_feature (1)..(418): Homolog of NCBI NO: 15219109 NR Description: heat shock protein hsp70, putative; protein id: [Arabidopsis thaliana] >gi|25295976|pir||B86295 hypothetical
  misc_feature (1)..(429): Homolog of NCBI NO: 2827002 NR Description: HSP70 [Triticum aestivum]
MKRLVGRVDTDPVVHASKNLPFLVQTLDIGVRPFIAALVNNAWRSTTPEEVLAIFLVELRLMAEAQLKRPVRNVVLTVPVSFSRFQLTRFERACAMAGLHVLRLMPEPTAIALLYAQQQQMTTHDNMGSGSERLAVIFNMGAGYCDVAVTATAGGVSQIKALAGSPIGGEDILQNTIRHIAPPNEEASGLLRVAAQDAIHRLTDQENVQIEVDLGNGNKISKVLDRLEFEEVNQKVFEECERLVVQCLRDARVNGGDIDDLIMVGGCSYIPKVRTIIKNVCKKDEIYKGVNPLEAAVRGAALEGAVTSGIHDPFGSLDLLTIQATPLAVGVRANGNKFIPVIPRNTMVPARKDLFFTTVQDNQKEALIIIYEGEGETVEENHLLGYFKLVGIPPAPKGVPEINVCMDIDASNALRVFAAVLMPGSSSPVVPVIEVRMPTVDDGHGWCAQALNVKYGATLDLITLQRKM

SEQ ID NO: 77905 - DNA, 1776 bp, Arabidopsis thaliana
  misc_feature (1)..(1776): Ceres Seq. ID no. 12580977
  misc_feature: MA Experiment ID: 108434 Result: Down-regulated in Transcription
  misc_feature: MA Experiment 108434 PARAMETER Experiment Name: At_Root_Tips_cDNA_P Parameter: Tissue Value: Root Tips
  misc_feature: MA Experiment ID: 108461 Result: Down-regulated in Transcription
  misc_feature: MA Experiment 108461 PARAMETER Experiment Name: At_Germinating_Seeds_cDNA_P Parameter: Age (day) Value: 1 vs. 0
  misc_feature: MA Experiment 108461 PARAMETER Experiment Name: At_Germinating_Seeds_cDNA_P Parameter: Tissue Value: Germinating Seeds
  misc_feature: MA Experiment ID: 108462 Result: Down-regulated in Transcription
  misc_feature: MA Experiment 108462 PARAMETER Experiment Name: At_Germinating_Seeds_cDNA_P Parameter: Age (day) Value: 2 vs. 0
  misc_feature: MA Experiment 108462 PARAMETER Experiment Name: At_Germinating_Seeds_cDNA_P Parameter: Tissue Value: Germinating Seeds
  misc_feature: MA Experiment ID: 108469 Result: Up-regulated in Transcription
  misc_feature: MA Experiment ID: 108572 Result: Up-regulated in Transcription
  misc_feature: MA Experiment 108572 PARAMETER Experiment Name: At_Drought_cDNA_P Parameter: Timepoint (hr) Value: 1
  misc_feature: MA Experiment 108572 PARAMETER Experiment Name: At_Drought_cDNA_P Parameter: Tissue Value: Aerial
  misc_feature: MA Experiment 108572 PARAMETER Experiment Name: At_Drought_cDNA_P Parameter: Treatment Value: Drought vs. No Drought
  misc_feature: MA Experiment ID: 108573 Result: Up-regulated in Transcription
  misc_feature: MA Experiment 108573 PARAMETER Experiment Name: At_Drought_cDNA_P Parameter: Timepoint (hr) Value: 6
  misc_feature: MA Experiment 108573 PARAMETER Experiment Name: At_Drought_cDNA_P Parameter: Tissue Value: Aerial
  misc_feature: MA Experiment 108573 PARAMETER Experiment Name: At_Drought_cDNA_P Parameter: Treatment Value: Drought vs. No Drought
  misc_feature: MA Experiment ID: 108585 Result: Up-regulated in Transcription
  misc_feature: MA Experiment 108585 PARAMETER Experiment Name: At_5mM_NaNP_cDNA_P Parameter: Timepoint (hr) Value: 6
  misc_feature: MA Experiment 108585 PARAMETER Experiment Name: At_5mM_NaNP_cDNA_P Parameter: Tissue Value: Aerial
  misc_feature: MA Experiment 108585 PARAMETER Experiment Name: At_5mM_NaNP_cDNA_P Parameter: Treatment Value: null
  misc_feature: MA Experiment ID: 108594 Result: Down-regulated in Transcription
  misc_feature: MA Experiment 108594 PARAMETER Experiment Name: At_Ler-rhl_Root_cDNA_P Parameter: Plant Line Value: null
  misc_feature: MA Experiment ID: 108607 Result: Up-regulated in Transcription
  misc_feature: MA Experiment 108607 PARAMETER Experiment Name: At_100uM_ABA_cDNA_P Parameter: Timepoint (hr) Value: 4
  misc_feature: MA Experiment 108607 PARAMETER Experiment Name: At_100uM_ABA_cDNA_P Parameter: Tissue Value: Aerial
  misc_feature: MA Experiment 108607 PARAMETER Experiment Name: At_100uM_ABA_cDNA_P Parameter: Treatment Value: 100uM ABA vs. No Treatment
  misc_feature: MA Experiment ID: 108667 Result: Up-regulated in Transcription
  misc_feature: MA Experiment 108667 PARAMETER Experiment Name: At_2mM_SA_cDNA_P Parameter: Plant Line Value: WS
  misc_feature: MA Experiment 108667 PARAMETER Experiment Name: At_2mM_SA_cDNA_P Parameter: Timepoint (hr) Value: 1
  misc_feature: MA Experiment 108667 PARAMETER Experiment Name: At_2mM_SA_cDNA_P Parameter: Treatment Value: 2mM SA vs. No Treatment
  misc_feature: MA Experiment ID: 108668 Result: Up-regulated in Transcription
  misc_feature: MA Experiment 108668 PARAMETER Experiment Name: At_2mM_SA_cDNA_P Parameter: Plant Line Value: WS
  misc_feature: MA Experiment 108668 PARAMETER Experiment Name: At_2mM_SA_cDNA_P Parameter: Timepoint (hr) Value: 6
  misc_feature: MA Experiment 108668 PARAMETER Experiment Name: At_2mM_SA_cDNA_P Parameter: Treatment Value: 2mM SA vs. No Treatment
  misc_feature: MA Experiment ID: 20000070 Result: Up-regulated in Transcription
  misc_feature: MA Experiment 20000070 PARAMETER Experiment Name: At_100uM_ABA_Mutants_cDNA_P Parameter: Plant Line Value: CS24
  misc_feature: MA Experiment 20000070 PARAMETER Experiment Name: At_100uM_ABA_Mutants_cDNA_P Parameter: Timepoint (hr) Value: 6
  misc_feature: MA Experiment 20000070 PARAMETER Experiment Name: At_100uM_ABA_Mutants_cDNA_P Parameter: Tissue Value: Aerial
  misc_feature: MA Experiment 20000070 PARAMETER Experiment Name: At_100uM_ABA_Mutants_cDNA_P Parameter: Treatment Value: 100uM ABA vs. No Treatment
  misc_feature: MA Experiment ID: 20000071 Result: Up-regulated in Transcription
  misc_feature: MA Experiment 20000071 PARAMETER Experiment Name: At_100uM_ABA_Mutants_cDNA_P Parameter: Plant Line Value: CS8104
  misc_feature: MA Experiment 20000071 PARAMETER Experiment Name: At_100uM_ABA_Mutants_cDNA_P Parameter: Timepoint (hr) Value: 6
  misc_feature: MA Experiment 20000071 PARAMETER Experiment Name: At_100uM_ABA_Mutants_cDNA_P Parameter: Tissue Value: Aerial
  misc_feature: MA Experiment 20000071 PARAMETER Experiment Name: At_100uM_ABA_Mutants_cDNA_P Parameter: Treatment Value: 100uM ABA vs. No Treatment
acgtgaaaaccatatatcgcatcttctcattcttctttcattgccctcattaaaacacacatcatatcgcccccaaaattttgatttgattagagaggtgtgtggaaaatggcggaagagtatgccgagtgtttgctagagaagaacttccatgaggattgttctggctgcaaggttgatcagatgaagaggcttcgccgtggatttcccttctgggagctttttaccgtttggatcatcgttctttgcaccgctttgcccatttcttctctattcccctttctctactttatgattgatgatttcaacattgcaaagaaggaagaggacattgggttctacgctggatttgttggttgctctttcatgctcggacgagcttttacatctgtggcatggggacttgttgctgatcgttatggtagaaaacctgtaatcctcataggaaccgcttcagtggtcgtttttaatactctgtttggcctaagtttaaatttctggatggctattatcacaagattttgcctcggtagtttcaacggtttacttggtcctatcaaggcttacgcaatggaaatattccgtgatgagtatcaaggtttagcactctcagcagttagtacagcttggggaattggactcatcattggccctgctataggaggttttcttgctcagcctgcaaagcaatatccaagtttattctcacaggactccatttttggcaaatttcccttctttttgccatgcttagcaatatccgtttttgcattcttggtgaccatagtttcatcaaggattccggaaacattgcacaatcacaagtttaatgatgatgagtcttatgatgctctcaaagatttgtctgatgaccctgaatctaataaagtggcagagagaaatggaaaaagttctctcttgaacaactggccattaatttcatctatcatcgtatactgcgtcttttcactacatgatatggcttacacagagatcttttcattgtgggcaaacagtccgaggaaatatggaggtttgggatactccactgcagatgttggttctgttcttgccttttcaggctttggtctccttatctttcagctttcgctctactcttacgcagagaggcttttaggacctatcatagttacacgtatatctgggagcctagcaatggtcgtcttatcatgttacccactaatagcaaagttatctggtttagcccttaccgtgactgtaacttctgcatccgtagcaaagagtgttttaggtacttctgctataactggattattcatccttcaaaacaaggctgtgagacaagaccaaagaggagcagctaatggaattgccatgacagcgatgtctcttttcaaagccataggtccagcagcagcaggaatcattttttcgtggagcgagaaacgtcagggtgctgcttttctccctggcacccaaatggtattctttatactgaatgtggttttggcacttggagttgtattgacattcaaaccatttctagctgaaacacaacagtagaaaatgatgaagattttgatggtattcaaattacataatcagaatgtattgtataatatatagatttgtatgtctgatccaaagttagattagaaaaatggcaagagaaaaagaaaaaaaacttgttagaattgttgtcatcatcctttgtatgttataggacaagttgttcacaaaattttgtctaatgtgtcagaaccattgtaagaaggattcaataatgttttttgt

SEQ ID NO: 77906 - protein, 478 aa, Arabidopsis thaliana
  peptide (1)..(478): Ceres Seq. ID no. 12580978
  misc_feature (1)..(478): Homolog of NCBI NO: 30684565 NR Description: transporter-related protein [Arabidopsis >gi|14517414|gb|AAK62597.1| AT5g13750/MXE10_2 [Arabidopsis
  misc_feature (26)..(449): Homolog of NCBI NO: 10177340 NR Description: transporter-like protein [Arabidopsis thaliana]
  misc_feature (87)..(478): Homolog of NCBI NO: 30684567 NR Description: transporter-related protein [Arabidopsis thaliana]
  misc_feature (87)..(478): Homolog of NCBI NO: 21555230 NR Description: transporter-like protein [Arabidopsis thaliana]
  misc_feature (1)..(478): Homolog of NCBI NO: 22326785 NR Description: transporter-like protein; protein id:
  misc_feature (26)..(478): Homolog of NCBI NO: 20260160 NR Description: transporter-like protein [Arabidopsis thaliana]
  misc_feature (6)..(478): Homolog of NCBI NO: 23452823 NR Description: major facilitator superfamily antiporter [Oryza
  misc_feature (3)..(477): Homolog of NCBI NO: 15229781 NR Description: transporter-like protein; protein id: At3g43790.1
  misc_feature (18)..(474): Homolog of NCBI NO: 23452821 NR Description: major facilitator superfamily antiporter [Oryza
  misc_feature (87)..(478): Homolog of NCBI NO: 23452819 NR Description: major facilitator superfamily antiporter [Zea
MAEEYAECLLEKNFHEDCSGCKVDQMKRLRRGFPFWELFTVWIIVLCTALPISSLFPFLYFMIDDFNIAKKEEDIGFYAGFVGCSFMLGRAFTSVAWGLVADRYGRKPVILIGTASVVVFNTLFGLSLNFWMAIITRFCLGSFNGLLGPIKAYAMEIFRDEYQGLALSAVSTAWGIGLIIGPAIGGFLAQPAKQYPSLFSQDSIFGKFPFFLPCLAISVFAFLVTIVSSRIPETLHNHKFNDDESYDALKDLSDDPESNKVAERNGKSSLLNNWPLISSIIVYCVFSLHDMAYTEIFSLWANSPRKYGGLGYSTADVGSVLAFSGFGLLIFQLSLYSYAERLLGPIIVTRISGSLAMVVLSCYPLIAKLSGLALTVTVTSASVAKSVLGTSAITGLFILQNKAVRQDQRGAANGIAMTAMSLFKAIGPAAAGIIFSWSEKRQGAAFLPGTQMVFFILNVVLALGVVLTFKPFLAETQQ

SEQ ID NO: 77907 - protein, 453 aa, Arabidopsis thaliana
  peptide (1)..(453): Ceres Seq. ID no. 12580979
  misc_feature (1)..(453): Homolog of NCBI NO: 30684565 NR Description: transporter-related protein [Arabidopsis >gi|14517414|gb|AAK62597.1| AT5g13750/MXE10_2 [Arabidopsis
  misc_feature (1)..(424): Homolog of NCBI NO: 10177340 NR Description: transporter-like protein [Arabidopsis thaliana]
  misc_feature (62)..(453): Homolog of NCBI NO: 30684567 NR Description: transporter-related protein [Arabidopsis thaliana]
  misc_feature (62)..(453): Homolog of NCBI NO: 21555230 NR Description: transporter-like protein [Arabidopsis thaliana]
  misc_feature (1)..(453): Homolog of NCBI NO: 22326785 NR Description: transporter-like protein; protein id:
  misc_feature (1)..(453): Homolog of NCBI NO: 20260160 NR Description: transporter-like protein [Arabidopsis thaliana]
  misc_feature (1)..(453): Homolog of NCBI NO: 23452823 NR Description: major facilitator superfamily antiporter [Oryza
  misc_feature (1)..(452): Homolog of NCBI NO: 15229781 NR Description: transporter-like protein; protein id: At3g43790.1
  misc_feature (1)..(449): Homolog of NCBI NO: 23452821 NR Description: major facilitator superfamily antiporter [Oryza
  misc_feature (62)..(453): Homolog of NCBI NO: 23452819 NR Description: major facilitator superfamily antiporter [Zea
MKRLRRGFPFWELFTVWIIVLCTALPISSLFPFLYFMIDDFNIAKKEEDIGFYAGFVGCSFMLGRAFTSVAWGLVADRYGRKPVILIGTASVVVFNTLFGLSLNFWMAIITRFCLGSFNGLLGPIKAYAMEIFRDEYQGLALSAVSTAWGIGLIIGPAIGGFLAQPAKQYPSLFSQDSIFGKFPFFLPCLAISVFAFLVTIVSSRIPETLHNHKFNDDESYDALKDLSDDPESNKVAERNGKSSLLNNWPLISSIIVYCVFSLHDMAYTEIFSLWANSPRKYGGLGYSTADVGSVLAFSGFGLLIFQLSLYSYAERLLGPIIVTRISGSLAMVVLSCYPLIAKLSGLALTVTVTSASVAKSVLGTSAITGLFILQNKAVRQDQRGAANGIAMTAMSLFKAIGPAAAGIIFSWSEKRQGAAFLPGTQMVFFILNVVLALGVVLTFKPFLAETQQ

SEQ ID NO: 77908 - protein, 417 aa, Arabidopsis thaliana
  peptide (1)..(417): Ceres Seq. ID no. 12580980
  misc_feature (1)..(417): Homolog of NCBI NO: 30684565 NR Description: transporter-related protein [Arabidopsis >gi|14517414|gb|AAK62597.1| AT5g13750/MXE10_2 [Arabidopsis
  misc_feature (1)..(388): Homolog of NCBI NO: 10177340 NR Description: transporter-like protein [Arabidopsis thaliana]
  misc_feature (26)..(417): Homolog of NCBI NO: 30684567 NR Description: transporter-related protein [Arabidopsis thaliana]
  misc_feature (26)..(417): Homolog of NCBI NO: 21555230 NR Description: transporter-like protein [Arabidopsis thaliana]
  misc_feature (1)..(417): Homolog of NCBI NO: 22326785 NR Description: transporter-like protein; protein id:
  misc_feature (1)..(417): Homolog of NCBI NO: 20260160 NR Description: transporter-like protein [Arabidopsis thaliana]
  misc_feature (1)..(417): Homolog of NCBI NO: 23452823 NR Description: major facilitator superfamily antiporter [Oryza
  misc_feature (1)..(416): Homolog of NCBI NO: 15229781 NR Description: transporter-like protein; protein id: At3g43790.1
  misc_feature (1)..(413): Homolog of NCBI NO: 23452821 NR Description: major facilitator superfamily antiporter [Oryza
  misc_feature (26)..(417): Homolog of NCBI NO: 23452819 NR Description: major facilitator superfamily antiporter [Zea
MIDDFNIAKKEEDIGFYAGFVGCSFMLGRAFTSVAWGLVADRYGRKPVILIGTASVVVFNTLFGLSLNFWMAIITRFCLGSFNGLLGPIKAYAMEIFRDEYQGLALSAVSTAWGIGLIIGPAIGGFLAQPAKQYPSLFSQDSIFGKFPFFLPCLAISVFAFLVTIVSSRIPETLHNHKFNDDESYDALKDLSDDPESNKVAERNGKSSLLNNWPLISSIIVYCVFSLHDMAYTEIFSLWANSPRKYGGLGYSTADVGSVLAFSGFGLLIFQLSLYSYAERLLGPIIVTRISGSLAMVVLSCYPLIAKLSGLALTVTVTSASVAKSVLGTSAITGLFILQNKAVRQDQRGAANGIAMTAMSLFKAIGPAAAGIIFSWSEKRQGAAFLPGTQMVFFILNVVLALGVVLTFKPFLAETQQ

SEQ ID NO: 77909 - DNA, 1220 bp, Arabidopsis thaliana
  misc_feature (1)..(1220): Ceres Seq. ID no. 12580985
  misc_feature: MA Experiment ID: 20000234 Result: Down-regulated in Transcription
  misc_feature: MA Experiment 20000234 PARAMETER Experiment Name: At_Siliques_P Parameter: Age (day) Value: 21
  misc_feature: MA Experiment 20000234 PARAMETER Experiment Name: At_Siliques_P Parameter: Organism Value: A. thaliana
  misc_feature: MA Experiment 20000234 PARAMETER Experiment Name: At_Siliques_P Parameter: Plant Line Value: WS
  misc_feature: MA Experiment 20000234 PARAMETER Experiment Name: At_Siliques_P Parameter: Tissue Value: Less Than 5mm Siliques vs. Whole Plant
  misc_feature: MA Experiment ID: 20000264 Result: Down-regulated in Transcription
  misc_feature: MA Experiment 20000264 PARAMETER Experiment Name: At_Open_Flower_P Parameter: Age (day) Value: 21
  misc_feature: MA Experiment 20000264 PARAMETER Experiment Name: At_Open_Flower_P Parameter: Plant Line Value: WS
  misc_feature: MA Experiment 20000264 PARAMETER Experiment Name: At_Open_Flower_P Parameter: Tissue Value: Open Flower vs. Whole Plant
  misc_feature: MA Experiment ID: 20000265 Result: Down-regulated in Transcription
  misc_feature: MA Experiment 20000265 PARAMETER Experiment Name: At_Open_Flower_P Parameter: Age (day) Value: 21
  misc_feature: MA Experiment 20000265 PARAMETER Experiment Name: At_Open_Flower_P Parameter: Plant Line Value: WS
  misc_feature: MA Experiment 20000265 PARAMETER Experiment Name: At_Open_Flower_P Parameter: Tissue Value: Closed Flower vs. Whole Plant
  misc_feature: MA Experiment ID: 20000436 Result: Up-regulated in Transcription
  misc_feature: MA Experiment 20000436 PARAMETER Experiment Name: At_Drought_P Parameter: Age (day) Value: 7
  misc_feature: MA Experiment 20000436 PARAMETER Experiment Name: At_Drought_P Parameter: Organism Value: A. thaliana
  misc_feature: MA Experiment 20000436 PARAMETER Experiment Name: At_Drought_P Parameter: Plant Line Value: WS
  misc_feature: MA Experiment 20000436 PARAMETER Experiment Name: At_Drought_P Parameter: Timepoint (hr) Value: 12
  misc_feature: MA Experiment 20000436 PARAMETER Experiment Name: At_Drought_P Parameter: Tissue Value: Whole Plant
  misc_feature: MA Experiment 20000436 PARAMETER Experiment Name: At_Drought_P Parameter: Treatment Value: Drought vs. No Drought
  misc_feature: MA Experiment ID: 20000451 Result: Down-regulated in Transcription
  misc_feature: MA Experiment 20000451 PARAMETER Experiment Name: At_CS6879_Shoots-Roots_P Parameter: Age (day) Value: 14
  misc_feature: MA Experiment 20000451 PARAMETER Experiment Name: At_CS6879_Shoots-Roots_P Parameter: Organism Value: A. thaliana
  misc_feature: MA Experiment 20000451 PARAMETER Experiment Name: At_CS6879_Shoots-Roots_P Parameter: Plant Line Value: CS6879 vs. WS
  misc_feature: MA Experiment 20000451 PARAMETER Experiment Name: At_CS6879_Shoots-Roots_P Parameter: Tissue Value: Roots
  misc_feature: MA Experiment ID: 20000452 Result: Down-regulated in Transcription
  misc_feature: MA Experiment 20000452 PARAMETER Experiment Name: At_CS6879_Shoots-Roots_P Parameter: Age (day) Value: 14
  misc_feature: MA Experiment 20000452 PARAMETER Experiment Name: At_CS6879_Shoots-Roots_P Parameter: Organism Value: A. thaliana
  misc_feature: MA Experiment 20000452 PARAMETER Experiment Name: At_CS6879_Shoots-Roots_P Parameter: Plant Line Value: CS6879 vs. WS
  misc_feature: MA Experiment 20000452 PARAMETER Experiment Name: At_CS6879_Shoots-Roots_P Parameter: Tissue Value: Shoots
  misc_feature: MA Experiment ID: 20000495 Result: Up-regulated in Transcription
  misc_feature: MA Experiment 20000495 PARAMETER Experiment Name: At_Guard_Cells_P Parameter: Harvest Date Value: 8/2/2002
  misc_feature: MA Experiment 20000495 PARAMETER Experiment Name: At_Guard_Cells_P Parameter: Organism Value: A. thaliana
  misc_feature: MA Experiment 20000495 PARAMETER Experiment Name: At_Guard_Cells_P Parameter: Tissue Value: Guard Cells vs. Leaves
  misc_feature: MA Experiment ID: 20000496 Result: Up-regulated in Transcription
  misc_feature: MA Experiment 20000496 PARAMETER Experiment Name: At_Guard_Cells_P Parameter: Harvest Date Value: 7/19/2002
  misc_feature: MA Experiment 20000496 PARAMETER Experiment Name: At_Guard_Cells_P Parameter: Organism Value: Canola
  misc_feature: MA Experiment 20000496 PARAMETER Experiment Name: At_Guard_Cells_P Parameter: Tissue Value: Guard Cells vs. Leaves
  misc_feature: MA Experiment ID: 20001248 Result: Up-regulated in Transcription
  misc_feature: MA Experiment 20001248 PARAMETER Experiment Name: At_Far-red-induction_P Parameter: Age (day) Value: 7
  misc_feature: MA Experiment 20001248 PARAMETER Experiment Name: At_Far-red-induction_P Parameter: Light Value: Far-red vs. White
  misc_feature: MA Experiment 20001248 PARAMETER Experiment Name: At_Far-red-induction_P Parameter: Organism Value: A. thaliana
  misc_feature: MA Experiment 20001248 PARAMETER Experiment Name: At_Far-red-induction_P Parameter: Plant Line Value: Columbia
  misc_feature: MA Experiment 20001248 PARAMETER Experiment Name: At_Far-red-induction_P Parameter: Timepoint (hr) Value: 4
  misc_feature: MA Experiment 20001248 PARAMETER Experiment Name: At_Far-red-induction_P Parameter: Tissue Value: Whole Plant
  misc_feature: MA Experiment ID: 20001450 Result: Up-regulated in Transcription
  misc_feature: MA Experiment 20001450 PARAMETER Experiment Name: At_Far-red-induction_P Parameter: Age (day) Value: 7
  misc_feature: MA Experiment 20001450 PARAMETER Experiment Name: At_Far-red-induction_P Parameter: Light Value: Far-red vs. White
  misc_feature: MA Experiment 20001450 PARAMETER Experiment Name: At_Far-red-induction_P Parameter: Organism Value: A. thaliana
  misc_feature: MA Experiment 20001450 PARAMETER Experiment Name: At_Far-red-induction_P Parameter: Plant Line Value: Columbia
  misc_feature: MA Experiment 20001450 PARAMETER Experiment Name: At_Far-red-induction_P Parameter: Timepoint (hr) Value: 8
  misc_feature: MA Experiment 20001450 PARAMETER Experiment Name: At_Far-red-induction_P Parameter: Tissue Value: Whole Plant
  misc_feature: MA Experiment ID: 20001451 Result: Up-regulated in Transcription
  misc_feature: MA Experiment 20001451 PARAMETER Experiment Name: At_Far-red-induction_P Parameter: Age (day) Value: 7
  misc_feature: MA Experiment 20001451 PARAMETER Experiment Name: At_Far-red-induction_P Parameter: Light Value: Far-red vs. White
  misc_feature: MA Experiment 20001451 PARAMETER Experiment Name: At_Far-red-induction_P Parameter: Organism Value: A. thaliana
  misc_feature: MA Experiment 20001451 PARAMETER Experiment Name: At_Far-red-induction_P Parameter: Plant Line Value: Columbia
  misc_feature: MA Experiment 20001451 PARAMETER Experiment Name: At_Far-red-induction_P Parameter: Timepoint (hr) Value: 24
  misc_feature: MA Experiment 20001451 PARAMETER Experiment Name: At_Far-red-induction_P Parameter: Tissue Value: Whole Plant
  misc_feature: MA Experiment ID: 20001558 Result: Down-regulated in Transcription
  misc_feature: MA Experiment 20001558 PARAMETER Experiment Name: At_Drought_Soil_Dry_P Parameter: Age (day) Value: 27
  misc_feature: MA Experiment 20001558 PARAMETER Experiment Name: At_Drought_Soil_Dry_P Parameter: Organism Value: A. thaliana
  misc_feature: MA Experiment 20001558 PARAMETER Experiment Name: At_Drought_Soil_Dry_P Parameter: Plant Line Value: WS
  misc_feature: MA Experiment 20001558 PARAMETER Experiment Name: At_Drought_Soil_Dry_P Parameter: Post Timepoint (hr) Value: 6
  misc_feature: MA Experiment 20001558 PARAMETER Experiment Name: At_Drought_Soil_Dry_P Parameter: Post-Treatment Value: Re-Water vs. No Drought
  misc_feature: MA Experiment 20001558 PARAMETER Experiment Name: At_Drought_Soil_Dry_P Parameter: Timepoint (day) Value: 13
  misc_feature: MA Experiment 20001558 PARAMETER Experiment Name: At_Drought_Soil_Dry_P Parameter: Treatment Value: Drought vs. No Drought
  misc_feature: MA Experiment ID: 20001910 Result: Up-regulated in Transcription
  misc_feature: MA Experiment 20001910 PARAMETER Experiment Name: At_Drought_Reproduction_P Parameter: Age (day) Value: 37
  misc_feature: MA Experiment 20001910 PARAMETER Experiment Name: At_Drought_Reproduction_P Parameter: Organism Value: A. thaliana
  misc_feature: MA Experiment 20001910 PARAMETER Experiment Name: At_Drought_Reproduction_P Parameter: Plant Line Value: WS
  misc_feature: MA Experiment 20001910 PARAMETER Experiment Name: At_Drought_Reproduction_P Parameter: Timepoint (day) Value: 7
  misc_feature: MA Experiment 20001910 PARAMETER Experiment Name: At_Drought_Reproduction_P Parameter: Tissue Value: Flowers
  misc_feature: MA Experiment 20001910 PARAMETER Experiment Name: At_Drought_Reproduction_P Parameter: Treatment Value: Drought vs. No Drought
  misc_feature: MA Experiment ID: 20001911 Result: Up-regulated in Transcription
  misc_feature: MA Experiment 20001911 PARAMETER Experiment Name: At_Drought_Reproduction_P Parameter: Age (day) Value: 40
  misc_feature: MA Experiment 20001911 PARAMETER Experiment Name: At_Drought_Reproduction_P Parameter: Organism Value: A. thaliana
  misc_feature: MA Experiment 20001911 PARAMETER Experiment Name: At_Drought_Reproduction_P Parameter: Plant Line Value: WS
  misc_feature: MA Experiment 20001911 PARAMETER Experiment Name: At_Drought_Reproduction_P Parameter: Timepoint (day) Value: 10
  misc_feature: MA Experiment 20001911 PARAMETER Experiment Name: At_Drought_Reproduction_P Parameter: Tissue Value: Flowers
  misc_feature: MA Experiment 20001911 PARAMETER Experiment Name: At_Drought_Reproduction_P Parameter: Treatment Value: Drought vs. No Drought
ctgcttcttcttcgccgtctctgtgcggcctcttcctcttcctcttctaaacaatgacggaggaagaggtagctatggaagtggaagctctagaagcagtttacagcgaagactgcgttatactggattcgtatcctcctcatcttcacctccatatcaagccccgtaccgccgaaatctcttctcagcagtttgtggaagccgttgttagattccaagcaggttctaagtatccagatgaaccacctcggattagtctgattgaatccaagggtcttgacgagcaaaggcaaaagcttttgattggcatagtgcaagagaaagcttctcaactatcatcttctttaatgcttgtagaactttgtgagtggagaggctcacaattatgaatcacccggagggagattgtccactgtgtttgtatccgttattccctgaggatggcgggagtaaacaaatgccatttatgaagctgatgtcttgttttcattgtttccactgtgagtgcatcattaggtggtggaattggcttcatgcacaggaagaggctgattcgaaatctggtgacactttacatatgcgtagaggatcaactgctcgagaaggtaattctggatcagcagataaaagcttgggaaactgtccagtgtgccgcaaaatttttcactcgagtgacattgaacatgttcttgacttagttggtgctcaatcatctctacaggactctagtttaataccaggcaaggaccaagacccgctgctccagtcagattcagagaacataagaagagagcggtttgagtctattctaaagacgcaggaagaaaagggtggtttggttcaaccgaagaaaaacatatcggtggtgcccggtatgtatcttcctccaccagctcatgcatcaacgtcacgaaacgaagaagaagaagctggtgaaagccaagaacaaggagaagaggaacccaaagaagctgaatcagagacaaactctagcagctccaccaacaggagaggtcgagggagatggagaggcagaggcagaagcagaggccggggacctactgtcaatgaaaggaagccgaattcgcaagatccaagaaaaccgacgagacaatgggtgcagagagccagagaaggagacaaataatttatgctaatcttgtgtgatacatcaaactcaaactcaaacacaagatatatatatattgtgagcatattac

SEQ ID NO: 77910 - protein, 253 aa, Arabidopsis thaliana; identical to SEQ ID NO: 48880
  peptide (1)..(253): Ceres Seq. ID no. 12580986
  misc_feature (52)..(253): Homolog of NCBI NO: 11357688 NR Description: hypothetical protein F27H5.90 - Arabidopsis >gi|7576206|emb|CAB87867.1| putative protein [Arabidopsis
  misc_feature (1)..(253): Homolog of NCBI NO: 30695166 NR Description: expressed protein [Arabidopsis thaliana]
  misc_feature (1)..(253): Homolog of NCBI NO: 17065268 NR Description: putative protein [Arabidopsis thaliana]

SEQ ID NO: 77911 - protein, 229 aa, Arabidopsis thaliana
  peptide (1)..(229): Ceres Seq. ID no. 12580987
  misc_feature (28)..(229): Homolog of NCBI NO: 11357688 NR Description: hypothetical protein F27H5.90 - Arabidopsis >gi|7576206|emb|CAB87867.1| putative protein [Arabidopsis
  misc_feature (1)..(229): Homolog of NCBI NO: 30695166 NR Description: expressed protein [Arabidopsis thaliana]
  misc_feature (1)..(229): Homolog of NCBI NO: 17065268 NR Description: putative protein [Arabidopsis thaliana]
MPFMKLMSCFHCFHCECIIRWWNWLHAQEEADSKSGDTLHMRRGSTAREGNSGSADKSLGNCPVCRKIFHSSDIEHVLDLVGAQSSLQDSSLIPGKDQDPLLQSDSENIRRERFESILKTQEEKGGLVQPKKNISVVPGMYLPPPAHASTSRNEEEEAGESQEQGEEEPKEAESETNSSSSTNRRGRGRWRGRGRSRGRGPTVNERKPNSQDPRKPTRQWVQRAREGDK

SEQ ID NO: 77912 - protein, 226 aa, Arabidopsis thaliana
  peptide (1)..(226): Ceres Seq. ID no. 12580988
  misc_feature (25)..(226): Homolog of NCBI NO: 11357688 NR Description: hypothetical protein F27H5.90 - Arabidopsis >gi|7576206|emb|CAB87867.1| putative protein [Arabidopsis
  misc_feature (1)..(226): Homolog of NCBI NO: 30695166 NR Description: expressed protein [Arabidopsis thaliana]
  misc_feature (1)..(226): Homolog of NCBI NO: 17065268 NR Description: putative protein [Arabidopsis thaliana]
MKLMSCFHCFHCECIIRWWNWLHAQEEADSKSGDTLHMRRGSTAREGNSGSADKSLGNCPVCRKIFHSSDIEHVLDLVGAQSSLQDSSLIPGKDQDPLLQSDSENIRRERFESILKTQEEKGGLVQPKKNISVVPGMYLPPPAHASTSRNEEEEAGESQEQGEEEPKEAESETNSSSSTNRRGRGRWRGRGRSRGRGPTVNERKPNSQDPRKPTRQWVQRAREGDK

SEQ ID NO: 77913 - DNA, 1877 bp, Arabidopsis thaliana
  misc_feature (1)..(1877): Ceres Seq. ID no. 12581011
  misc_feature: MA Experiment ID: 20000173 Result: Up-regulated in Transcription
  misc_feature: MA Experiment 20000173 PARAMETER Experiment Name: At_42deg_Heat_P Parameter: Age (day) Value: 14
  misc_feature: MA Experiment 20000173 PARAMETER Experiment Name: At_42deg_Heat_P Parameter: Organism Value: A. thaliana
  misc_feature: MA Experiment 20000173 PARAMETER Experiment Name: At_42deg_Heat_P Parameter: Plant Line Value: WS
  misc_feature: MA Experiment 20000173 PARAMETER Experiment Name: At_42deg_Heat_P Parameter: Temperature (deg C) Value: 42 vs. 22
  misc_feature: MA Experiment 20000173 PARAMETER Experiment Name: At_42deg_Heat_P Parameter: Timepoint (hr) Value: 6
  misc_feature: MA Experiment 20000173 PARAMETER Experiment Name: At_42deg_Heat_P Parameter: Tissue Value: Aerial
  misc_feature: MA Experiment ID: 20000438 Result: Up-regulated in Transcription
  misc_feature: MA Experiment 20000438 PARAMETER Experiment Name: At_Shoots__P Parameter: Age (day) Value: 14
  misc_feature: MA Experiment 20000438 PARAMETER Experiment Name: At_Shoots__P Parameter: Tissue Value: Shoots vs. Whole Plant
  misc_feature: MA Experiment ID: 20000439 Result: Up-regulated in Transcription
  misc_feature: MA Experiment 20000439 PARAMETER Experiment Name: At_Roots__P Parameter: Age (day) Value: 14 vs. 21
  misc_feature: MA Experiment 20000439 PARAMETER Experiment Name: At_Roots__P Parameter: Organism Value: A. thaliana
  misc_feature: MA Experiment 20000439 PARAMETER Experiment Name: At_Roots__P Parameter: Tissue Value: Roots vs. Whole Plant
  misc_feature: MA Experiment ID: 20000495 Result: Down-regulated in Transcription
  misc_feature: MA Experiment 20000495 PARAMETER Experiment Name: At_Guard_Cells_P Parameter: Harvest Date Value: 8/2/2002
  misc_feature: MA Experiment 20000495 PARAMETER Experiment Name: At_Guard_Cells_P Parameter: Organism Value: A. thaliana
  misc_feature: MA Experiment 20000495 PARAMETER Experiment Name: At_Guard_Cells_P Parameter: Tissue Value: Guard Cells vs. Leaves
  misc_feature: MA Experiment ID: 20001248 Result: Down-regulated in Transcription
  misc_feature: MA Experiment 20001248 PARAMETER Experiment Name: At_Far-red-induction_P Parameter: Age (day) Value: 7
  misc_feature: MA Experiment 20001248 PARAMETER Experiment Name: At_Far-red-induction_P Parameter: Light Value: Far-red vs. White
  misc_feature: MA Experiment 20001248 PARAMETER Experiment Name: At_Far-red-induction_P Parameter: Organism Value: A. thaliana
  misc_feature: MA Experiment 20001248 PARAMETER Experiment Name: At_Far-red-induction_P Parameter: Plant Line Value: Columbia
  misc_feature: MA Experiment 20001248 PARAMETER Experiment Name: At_Far-red-induction_P Parameter: Timepoint (hr) Value: 4
  misc_feature: MA Experiment 20001248 PARAMETER Experiment Name: At_Far-red-induction_P Parameter: Tissue Value: Whole Plant
  misc_feature: MA Experiment ID: 20001560 Result: Down-regulated in Transcription
  misc_feature: MA Experiment 20001560 PARAMETER Experiment Name: At_Drought_Soil_Dry_P Parameter: Age (day) Value: 28
  misc_feature: MA Experiment 20001560 PARAMETER Experiment Name: At_Drought_Soil_Dry_P Parameter: Organism Value: A. thaliana
  misc_feature: MA Experiment 20001560 PARAMETER Experiment Name: At_Drought_Soil_Dry_P Parameter: Plant Line Value: WS
  misc_feature: MA Experiment 20001560 PARAMETER Experiment Name: At_Drought_Soil_Dry_P Parameter: Post Timepoint (hr) Value: None
  misc_feature: MA Experiment 20001560 PARAMETER Experiment Name: At_Drought_Soil_Dry_P Parameter: Post-Treatment Value: None
  misc_feature: MA Experiment 20001560 PARAMETER Experiment Name: At_Drought_Soil_Dry_P Parameter: Timepoint (day) Value: 14
  misc_feature: MA Experiment 20001560 PARAMETER Experiment Name: At_Drought_Soil_Dry_P Parameter: Treatment Value: Drought vs. No Drought
gtgatcgaaagataccaaactaaagagtttaactttcttcttccttcttctttacttcaacatctgatattttctctctctcttttattcagtctgaaacaatatttctcggtagattaagatctaaagctcgttgatctagattcttgtttctatttttgtgtgttttaggctttgttggttttaccaagtgttgtgattcagtttgttttgaggtctgagtctatgggggagattgtggttttaagtagtgatgatggtatggagactataaagaacagagtaaagtcatcggaagttgttcagtgggagaagtatttgcctaaaactgtacttagggttttgttagttgaatctgattactcaactcgtcaaatcatcactgcccttcttcgtaaatgctgttacaaagttgtagctgtttctgatggtttagctgcgtgggaggttctaaaggagaagtcacataacattgatcttatactaacagagctggatttgccatctatatctggttttgctctgcttgctttggtaatggagcatgaagcttgcaagaacattcctgtcataagtacgatgtgatgtcttctcaagattcgataaaaatggtgttgaagtgtatgctgagaggtgctgctgattatctaatcaaaccaatgaggaaaaacgagttgaaaaatctatggcaacatgtttggagaagactgactgtaaattttttatttccttttttgaggtttccttgtgttgaagtttgaaacttgaaagacttattgtcttttttggttatggatcagttgcgtgatgatcctactgctcatgctcaaagcttaccagcttcacagcacaaccttgaagatactgatgaaacttgtgaagattccagatatcattcagatcaaggaagtggtgctcaggctatcaattacaatggtcacaataagctgatggagaatggcaaatcagtggatgaaagagacgagtttaaggaaacttttgatgtgacaatggatttgattggtggaattgacaagcgtcctgatagtatttataaagacaagagtcgagatgagtgtgttggtcctgagcttggactttctctgaaaagatcttgctctgtaagttttgagaaccaagatgaaagcaagcatcaaaagcttagcctctctgatgcgtcggccttctcaagatttgaggaaagcaagtcagcagaaaaagccgtcgttgctttagaggagagtacttcaggtgagccaaagacaccaaccgaatcacatgaaaagttaagaaaagtaacatctgatcaaggaagcgccacaacgagcagcaaccaggagaatatcggatcatcaagcgtaagcttccgtaaccaagttcttcagtccacagtaacgaatcagaagcaagattcacccataccggtagaatcaaatcgcgagaaagcagctagcaaggaagtagaagctggttctcaaagcaccaatgaggggattgctggacaaagcagtagcacagagaaaccaaaggaagaagaaagtgcgaaacaacgttggagtagaagccagagagaagctgcattgatgaagttccggttgaagaggaaagatcgatgctttgacaaaaaggttcggtaccagagcaggaagaagctagcagaacaacgtcctcgagtgaaaggccagttcgtgcgaaccgtgaattcagacgcgtctacaaaatcatgaagagctctttcagtttttcctctgatttcttttgttgattttataacagaaacttatttagcttttgcaatctttagtgtgctttttttttttatgtatttgattggcttcttcttctcagctaatatgagatactggggcaacttttgt

SEQ ID NO: 77914 - protein, 311 aa, Arabidopsis thaliana
  peptide (1)..(311): Ceres Seq. ID no. 12581012
  misc_feature (265)..(304): Pfam Name: CCT motif Pfam Description: CCT motif
  misc_feature (4)..(311): Homolog of NCBI NO: 18407171 NR Description: expressed protein; protein id: At2g46790.1, by cDNA: gi_10280999, supported by cDNA: gi_9247021 [Arabidopsis
  misc_feature (4)..(281): Homolog of NCBI NO: 7485762 NR Description: hypothetical protein At2g46790 [imported] -
  misc_feature (1)..(311): Homolog of NCBI NO: 20466420 NR Description: unknown protein [Arabidopsis thaliana]
  misc_feature (1)..(270): Homolog of NCBI NO: 18407171 NR Description: expressed protein; protein id: At2g46790.1, by cDNA: gi_10280999, supported by cDNA: gi_9247021 [Arabidopsis
  misc_feature (1)..(218): Homolog of NCBI NO: 7485762 NR Description: hypothetical protein At2g46790 [imported] -
  misc_feature (134)..(279): Homolog of NCBI NO: 15226423 NR Description: hypothetical protein; protein id: At2g46670.1
  misc_feature (1)..(135): Homolog of NCBI NO: 9758535 NR Description: contains similarity to two-component response protein~gene_id:T31K7.5 [Arabidopsis thaliana]
  misc_feature (259)..(305): Homolog of NCBI NO: 9758535 NR Description: contains similarity to two-component response protein~gene_id:T31K7.5 [Arabidopsis thaliana]
  misc_feature (1)..(135): Homolog of NCBI NO: 18420797 NR Description: putative protein; protein id: At5g24470.1,
  misc_feature (259)..(305): Homolog of NCBI NO: 18420797 NR Description: putative protein; protein id: At5g24470.1,
MDQLRDDPTAHAQSLPASQHNLEDTDETCEDSRYHSDQGSGAQAINYNGHNKLMENGKSVDERDEFKETFDVTMDLIGGIDKRPDSIYKDKSRDECVGPELGLSLKRSCSVSFENQDESKHQKLSLSDASAFSRFEESKSAEKAVVALEESTSGEPKTPTESHEKLRKVTSDQGSATTSSNQENIGSSSVSFRNQVLQSTVTNQKQDSPIPVESNREKAASKEVEAGSQSTNEGIAGQSSSTEKPKEEESAKQRWSRSQREAALMKFRLKRKDRCFDKKVRYQSRKKLAEQRPRVKGQFVRTVNSDASTKS

SEQ ID NO: 77915 - protein, 258 aa, Arabidopsis thaliana
  peptide (1)..(258): Ceres Seq. ID no. 12581013
  misc_feature (212)..(251): Pfam Name: CCT motif Pfam Description: CCT motif
  misc_feature (1)..(258): Homolog of NCBI NO: 18407171 NR Description: expressed protein; protein id: At2g46790.1, by cDNA: gi_10280999, supported by cDNA: gi_9247021 [Arabidopsis
  misc_feature (1)..(228): Homolog of NCBI NO: 7485762 NR Description: hypothetical protein At2g46790 [imported] -
  misc_feature (1)..(258): Homolog of NCBI NO: 20466420 NR Description: unknown protein [Arabidopsis thaliana]
  misc_feature (1)..(217): Homolog of NCBI NO: 18407171 NR Description: expressed protein; protein id: At2g46790.1, by cDNA: gi_10280999, supported by cDNA: gi_9247021 [Arabidopsis
  misc_feature (1)..(165): Homolog of NCBI NO: 7485762 NR Description: hypothetical protein At2g46790 [imported] -
  misc_feature (81)..(226): Homolog of NCBI NO: 15226423 NR Description: hypothetical protein; protein id: At2g46670.1
  misc_feature (1)..(82): Homolog of NCBI NO: 9758535 NR Description: contains similarity to two-component response protein~gene_id:T31K7.5 [Arabidopsis thaliana]
  misc_feature (206)..(252): Homolog of NCBI NO: 9758535 NR Description: contains similarity to two-component response protein~gene_id:T31K7.5 [Arabidopsis thaliana]
  misc_feature (1)..(82): Homolog of NCBI NO: 18420797 NR Description: putative protein; protein id: At5g24470.1,
  misc_feature (206)..(252): Homolog of NCBI NO: 18420797 NR Description: putative protein; protein id: At5g24470.1,
MENGKSVDERDEFKETFDVTMDLIGGIDKRPDSIYKDKSRDECVGPELGLSLKRSCSVSFENQDESKHQKLSLSDASAFSRFEESKSAEKAVVALEESTSGEPKTPTESHEKLRKVTSDQGSATTSSNQENIGSSSVSFRNQVLQSTVTNQKQDSPIPVESNREKAASKEVEAGSQSTNEGIAGQSSSTEKPKEEESAKQRWSRSQREAALMKFRLKRKDRCFDKKVRYQSRKKLAEQRPRVKGQFVRTVNSDASTKS

SEQ ID NO: 77916 - protein, 238 aa, Arabidopsis thaliana
  peptide (1)..(238): Ceres Seq. ID no. 12581014
  misc_feature (192)..(231): Pfam Name: CCT motif Pfam Description: CCT motif
  misc_feature (1)..(238): Homolog of NCBI NO: 18407171 NR Description: expressed protein; protein id: At2g46790.1, by cDNA: gi_10280999, supported by cDNA: gi_9247021 [Arabidopsis
  misc_feature (1)..(208): Homolog of NCBI NO: 7485762 NR Description: hypothetical protein At2g46790 [imported] -
  misc_feature (1)..(238): Homolog of NCBI NO: 20466420 NR Description: unknown protein [Arabidopsis thaliana]
  misc_feature (1)..(197): Homolog of NCBI NO: 18407171 NR Description: expressed protein; protein id: At2g46790.1, by cDNA: gi_10280999, supported by cDNA: gi_9247021 [Arabidopsis
  misc_feature (1)..(145): Homolog of NCBI NO: 7485762 NR Description: hypothetical protein At2g46790 [imported] -
  misc_feature (61)..(206): Homolog of NCBI NO: 15226423 NR Description: hypothetical protein; protein id: At2g46670.1
  misc_feature (1)..(62): Homolog of NCBI NO: 9758535 NR Description: contains similarity to two-component response protein~gene_id:T31K7.5 [Arabidopsis thaliana]
  misc_feature (186)..(232): Homolog of NCBI NO: 9758535 NR Description: contains similarity to two-component response protein~gene_id:T31K7.5 [Arabidopsis thaliana]
  misc_feature (1)..(62): Homolog of NCBI NO: 18420797 NR Description: putative protein; protein id: At5g24470.1,
  misc_feature (186)..(232): Homolog of NCBI NO: 18420797 NR Description: putative protein; protein id: At5g24470.1,
MDLIGGIDKRPDSIYKDKSRDECVGPELGLSLKRSCSVSFENQDESKHQKLSLSDASAFSRFEESKSAEKAVVALEESTSGEPKTPTESHEKLRKVTSDQGSATTSSNQENIGSSSVSFRNQVLQSTVTNQKQDSPIPVESNREKAASKEVEAGSQSTNEGIAGQSSSTEKPKEEESAKQRWSRSQREAALMKFRLKRKDRCFDKKVRYQSRKKLAEQRPRVKGQFVRTVNSDASTKS

SEQ ID NO: 77917 - DNA, 1212 bp, Arabidopsis thaliana
  misc_feature (1)..(1212): Ceres Seq. ID no. 12581019
  misc_feature: MA Experiment ID: 108434 Result: Down-regulated in Transcription
  misc_feature: MA Experiment 108434 PARAMETER Experiment Name: At_Root_Tips_cDNA_P Parameter: Tissue Value: Root Tips
  misc_feature: MA Experiment ID: 108469 Result: Up-regulated in Transcription
  misc_feature: MA Experiment ID: 108572 Result: Down-regulated in Transcription
  misc_feature: MA Experiment 108572 PARAMETER Experiment Name: At_Drought_cDNA_P Parameter: Timepoint (hr) Value: 1
  misc_feature: MA Experiment 108572 PARAMETER Experiment Name: At_Drought_cDNA_P Parameter: Tissue Value: Aerial
  misc_feature: MA Experiment 108572 PARAMETER Experiment Name: At_Drought_cDNA_P Parameter: Treatment Value: Drought vs. No Drought
  misc_feature: MA Experiment ID: 108579 Result: Up-regulated in Transcription
  misc_feature: MA Experiment 108579 PARAMETER Experiment Name: At_4deg_Cold_cDNA_P Parameter: Temperature (deg C) Value: 4 vs. 22
  misc_feature: MA Experiment 108579 PARAMETER Experiment Name: At_4deg_Cold_cDNA_P Parameter: Timepoint (hr) Value: 6
  misc_feature: MA Experiment 108579 PARAMETER Experiment Name: At_4deg_Cold_cDNA_P Parameter: Tissue Value: Aerial
  misc_feature: MA Experiment ID: 108585 Result: Up-regulated in Transcription
  misc_feature: MA Experiment 108585 PARAMETER Experiment Name: At_5mM_NaNP_cDNA_P Parameter: Timepoint (hr) Value: 6
  misc_feature: MA Experiment 108585 PARAMETER Experiment Name: At_5mM_NaNP_cDNA_P Parameter: Tissue Value: Aerial
  misc_feature: MA Experiment 108585 PARAMETER Experiment Name: At_5mM_NaNP_cDNA_P Parameter: Treatment Value: null
  misc_feature: MA Experiment ID: 108594 Result: Up-regulated in Transcription
  misc_feature: MA Experiment 108594 PARAMETER Experiment Name: At_Ler-rhl_Root_cDNA_P Parameter: Plant Line Value: null
  misc_feature: MA Experiment ID: 108667 Result: Up-regulated in Transcription
  misc_feature: MA Experiment 108667 PARAMETER Experiment Name: At_2mM_SA_cDNA_P Parameter: Plant Line Value: WS
  misc_feature: MA Experiment 108667 PARAMETER Experiment Name: At_2mM_SA_cDNA_P Parameter: Timepoint (hr) Value: 1
  misc_feature: MA Experiment 108667 PARAMETER Experiment Name: At_2mM_SA_cDNA_P Parameter: Treatment Value: 2mM SA vs. No Treatment
  misc_feature: MA Experiment ID: 20000224 Result: Down-regulated in Transcription
  misc_feature: MA Experiment ID: 20000314 Result: Down-regulated in Transcription
  misc_feature: MA Experiment 20000314 PARAMETER Experiment Name: At_14day_Shoots-Roots_Sub_P Parameter: Age (day) Value: 14
  misc_feature: MA Experiment 20000314 PARAMETER Experiment Name: At_14day_Shoots-Roots_Sub_P Parameter: Organism Value: A. thaliana
  misc_feature: MA Experiment 20000314 PARAMETER Experiment Name: At_14day_Shoots-Roots_Sub_P Parameter: Plant Line Value: WS
  misc_feature: MA Experiment 20000314 PARAMETER Experiment Name: At_14day_Shoots-Roots_Sub_P Parameter: Tissue Value: Roots vs. Whole Plant
  misc_feature: MA Experiment ID: 20000315 Result: Down-regulated in Transcription
  misc_feature: MA Experiment 20000315 PARAMETER Experiment Name: At_14day_Shoots-Roots_Sub_P Parameter: Age (day) Value: 14
  misc_feature: MA Experiment 20000315 PARAMETER Experiment Name: At_14day_Shoots-Roots_Sub_P Parameter: Organism Value: A. thaliana
  misc_feature: MA Experiment 20000315 PARAMETER Experiment Name: At_14day_Shoots-Roots_Sub_P Parameter: Plant Line Value: WS
  misc_feature: MA Experiment 20000315 PARAMETER Experiment Name: At_14day_Shoots-Roots_Sub_P Parameter: Tissue Value: Shoots vs. Whole Plant
  misc_feature: MA Experiment ID: 20000347 Result: Up-regulated in Transcription
  misc_feature: MA Experiment 20000347 PARAMETER Experiment Name: At_2mM_SA_Sub_P Parameter: Age (day) Value: 14
  misc_feature: MA Experiment 20000347 PARAMETER Experiment Name: At_2mM_SA_Sub_P Parameter: Organism Value: A. thaliana
  misc_feature: MA Experiment 20000347 PARAMETER Experiment Name: At_2mM_SA_Sub_P Parameter: Plant Line Value: WS
  misc_feature: MA Experiment 20000347 PARAMETER Experiment Name: At_2mM_SA_Sub_P Parameter: Timepoint (hr) Value: 6
  misc_feature: MA Experiment 20000347 PARAMETER Experiment Name: At_2mM_SA_Sub_P Parameter: Tissue Value: Aerial
  misc_feature: MA Experiment 20000347 PARAMETER Experiment Name: At_2mM_SA_Sub_P Parameter: Treatment Value: 2mM SA vs. No Treatment
  misc_feature: MA Experiment ID: 20000355 Result: Down-regulated in Transcription
  misc_feature: MA Experiment 20000355 PARAMETER Experiment Name: At_Siliques_Sub_P Parameter: Age (day) Value: 21
  misc_feature: MA Experiment 20000355 PARAMETER Experiment Name: At_Siliques_Sub_P Parameter: Organism Value: A. thaliana
  misc_feature: MA Experiment 20000355 PARAMETER Experiment Name: At_Siliques_Sub_P Parameter: Plant Line Value: WS
  misc_feature: MA Experiment 20000355 PARAMETER Experiment Name: At_Siliques_Sub_P Parameter: Tissue Value: Less Than 5mm Siliques vs. Whole Plant
  misc_feature: MA Experiment ID: 20000440 Result: Down-regulated in Transcription
  misc_feature: MA Experiment 20000440 PARAMETER Experiment Name: At_Closed-Flower__Sub_P Parameter: Tissue Value: Closed Flower vs. Whole Plant
aaagaggaaaatcccaacaataaagagcaaacgatcttacagctcataatatttcgttaattatcaaattgctaataggagaaaaaaatgggtcaagctttgggttgtattcaagttgatcagtcgaatgtagcaatcaaagagacttttgggaaattcgacgaagttcttgagccgggttgtcactgtttgccatggtgtttgggaagtcaagtcgctggtcacctttctttacgtgttcaacagctcgatgttcgctgcgagacaaagactaaggataatgtgtttgtcacggttgttgcttccattcaataccgtgccttagcggagagtgctcaagatgctttttacaagctcagcaacacgaggaatcagattcaagcttatgtctttgatgtgatccgagcaagtgtacctaagctggatctagactctacctttgagcaaaagaatgacattgcaaaaaccgttgagactgagctcgaaaaggctatgtcgcattacgggtatgagattgttcagacactgattgtggatatcgagcctgatgtgcacgtcaagagggcaatgaatgagatcaatgctgcttctagaatgagagaggcagcgagtgagaaagctgaggcagagaagattctgcagatcaagcgtgctgagggagaagctgaatcgaaatacctttcaggtatgggtatagcccgtcagagacaagccattgtggacggtctgagaaacagcgtcctcgccttctccgagtctgttccaggaacatcttccaaagacgtgatggatatggttcttgtgactcagtactttgacacattgaaggaaattggtgcttcttcgaagtcaaactcggtgttcataccgcacggtccaggcgctgttagggacattgcttcacagatcagggatggtcttcttcagggtaactctgctgctgagtagagaaatgtctcaaagtacaaaaaggctttttcagagttttagagttgtgttactacttgctactcagtttatcttttagcggttggctctatatgggttcttaaatttcttatcgtttctctcttctaggcttgtggacttgatccattttcttgttttatgggtttgtggatagagtttgggcttgaaaaatatttgtgttattttgggttttaatgtcgttaactcgttattaatgtttaaacagtggttaaagaatttgtt

SEQ ID NO: 77918 - protein, 286 aa, Arabidopsis thaliana; identical to SEQ ID NO: 23094
  peptide (1)..(286): Ceres Seq. ID no. 12581020
  misc_feature (1)..(286): Homolog of NCBI NO: 15222481 NR Description: unknown protein; protein id: At1g69840.1, by cDNA: gi_20466747 [Arabidopsis thaliana]
  misc_feature (1)..(284): Homolog of NCBI NO: 3928150 NR Description: hypothetical protein [Cicer arietinum]
  misc_feature (1)..(282): Homolog of NCBI NO: 7716466 NR Description: hypersensitive-induced response protein [Zea mays]
  misc_feature (1)..(284): Homolog of NCBI NO: 15241939 NR Description: putative protein; protein id: At5g62740.1, by cDNA: 2641., supported by cDNA: gi_17065547 [Arabidopsis
  misc_feature (1)..(281): Homolog of NCBI NO: 23345042 NR Description: hypersensitive-induced reaction protein 1
  misc_feature (1)..(280): Homolog of NCBI NO: 14150732 NR Description: hypersensitive-induced response protein [Oryza
  misc_feature (1)..(283): Homolog of NCBI NO: 28476864 NR Description: hypersensitive-induced reaction protein 2
  misc_feature (1)..(282): Homolog of NCBI NO: 9998903 NR Description: putative membrane protein [Zea mays]
  misc_feature (1)..(282): Homolog of NCBI NO: 7716468 NR Description: hypersensitive-induced response protein [Zea mays]
  misc_feature (1)..(282): Homolog of NCBI NO: 13194676 NR Description: hypersensitivity-induced response-like protein

SEQ ID NO: 77919 - protein, 151 aa, Arabidopsis thaliana; identical to SEQ ID NO: 23095
  peptide (1)..(151): Ceres Seq. ID no. 12581021
  misc_feature (1)..(151): Homolog of NCBI NO: 15222481 NR Description: unknown protein; protein id: At1g69840.1, by cDNA: gi_20466747 [Arabidopsis thaliana]
  misc_feature (1)..(149): Homolog of NCBI NO: 3928150 NR Description: hypothetical protein [Cicer arietinum]
  misc_feature (1)..(147): Homolog of NCBI NO: 7716466 NR Description: hypersensitive-induced response protein [Zea mays]
  misc_feature (1)..(149): Homolog of NCBI NO: 15241939 NR Description: putative protein; protein id: At5g62740.1, by cDNA: 2641., supported by cDNA: gi_17065547 [Arabidopsis
  misc_feature (1)..(146): Homolog of NCBI NO: 23345042 NR Description: hypersensitive-induced reaction protein 1
  misc_feature (1)..(145): Homolog of NCBI NO: 14150732 NR Description: hypersensitive-induced response protein [Oryza
  misc_feature (1)..(148): Homolog of NCBI NO: 28476864 NR Description: hypersensitive-induced reaction protein 2
  misc_feature (1)..(147): Homolog of NCBI NO: 9998903 NR Description: putative membrane protein [Zea mays]
  misc_feature (1)..(147): Homolog of NCBI NO: 7716468 NR Description: hypersensitive-induced response protein [Zea mays]
  misc_feature (1)..(147): Homolog of NCBI NO: 13194676 NR Description: hypersensitivity-induced response-like protein

SEQ ID NO: 77920 - DNA, 1881 bp, Arabidopsis thaliana
  misc_feature (1)..(1881): Ceres Seq. ID no. 12581026
  misc_feature: MA Experiment ID: 20000179 Result: Up-regulated in Transcription
  misc_feature: MA Experiment 20000179 PARAMETER Experiment Name: At_Germinating_Seeds_P Parameter: Age (hr) Value: 6 vs. 0
  misc_feature: MA Experiment 20000179 PARAMETER Experiment Name: At_Germinating_Seeds_P Parameter: Tissue Value: Germinating Seeds
  misc_feature: MA Experiment ID: 20001556 Result: Down-regulated in Transcription
  misc_feature: MA Experiment 20001556 PARAMETER Experiment Name: At_Drought_Soil_Dry_P Parameter: Age (day) Value: 26
  misc_feature: MA Experiment 20001556 PARAMETER Experiment Name: At_Drought_Soil_Dry_P Parameter: Organism Value: A. thaliana
  misc_feature: MA Experiment 20001556 PARAMETER Experiment Name: At_Drought_Soil_Dry_P Parameter: Plant Line Value: WS
  misc_feature: MA Experiment 20001556 PARAMETER Experiment Name: At_Drought_Soil_Dry_P Parameter: Post Timepoint (hr) Value: None
  misc_feature: MA Experiment 20001556 PARAMETER Experiment Name: At_Drought_Soil_Dry_P Parameter: Post-Treatment Value: None
  misc_feature: MA Experiment 20001556 PARAMETER Experiment Name: At_Drought_Soil_Dry_P Parameter: Timepoint (day) Value: 12
  misc_feature: MA Experiment 20001556 PARAMETER Experiment Name: At_Drought_Soil_Dry_P Parameter: Treatment Value: Drought vs. No Drought
gtttccgcacaaagcaaaaaaatctctgtaaaagcagaacgataatggagtcacaattatggaattggatcttacctcttttgatctcttctctcctcatctccttcgtcgctttctatggattcttcgtcaaaccgaagcggaacggtctccgtcacgatcggaaaactgtttctaccgtcacctccgacgtcggatctgttaatattaccggagatactgtcgctgatgtcattgttgttggagctggtgttgctggttctgctcttgcttatactcttggaaaggataaacgccgagttcatgtgattgaaagagatttatcggagcctgatcgtattgttggggagttgttacagcctgggggttacctcaagttactggagttgggaattgaagattgtgtggaagaaatagatgctcagcgtgtgtatggttatgcactttttaaaaatgggaaacgcattcgcttagcttatcctttggagaagtttcacgaagatgtatctggaaggagctttcacaatggacgttttattcaaagaatgcgggagaaagctgcttcacttcccaatgttcagctagagcaaggaacagttctttctcttctagaagagaatgggactatcaaaggtgtgagatataagaataaagcaggagaggaacaaaccgcatttgcagctttgactatagtttgtgatggttgtttctcaaacctgcgtcgctctttgtgcaatcctcaggtcgaggtgccttcttgttttgtcgggttggtcctagagaactgcaatctcccatatgcaaaccatggacatgtcgtcttagcagatccatcaccaattttgatgtatccaattagtagcacagaggtgcggtgcctagttgatgttcccggccagaaagtgccgtccattgcaaatggtgaaatgaaaaactatttgaagactgttgtggctcctcagatgcctcatgaggtctatgactctttcattgctgcggttgataaaggaaatattaagtccatgccaaacagaagcatgccagcttctccttatcctactccaggggctctgttaatgggagatgcatttaacatgcgtcatcctttgacgggtggaggaatgacggttgcattagctgacattgttgtcctgcgtaatctccttagaccgctgcgtgatcttagtgacggcgctagtctctgcaaatatcttgaatcattttacactctgcgaaagccagttgcagcaacaatcaacacccttgcgaatgctctttaccaagtgttctgttcatcagaaaatgaagcaagaaacgagatgagggaagcttgcttcgattatctgggcctcgggggtatgtgcacaagtggaccagtatctttgctttcgggtttgaaccctcgaccattaacacttgtctgccatttctttgcggttgcggtttatggagtcatacggttgttaatcccattcccttccccaaaacgaatctggcttggagccaaattaatctcgggagcatcggggataatatttccgataataaaagcggaaggagttaggcagatgtttttcccagcaactgtacctgcatactactacaaagctcctacagttggagaaaccaaatgttcatagttccaaataattctgtcacgagaaatgccatacaaaagaaaatgaaagttgtggattgcatttggtgtgtttgttgtgtaagtgttctttaaacgtataaaagtgatgatactgcgatgattatctctgttttttttatataggtatatgatggttgtatcttagttgcaaacggtataccattcttttacatatatccaagtcgctgcgttataaaatttggtttttaatccgctgtttc

SEQ ID NO: 77921 - protein, 545 aa, Arabidopsis thaliana
  peptide (1)..(545): Ceres Seq. ID no. 12581027
  misc_feature (225)..(423): Pfam Name: Monooxygenase Pfam Description: Monooxygenase
  misc_feature (15)..(545): Homolog of NCBI NO: 18406296 NR Description: squalene monooxygenase, putative; protein id: [Arabidopsis thaliana] >gi|25455713|pir||T52462 hypothetical
  misc_feature (15)..(545): Homolog of NCBI NO: 25404216 NR Description: probable squalene monooxygenase F9K23.3 - Arabidopsis thaliana >gi|12321049|gb|AAG50645.1|AC082643_9
  misc_feature (19)..(539): Homolog of NCBI NO: 27475610 NR Description: squalene monooxygenase 2 [Medicago truncatula]
  misc_feature (28)..(537): Homolog of NCBI NO: 27475612 NR Description: squalene monooxygenase 1 [Medicago truncatula]
  misc_feature (71)..(545): Homolog of NCBI NO: 27311241 NR Description: Putative Squalene monooxygenase [Oryza sativa
  misc_feature (26)..(539): Homolog of NCBI NO: 6685403 NR Description: Squalene monooxygenase (Squalene epoxidase) (SE)
  misc_feature (42)..(537): Homolog of NCBI NO: 27311240 NR Description: Putative Squalene monooxygenase [Oryza sativa
  misc_feature (26)..(538): Homolog of NCBI NO: 18420113 NR Description: squalene monooxygenase (squalene epoxidase)(SE), protein id: At4g37760.1, supported by cDNA: 118648., supported by gi_18086576 [Arabidopsis thaliana] >gi|18086577|gb|AAL57712.1|
  misc_feature (26)..(538): Homolog of NCBI NO: 21537043 NR Description: squalene epoxidase-like protein [Arabidopsis
  misc_feature (24)..(537): Homolog of NCBI NO: 15227757 NR Description: squalene monooxygenase (squalene epoxidase)(SE), protein id: At2g22830.1 [Arabidopsis thaliana]
FRTKQKNLCKSRTIMESQLWNWILPLLISSLLISFVAFYGFFVKPKRNGLRHDRKTVSTVTSDVGSVNITGDTVADVIVVGAGVAGSALAYTLGKDKRRVHVIERDLSEPDRIVGELLQPGGYLKLLELGIEDCVEEIDAQRVYGYALFKNGKRIRLAYPLEKFHEDVSGRSFHNGRFIQRMREKAASLPNVQLEQGTVLSLLEENGTIKGVRYKNKAGEEQTAFAALTIVCDGCFSNLRRSLCNPQVEVPSCFVGLVLENCNLPYANHGHVVLADPSPILMYPISSTEVRCLVDVPGQKVPSIANGEMKNYLKTVVAPQMPHEVYDSFIAAVDKGNIKSMPNRSMPASPYPTPGALLMGDAFNMRHPLTGGGMTVALADIVVLRNLLRPLRDLSDGASLCKYLESFYTLRKPVAATINTLANALYQVFCSSENEARNEMREACFDYLGLGGMCTSGPVSLLSGLNPRPLTLVCHFFAVAVYGVIRLLIPFPSPKRIWLGAKLISGASGIIFPIIKAEGVRQMFFPATVPAYYYKAPTVGETKCS

SEQ ID NO: 77922 - protein, 531 aa, Arabidopsis thaliana; identical to SEQ ID NO: 27103
  peptide (1)..(531): Ceres Seq. ID no. 12581028
  misc_feature (211)..(409): Pfam Name: Monooxygenase Pfam Description: Monooxygenase
  misc_feature (1)..(531): Homolog of NCBI NO: 18406296 NR Description: squalene monooxygenase, putative; protein id: [Arabidopsis thaliana] >gi|25455713|pir||T52462 hypothetical
  misc_feature (1)..(531): Homolog of NCBI NO: 25404216 NR Description: probable squalene monooxygenase F9K23.3 - Arabidopsis thaliana >gi|12321049|gb|AAG50645.1|AC082643_9
  misc_feature (5)..(525): Homolog of NCBI NO: 27475610 NR Description: squalene monooxygenase 2 [Medicago truncatula]
  misc_feature (14)..(523): Homolog of NCBI NO: 27475612 NR Description: squalene monooxygenase 1 [Medicago truncatula]
  misc_feature (57)..(531): Homolog of NCBI NO: 27311241 NR Description: Putative Squalene monooxygenase [Oryza sativa
  misc_feature (12)..(525): Homolog of NCBI NO: 6685403 NR Description: Squalene monooxygenase (Squalene epoxidase) (SE)
  misc_feature (28)..(523): Homolog of NCBI NO: 27311240 NR Description: Putative Squalene monooxygenase [Oryza sativa
  misc_feature (12)..(524): Homolog of NCBI NO: 18420113 NR Description: squalene monooxygenase (squalene epoxidase)(SE), protein id: At4g37760.1, supported by cDNA: 118648., supported by gi_18086576 [Arabidopsis thaliana] >gi|18086577|gb|AAL57712.1|
  misc_feature (12)..(524): Homolog of NCBI NO: 21537043 NR Description: squalene epoxidase-like protein [Arabidopsis
  misc_feature (10)..(523): Homolog of NCBI NO: 15227757 NR Description: squalene monooxygenase (squalene epoxidase)(SE), protein id: At2g22830.1 [Arabidopsis thaliana]

SEQ ID NO: 77923 - protein, 364 aa, Arabidopsis thaliana; identical to SEQ ID NO: 27104
  peptide (1)..(364): Ceres Seq. ID no. 12581029
  misc_feature (44)..(242): Pfam Name: Monooxygenase Pfam Description: Monooxygenase
  misc_feature (1)..(364): Homolog of NCBI NO: 18406296 NR Description: squalene monooxygenase, putative; protein id: [Arabidopsis thaliana] >gi|25455713|pir||T52462 hypothetical
  misc_feature (1)..(364): Homolog of NCBI NO: 25404216 NR Description: probable squalene monooxygenase F9K23.3 - Arabidopsis thaliana >gi|12321049|gb|AAG50645.1|AC082643_9
  misc_feature (1)..(358): Homolog of NCBI NO: 27475610 NR Description: squalene monooxygenase 2 [Medicago truncatula]
  misc_feature (1)..(356): Homolog of NCBI NO: 27475612 NR Description: squalene monooxygenase 1 [Medicago truncatula]
  misc_feature (1)..(364): Homolog of NCBI NO: 27311241 NR Description: Putative Squalene monooxygenase [Oryza sativa
  misc_feature (1)..(358): Homolog of NCBI NO: 6685403 NR Description: Squalene monooxygenase (Squalene epoxidase) (SE)
  misc_feature (1)..(356): Homolog of NCBI NO: 27311240 NR Description: Putative Squalene monooxygenase [Oryza sativa
  misc_feature (1)..(357): Homolog of NCBI NO: 18420113 NR Description: squalene monooxygenase (squalene epoxidase)(SE), protein id: At4g37760.1, supported by cDNA: 118648., supported by gi_18086576 [Arabidopsis thaliana] >gi|18086577|gb|AAL57712.1|
  misc_feature (1)..(357): Homolog of NCBI NO: 21537043 NR Description: squalene epoxidase-like protein [Arabidopsis
  misc_feature (1)..(356): Homolog of NCBI NO: 15227757 NR Description: squalene monooxygenase (squalene epoxidase)(SE), protein id: At2g22830.1 [Arabidopsis thaliana]

SEQ ID NO: 77924 - DNA, 2549 bp, Arabidopsis thaliana
  misc_feature (1)..(2549): Ceres Seq. ID no. 12581050
  misc_feature: MA Experiment ID: 20000441 Result: Up-regulated in Transcription
  misc_feature: MA Experiment 20000441 PARAMETER Experiment Name: At_1uM_BR-BRZ__P Parameter: Tissue Value: Shoot Apices
  misc_feature: MA Experiment 20000441 PARAMETER Experiment Name: At_1uM_BR-BRZ__P Parameter: Treatment Value: 1uM BR vs. No Treatment
gtttgctttacccttatttggccattcctgtcttccactttgtcatcttttccctttctgatgggatccgccgccgaactcacggagcccaccaccgggaccgagaagcttcaccagccaatagaagttgaagaagatgacgaacaaattgttgatttggagaggaaaacattccgtcatggaaagggacacgatactagtgtggacagtagtacaatcaccaacaccagctcgtcgtcgtcttctagcttttccggtgatggtggaacggaagagacccccgatttccacagcaacggcgatggagaacataccgatttagtaaatttggaggtcccggagctagaaactgaaatcgtatttcaccaagagcatgacgacgggaagaattgcatcgtcttcttcgacggagaacaaggttctgagtcagctggtgccatacctgatgctcatgaggagtctcaaactgctgacttgaatggggagcaaacgcagttagaacctgaaaacggttcaacttctgaggataacgaaagatctcgtgaaattgaagaagtactagatggtgatgtctctaaagacttggatgctgttgatccactcgctggtgaggtgatagaggaggaggtggacttcgaagatgttgaatatcatgatgtggagaatatgatggataagcaagagacacatgatttgtactgtccaaactgcgattcttgcatcaccaaaaaggttatcctcaaaagaaggaaacggaagatccgtcgtcatgagctgggagattcaaagcggcctcatttgactgagcctctttttcattcggaagacaatttgccatctctagatggcggtgaaaactctgcaaatgagtcatttgtcttcaagtgcttgtcatgctttaccatatttattcccaaaggggtgagttcaaagccgattcctccccgtcaaggagttgaggggttaaagattcagccaaaccctcaagtggaagctacaggcgattccaattggttcagttcaatatttggcctcaacaaaaaggaatcagctattcagcaaggtggggcatcatctagtgtcttggaagctaatccgccaccacgtgagtccattgtcccagtagttaatccatcgcgtggtaacctaagtcctatgcgaaaggatacgacaggctcagccgttgttcagcctgatgcagccacttcgattcaagttgcaaaatcaaacgatacaagcgaaattgtaaacaatggagctattgttggagacgggcaaaagtttctggctcctatggtggaggagcaaacacagcaaaagattgacaatgatgattctagtacagcagacgggaatcacacgtcagacaaaggacgtctctccccaattcaaccatctcatggcatgagtatactaaacacagtgactaacggacccgacggattgaaagtagaaactacaattcatgaagaaggtgcccctcttctgtttgaaggaaaagacactcctgacacaagcacggcagattttggtctgaccaaagtaacaggtgtgatggacacaggtgacagaggagttattaccggtccagcaaatcctgaaattgatatttcagcagggaatttgctggaagaagggtctctaagggaaccgttaatgagacgagttgttgttcaaggacgtaaactggaaatcttgaaaagcattgtctacggaggtctactagaagccatcacaagccttggtgttatttcatctgccgctggttctggtgcttcaatgttgaatattctggtcttggggcttgcaaacttgcttggcgggcttattcttattattcataatctccaagaacttagagaggaggaacccataagaacaacaacagaagataaccagactaacggtagagaagaagaagaaggtcggtataagcgactccttggacgaagagaaaatttcacacttcacgcaacagtcgcaatcttatccttcataatcaccggaatactccctcctgtagtctactatttctcattcagtgaaaaacacaacaaagactacaaagttgcttcagttttcggggcatctctattctgcatcgtcttgctcgccatagccaaagctcatgtgaggtacccgagaggcagctacctgaagagcattctgtactacgggtcaattgctgtatcggtgtcggggatttcttatgtggttggtaactttctggaacagttgcttgagaagcatggatggtctgatggatcggaaacacctgtgggacagatgatgctttcatcacttatgggaagaaaagccggctttggatactcatcatcgtactgaaactgaatcttgcctggagaatgatccaaactgaaacttgctgcttttctcttttactctgcttttgtgagctctcgttccaaatctttgttgtcggcaaatctttgttgtgacttgtgagtgtagaagaaagtcgtttccacttgtagaataaactaaaataagcataacataataatgatggaagatctgtgccttttaat

SEQ ID NO: 77925 - protein, 781 aa, Arabidopsis thaliana
  peptide (1)..(781): Ceres Seq. ID no. 12581051
  misc_feature (432)..(781): Homolog of NCBI NO: 15912253 NR Description: AT4g27870/T27E11_110 [Arabidopsis thaliana]
  misc_feature (499)..(740): Homolog of NCBI NO: 24413974 NR Description: contains ESTs to Arabidopsis thaliana protein T27E11.110~unknown protein [Oryza
  misc_feature (190)..(307): Homolog of NCBI NO: 24413974 NR Description: contains ESTs to Arabidopsis thaliana protein T27E11.110~unknown protein [Oryza
  misc_feature (35)..(252): Homolog of NCBI NO: 30689371 NR Description: expressed protein [Arabidopsis thaliana] gene_id:MOP9.11~pir||T09026~similar to unknown protein thaliana] >gi|30725326|gb|AAP37685.1| At5g24290 [Arabidopsis
  misc_feature (563)..(749): Homolog of NCBI NO: 30689371 NR Description: expressed protein [Arabidopsis thaliana] gene_id:MOP9.11~pir||T09026~similar to unknown protein thaliana] >gi|30725326|gb|AAP37685.1| At5g24290 [Arabidopsis
  misc_feature (35)..(252): Homolog of NCBI NO: 30689367 NR Description: expressed protein [Arabidopsis thaliana]
  misc_feature (563)..(749): Homolog of NCBI NO: 30689367 NR Description: expressed protein [Arabidopsis thaliana]
  misc_feature (35)..(252): Homolog of NCBI NO: 21592516 NR Description: unknown [Arabidopsis thaliana]
  misc_feature (563)..(749): Homolog of NCBI NO: 21592516 NR Description: unknown [Arabidopsis thaliana]
  misc_feature (432)..(758): Homolog of NCBI NO: 7487470 NR Description: hypothetical protein T27E11.100 - Arabidopsis >gi|4972117|emb|CAB43974.1| putative protein [Arabidopsis >gi|7269639|emb|CAB81435.1| putative protein [Arabidopsis
VCFTLIWPFLSSTLSSFPFLMGSAAELTEPTTGTEKLHQPIEVEEDDEQIVDLERKTFRHGKGHDTSVDSSTITNTSSSSSSSFSGDGGTEETPDFHSNGDGEHTDLVNLEVPELETEIVFHQEHDDGKNCIVFFDGEQGSESAGAIPDAHEESQTADLNGEQTQLEPENGSTSEDNERSREIEEVLDGDVSKDLDAVDPLAGEVIEEEVDFEDVEYHDVENMMDKQETHDLYCPNCDSCITKKVILKRRKRKIRRHELGDSKRPHLTEPLFHSEDNLPSLDGGENSANESFVFKCLSCFTIFIPKGVSSKPIPPRQGVEGLKIQPNPQVEATGDSNWFSSIFGLNKKESAIQQGGASSSVLEANPPPRESIVPVVNPSRGNLSPMRKDTTGSAVVQPDAATSIQVAKSNDTSEIVNNGAIVGDGQKFLAPMVEEQTQQKIDNDDSSTADGNHTSDKGRLSPIQPSHGMSILNTVTNGPDGLKVETTIHEEGAPLLFEGKDTPDTSTADFGLTKVTGVMDTGDRGVITGPANPEIDISAGNLLEEGSLREPLMRRVVVQGRKLEILKSIVYGGLLEAITSLGVISSAAGSGASMLNILVLGLANLLGGLILIIHNLQELREEEPIRTTTEDNQTNGREEEEGRYKRLLGRRENFTLHATVAILSFIITGILPPVVYYFSFSEKHNKDYKVASVFGASLFCIVLLAIAKAHVRYPRGSYLKSILYYGSIAVSVSGISYVVGNFLEQLLEKHGWSDGSETPVGQMMLSSLMGRKAGFGYSSSY

SEQ ID NO: 77926 - protein, 761 aa, Arabidopsis thaliana
  peptide (1)..(761): Ceres Seq. ID no. 12581052
  misc_feature (412)..(761): Homolog of NCBI NO: 15912253 NR Description: AT4g27870/T27E11_110 [Arabidopsis thaliana]
  misc_feature (479)..(720): Homolog of NCBI NO: 24413974 NR Description: contains ESTs to Arabidopsis thaliana protein T27E11.110~unknown protein [Oryza
  misc_feature (170)..(287): Homolog of NCBI NO: 24413974 NR Description: contains ESTs to Arabidopsis thaliana protein T27E11.110~unknown protein [Oryza
  misc_feature (15)..(232): Homolog of NCBI NO: 30689371 NR Description: expressed protein [Arabidopsis thaliana] gene_id:MOP9.11~pir||T09026~similar to unknown protein thaliana] >gi|30725326|gb|AAP37685.1| At5g24290 [Arabidopsis
  misc_feature (543)..(729): Homolog of NCBI NO: 30689371 NR Description: expressed protein [Arabidopsis thaliana] gene_id:MOP9.11~pir||T09026~similar to unknown protein thaliana] >gi|30725326|gb|AAP37685.1| At5g24290 [Arabidopsis
  misc_feature (15)..(232): Homolog of NCBI NO: 30689367 NR Description: expressed protein [Arabidopsis thaliana]
  misc_feature (543)..(729): Homolog of NCBI NO: 30689367 NR Description: expressed protein [Arabidopsis thaliana]
  misc_feature (15)..(232): Homolog of NCBI NO: 21592516 NR Description: unknown [Arabidopsis thaliana]
  misc_feature (543)..(729): Homolog of NCBI NO: 21592516 NR Description: unknown [Arabidopsis thaliana]
  misc_feature (412)..(738): Homolog of NCBI NO: 7487470 NR Description: hypothetical protein T27E11.100 - Arabidopsis >gi|4972117|emb|CAB43974.1| putative protein [Arabidopsis >gi|7269639|emb|CAB81435.1| putative protein [Arabidopsis
MGSAAELTEPTTGTEKLHQPIEVEEDDEQIVDLERKTFRHGKGHDTSVDSSTITNTSSSSSSSFSGDGGTEETPDFHSNGDGEHTDLVNLEVPELETEIVFHQEHDDGKNCIVFFDGEQGSESAGAIPDAHEESQTADLNGEQTQLEPENGSTSEDNERSREIEEVLDGDVSKDLDAVDPLAGEVIEEEVDFEDVEYHDVENMMDKQETHDLYCPNCDSCITKKVILKRRKRKIRRHELGDSKRPHLTEPLFHSEDNLPSLDGGENSANESFVFKCLSCFTIFIPKGVSSKPIPPRQGVEGLKIQPNPQVEATGDSNWFSSIFGLNKKESAIQQGGASSSVLEANPPPRESIVPVVNPSRGNLSPMRKDTTGSAVVQPDAATSIQVAKSNDTSEIVNNGAIVGDGQKFLAPMVEEQTQQKIDNDDSSTADGNHTSDKGRLSPIQPSHGMSILNTVTNGPDGLKVETTIHEEGAPLLFEGKDTPDTSTADFGLTKVTGVMDTGDRGVITGPANPEIDISAGNLLEEGSLREPLMRRVVVQGRKLEILKSIVYGGLLEAITSLGVISSAAGSGASMLNILVLGLANLLGGLILIIHNLQELREEEPIRTTTEDNQTNGREEEEGRYKRLLGRRENFTLHATVAILSFIITGILPPVVYYFSFSEKHNKDYKVASVFGASLFCIVLLAIAKAHVRYPRGSYLKSILYYGSIAVSVSGISYVVGNFLEQLLEKHGWSDGSETPVGQMMLSSLMGRKAGFGYSSSY

SEQ ID NO: 77927 - protein, 559 aa, Arabidopsis thaliana
  peptide (1)..(559): Ceres Seq. ID no. 12581053
  misc_feature (210)..(559): Homolog of NCBI NO: 15912253 NR Description: AT4g27870/T27E11_110 [Arabidopsis thaliana]
  misc_feature (277)..(518): Homolog of NCBI NO: 24413974 NR Description: contains ESTs to Arabidopsis thaliana protein T27E11.110~unknown protein [Oryza
  misc_feature (1)..(85): Homolog of NCBI NO: 24413974 NR Description: contains ESTs to Arabidopsis thaliana protein T27E11.110~unknown protein [Oryza
  misc_feature (1)..(30): Homolog of NCBI NO: 30689371 NR Description: expressed protein [Arabidopsis thaliana] gene_id:MOP9.11~pir||T09026~similar to unknown protein thaliana] >gi|30725326|gb|AAP37685.1| At5g24290 [Arabidopsis
  misc_feature (341)..(527): Homolog of NCBI NO: 30689371 NR Description: expressed protein [Arabidopsis thaliana] gene_id:MOP9.11~pir||T09026~similar to unknown protein thaliana] >gi|30725326|gb|AAP37685.1| At5g24290 [Arabidopsis
  misc_feature (1)..(30): Homolog of NCBI NO: 30689367 NR Description: expressed protein [Arabidopsis thaliana]
  misc_feature (341)..(527): Homolog of NCBI NO: 30689367 NR Description: expressed protein [Arabidopsis thaliana]
  misc_feature (1)..(30): Homolog of NCBI NO: 21592516 NR Description: unknown [Arabidopsis thaliana]
  misc_feature (341)..(527): Homolog of NCBI NO: 21592516 NR Description: unknown [Arabidopsis thaliana]
  misc_feature (210)..(536): Homolog of NCBI NO: 7487470 NR Description: hypothetical protein T27E11.100 - Arabidopsis >gi|4972117|emb|CAB43974.1| putative protein [Arabidopsis >gi|7269639|emb|CAB81435.1| putative protein [Arabidopsis
MMDKQETHDLYCPNCDSCITKKVILKRRKRKIRRHELGDSKRPHLTEPLFHSEDNLPSLDGGENSANESFVFKCLSCFTIFIPKGVSSKPIPPRQGVEGLKIQPNPQVEATGDSNWFSSIFGLNKKESAIQQGGASSSVLEANPPPRESIVPVVNPSRGNLSPMRKDTTGSAVVQPDAATSIQVAKSNDTSEIVNNGAIVGDGQKFLAPMVEEQTQQKIDNDDSSTADGNHTSDKGRLSPIQPSHGMSILNTVTNGPDGLKVETTIHEEGAPLLFEGKDTPDTSTADFGLTKVTGVMDTGDRGVITGPANPEIDISAGNLLEEGSLREPLMRRVVVQGRKLEILKSIVYGGLLEAITSLGVISSAAGSGASMLNILVLGLANLLGGLILIIHNLQELREEEPIRTTTEDNQTNGREEEEGRYKRLLGRRENFTLHATVAILSFIITGILPPVVYYFSFSEKHNKDYKVASVFGASLFCIVLLAIAKAHVRYPRGSYLKSILYYGSIAVSVSGISYVVGNFLEQLLEKHGWSDGSETPVGQMMLSSLMGRKAGFGYSSSY

SEQ ID NO: 77928 - DNA, 1412 bp, Arabidopsis thaliana
  misc_feature (1)..(1412): Ceres Seq. ID no. 12581070
  misc_feature: MA Experiment ID: 20000179 Result: Up-regulated in Transcription
  misc_feature: MA Experiment 20000179 PARAMETER Experiment Name: At_Germinating_Seeds_P Parameter: Age (hr) Value: 6 vs. 0
  misc_feature: MA Experiment 20000179 PARAMETER Experiment Name: At_Germinating_Seeds_P Parameter: Tissue Value: Germinating Seeds
  misc_feature: MA Experiment ID: 20000234 Result: Down-regulated in Transcription
  misc_feature: MA Experiment 20000234 PARAMETER Experiment Name: At_Siliques_P Parameter: Age (day) Value: 21
  misc_feature: MA Experiment 20000234 PARAMETER Experiment Name: At_Siliques_P Parameter: Organism Value: A. thaliana
  misc_feature: MA Experiment 20000234 PARAMETER Experiment Name: At_Siliques_P Parameter: Plant Line Value: WS
  misc_feature: MA Experiment 20000234 PARAMETER Experiment Name: At_Siliques_P Parameter: Tissue Value: Less Than 5mm Siliques vs. Whole Plant
  misc_feature: MA Experiment ID: 20000235 Result: Down-regulated in Transcription
  misc_feature: MA Experiment 20000235 PARAMETER Experiment Name: At_Siliques_P Parameter: Age (day) Value: 21
  misc_feature: MA Experiment 20000235 PARAMETER Experiment Name: At_Siliques_P Parameter: Organism Value: A. thaliana
  misc_feature: MA Experiment 20000235 PARAMETER Experiment Name: At_Siliques_P Parameter: Plant Line Value: WS
  misc_feature: MA Experiment 20000235 PARAMETER Experiment Name: At_Siliques_P Parameter: Tissue Value: 5-10mm Siliques vs. Whole Plant
  misc_feature: MA Experiment ID: 20000265 Result: Down-regulated in Transcription
  misc_feature: MA Experiment 20000265 PARAMETER Experiment Name: At_Open_Flower_P Parameter: Age (day) Value: 21
  misc_feature: MA Experiment 20000265 PARAMETER Experiment Name: At_Open_Flower_P Parameter: Plant Line Value: WS
  misc_feature: MA Experiment 20000265 PARAMETER Experiment Name: At_Open_Flower_P Parameter: Tissue Value: Closed Flower vs. Whole Plant
  misc_feature: MA Experiment ID: 20000286 Result: Down-regulated in Transcription
  misc_feature: MA Experiment 20000286 PARAMETER Experiment Name: At_Open_Flower_P Parameter: Age (day) Value: 21
  misc_feature: MA Experiment 20000286 PARAMETER Experiment Name: At_Open_Flower_P Parameter: Plant Line Value: WS
  misc_feature: MA Experiment 20000286 PARAMETER Experiment Name: At_Open_Flower_P Parameter: Tissue Value: Half Open vs. Whole Plant
  misc_feature: MA Experiment ID: 20000439 Result: Up-regulated in Transcription
  misc_feature: MA Experiment 20000439 PARAMETER Experiment Name: At_Roots__P Parameter: Age (day) Value: 14 vs. 21
  misc_feature: MA Experiment 20000439 PARAMETER Experiment Name: At_Roots__P Parameter: Organism Value: A. thaliana
  misc_feature: MA Experiment 20000439 PARAMETER Experiment Name: At_Roots__P Parameter: Tissue Value: Roots vs. Whole Plant
  misc_feature: MA Experiment ID: 20000451 Result: Up-regulated in Transcription
  misc_feature: MA Experiment 20000451 PARAMETER Experiment Name: At_CS6879_Shoots-Roots_P Parameter: Age (day) Value: 14
  misc_feature: MA Experiment 20000451 PARAMETER Experiment Name: At_CS6879_Shoots-Roots_P Parameter: Organism Value: A. thaliana
  misc_feature: MA Experiment 20000451 PARAMETER Experiment Name: At_CS6879_Shoots-Roots_P Parameter: Plant Line Value: CS6879 vs. WS
  misc_feature: MA Experiment 20000451 PARAMETER Experiment Name: At_CS6879_Shoots-Roots_P Parameter: Tissue Value: Roots
  misc_feature: MA Experiment ID: 20000452 Result: Up-regulated in Transcription
  misc_feature: MA Experiment 20000452 PARAMETER Experiment Name: At_CS6879_Shoots-Roots_P Parameter: Age (day) Value: 14
  misc_feature: MA Experiment 20000452 PARAMETER Experiment Name: At_CS6879_Shoots-Roots_P Parameter: Organism Value: A. thaliana
  misc_feature: MA Experiment 20000452 PARAMETER Experiment Name: At_CS6879_Shoots-Roots_P Parameter: Plant Line Value: CS6879 vs. WS
  misc_feature: MA Experiment 20000452 PARAMETER Experiment Name: At_CS6879_Shoots-Roots_P Parameter: Tissue Value: Shoots
  misc_feature: MA Experiment ID: 20001905 Result: Up-regulated in Transcription
  misc_feature: MA Experiment 20001905 PARAMETER Experiment Name: At_Drought_Reproduction_P Parameter: Age (day) Value: 40
  misc_feature: MA Experiment 20001905 PARAMETER Experiment Name: At_Drought_Reproduction_P Parameter: Organism Value: A. thaliana
  misc_feature: MA Experiment 20001905 PARAMETER Experiment Name: At_Drought_Reproduction_P Parameter: Plant Line Value: WS
  misc_feature: MA Experiment 20001905 PARAMETER Experiment Name: At_Drought_Reproduction_P Parameter: Timepoint (day) Value: 10
  misc_feature: MA Experiment 20001905 PARAMETER Experiment Name: At_Drought_Reproduction_P Parameter: Tissue Value: Rosettes
  misc_feature: MA Experiment 20001905 PARAMETER Experiment Name: At_Drought_Reproduction_P Parameter: Treatment Value: Drought vs. No Drought
aaaatttctccatcaggttcaggtctcgatcgaattgatttgaaatgggttcgtttgggatgctttcgaggagaacgttgggcactgatatgcccgtcatggctcagattcggagtttgatggcggaattgacgaaccccatgtctctcgcccagggagtggtgcattggcagcctcctcaaaaggccttagagaaggtcaaggagcttgtctgggatcctatcattagttcttatggccccgatgaaggtcttcccgagttgagacaggctcttctcaaaaagctgcgtgaagaaaacaagctaaccaattcacaagtgatggttactgcaggtgccaatcaggcgtttgtgaaccttgttattacattatgtgatgctggtgattcggttgtcatgtttgagccatactacttcaactcctacatggcctttcagatgacaggagtcaccaacataattgttggtcctggccagtcagacactctctatcctgacgctgactggttagagaggacactgtctgagtctaaaccgactccgaaagttgtaactgttgtgaatcctggtaacccaagtggcacctatgtccctgaaccgctgcttaagaggattgctcaaatatgcaaagatgcagggtgctggctgattgtagataacacatacgagtatttcatgtatgacggtttaaaacattgttgcgttgagggagaccacattgttaatgtcttctctttctctaaaacctatggcatgatgggttggaggcttggatatatagcttactcagagagattagatgggtttgcaacagagcttgtgaaaattcaggacaacatcccaatctgtgctgccataatctcgcagcgactggctgtatacgcattagaggaaggttctgggtggataacggaacgggtaaagagtctagtgaagaacagggatattgtgaaagaggcgcttgagccgctggggaaggagaacgttaagggaggagaaggagcgatatacctgtgggcaaaactgccagagggacacagagatgatttcaaggtggtgcggtggctggctcaccgccatggtgtggtggtgatcccggggtgtgcaagtggtagccccgggtatctccgggtttcctttggagggttgcaggaggttgaaatgagagctgcagcggcgaggctgaggaaaggaatagaggagctgcttcaccatggaatggtggagtgagacgttgtttaaagaagggtcaaaagatggttactttgcgtttggttgaagctatatagttgttttaaaaagaaataaaagagtgtttgtttattcaataatcaatatagctgattcttctttacaaagtcattgtatttgggatgttgttaccaatggttgaatccttaacccctttggtgt

SEQ ID NO: 77929 - protein, 394 aa, Arabidopsis thaliana; identical to SEQ ID NO: 75305
  peptide (1)..(394): Ceres Seq. ID no. 12581071
  misc_feature (79)..(384): Pfam Name: Aminotransferase class I and II Pfam Description: Aminotransferase class I and II
  misc_feature (1)..(394): Homolog of NCBI NO: 15220119 NR Description: putative aspartate aminotransferase; protein id:
  misc_feature (1)..(394): Homolog of NCBI NO: 34906130 NR Description: putative aspartate transaminase [Oryza sativa
  misc_feature (10)..(391): Homolog of NCBI NO: 17228534 NR Description: probable aspartate aminotransferase [Nostoc sp.
  misc_feature (7)..(388): Homolog of NCBI NO: 23123920 NR Description: hypothetical protein [Nostoc punctiforme]
  misc_feature (1)..(391): Homolog of NCBI NO: 33863300 NR Description: Aminotransferases class-I [Prochlorococcus
  misc_feature (8)..(387): Homolog of NCBI NO: 16331997 NR Description: aspartate aminotransferase [Synechocystis sp. PCC >gi|7447812|pir||S75949 probable aspartate transaminase (EC
  misc_feature (19)..(381): Homolog of NCBI NO: 39995195 NR Description: aminotransferase, classes I and II [Geobacter PCA] >gi|39981957|gb|AAR33419.1| aminotransferase, classes I and
  misc_feature (33)..(381): Homolog of NCBI NO: 23054173 NR Description: hypothetical protein [Geobacter metallireducens]
  misc_feature (15)..(386): Homolog of NCBI NO: 18977625 NR Description: aspartate transaminase [Pyrococcus furiosus DSM >gi|18893347|gb|AAL81377.1| aspartate transaminase [Pyrococcus
  misc_feature (62)..(387): Homolog of NCBI NO: 15606968 NR Description: aspartate aminotransferase [Aquifex aeolicus] Aspartate aminotransferase (Transaminase A) (ASPAT)

SEQ ID NO: 77930 - protein, 389 aa, Arabidopsis thaliana; identical to SEQ ID NO: 75306
  peptide (1)..(389): Ceres Seq. ID no. 12581072
  misc_feature (74)..(379): Pfam Name: Aminotransferase class I and II Pfam Description: Aminotransferase class I and II
  misc_feature (1)..(389): Homolog of NCBI NO: 15220119 NR Description: putative aspartate aminotransferase; protein id:
  misc_feature (1)..(389): Homolog of NCBI NO: 34906130 NR Description: putative aspartate transaminase [Oryza sativa
  misc_feature (5)..(386): Homolog of NCBI NO: 17228534 NR Description: probable aspartate aminotransferase [Nostoc sp.
  misc_feature (2)..(383): Homolog of NCBI NO: 23123920 NR Description: hypothetical protein [Nostoc punctiforme]
  misc_feature (1)..(386): Homolog of NCBI NO: 33863300 NR Description: Aminotransferases class-I [Prochlorococcus
  misc_feature (3)..(382): Homolog of NCBI NO: 16331997 NR Description: aspartate aminotransferase [Synechocystis sp. PCC >gi|7447812|pir||S75949 probable aspartate transaminase (EC
  misc_feature (14)..(376): Homolog of NCBI NO: 39995195 NR Description: aminotransferase, classes I and II [Geobacter PCA] >gi|39981957|gb|AAR33419.1| aminotransferase, classes I and
  misc_feature (28)..(376): Homolog of NCBI NO: 23054173 NR Description: hypothetical protein [Geobacter metallireducens]
  misc_feature (10)..(381): Homolog of NCBI NO: 18977625 NR Description: aspartate transaminase [Pyrococcus furiosus DSM >gi|18893347|gb|AAL81377.1| aspartate transaminase [Pyrococcus
  misc_feature (57)..(382): Homolog of NCBI NO: 15606968 NR Description: aspartate aminotransferase [Aquifex aeolicus] Aspartate aminotransferase (Transaminase A) (ASPAT)

SEQ ID NO: 77931 - protein, 379 aa, Arabidopsis thaliana; identical to SEQ ID NO: 75307
  peptide (1)..(379): Ceres Seq. ID no. 12581073
  misc_feature (64)..(369): Pfam Name: Aminotransferase class I and II Pfam Description: Aminotransferase class I and II
  misc_feature (1)..(379): Homolog of NCBI NO: 15220119 NR Description: putative aspartate aminotransferase; protein id:
  misc_feature (1)..(379): Homolog of NCBI NO: 34906130 NR Description: putative aspartate transaminase [Oryza sativa
  misc_feature (1)..(376): Homolog of NCBI NO: 17228534 NR Description: probable aspartate aminotransferase [Nostoc sp.
  misc_feature (1)..(373): Homolog of NCBI NO: 23123920 NR Description: hypothetical protein [Nostoc punctiforme]
  misc_feature (1)..(376): Homolog of NCBI NO: 33863300 NR Description: Aminotransferases class-I [Prochlorococcus
  misc_feature (1)..(372): Homolog of NCBI NO: 16331997 NR Description: aspartate aminotransferase [Synechocystis sp. PCC >gi|7447812|pir||S75949 probable aspartate transaminase (EC
  misc_feature (4)..(366): Homolog of NCBI NO: 39995195 NR Description: aminotransferase, classes I and II [Geobacter PCA] >gi|39981957|gb|AAR33419.1| aminotransferase, classes I and
  misc_feature (18)..(366): Homolog of NCBI NO: 23054173 NR Description: hypothetical protein [Geobacter metallireducens]
  misc_feature (1)..(371): Homolog of NCBI NO: 18977625 NR Description: aspartate transaminase [Pyrococcus furiosus DSM >gi|18893347|gb|AAL81377.1| aspartate transaminase [Pyrococcus
  misc_feature (47)..(372): Homolog of NCBI NO: 15606968 NR Description: aspartate aminotransferase [Aquifex aeolicus] Aspartate aminotransferase (Transaminase A) (ASPAT)

SEQ ID NO: 77932 - DNA, 1618 bp, Arabidopsis thaliana
  misc_feature (1)..(1618): Ceres Seq. ID no. 12581090
  misc_feature: MA Experiment ID: 108461 Result: Up-regulated in Transcription
  misc_feature: MA Experiment 108461 PARAMETER Experiment Name: At_Germinating_Seeds_cDNA_P Parameter: Age (day) Value: 1 vs. 0
  misc_feature: MA Experiment 108461 PARAMETER Experiment Name: At_Germinating_Seeds_cDNA_P Parameter: Tissue Value: Germinating Seeds
  misc_feature: MA Experiment ID: 108463 Result: Up-regulated in Transcription
  misc_feature: MA Experiment 108463 PARAMETER Experiment Name: At_Germinating_Seeds_cDNA_P Parameter: Age (day) Value: 3 vs. 0
  misc_feature: MA Experiment 108463 PARAMETER Experiment Name: At_Germinating_Seeds_cDNA_P Parameter: Tissue Value: Germinating Seeds
  misc_feature: MA Experiment ID: 108488 Result: Down-regulated in Transcription
  misc_feature: MA Experiment ID: 108573 Result: Up-regulated in Transcription
  misc_feature: MA Experiment 108573 PARAMETER Experiment Name: At_Drought_cDNA_P Parameter: Timepoint (hr) Value: 6
  misc_feature: MA Experiment 108573 PARAMETER Experiment Name: At_Drought_cDNA_P Parameter: Tissue Value: Aerial
  misc_feature: MA Experiment 108573 PARAMETER Experiment Name: At_Drought_cDNA_P Parameter: Treatment Value: Drought vs. No Drought
  misc_feature: MA Experiment ID: 108608 Result: Down-regulated in Transcription
  misc_feature: MA Experiment 108608 PARAMETER Experiment Name: At_100uM_ABA_cDNA_P Parameter: Timepoint (hr) Value: 1
  misc_feature: MA Experiment 108608 PARAMETER Experiment Name: At_100uM_ABA_cDNA_P Parameter: Tissue Value: Aerial
  misc_feature: MA Experiment 108608 PARAMETER Experiment Name: At_100uM_ABA_cDNA_P Parameter: Treatment Value: 100uM ABA vs. No Treatment
  misc_feature: MA Experiment ID: 20000070 Result: Up-regulated in Transcription
  misc_feature: MA Experiment 20000070 PARAMETER Experiment Name: At_100uM_ABA_Mutants_cDNA_P Parameter: Plant Line Value: CS24
  misc_feature: MA Experiment 20000070 PARAMETER Experiment Name: At_100uM_ABA_Mutants_cDNA_P Parameter: Timepoint (hr) Value: 6
  misc_feature: MA Experiment 20000070 PARAMETER Experiment Name: At_100uM_ABA_Mutants_cDNA_P Parameter: Tissue Value: Aerial
  misc_feature: MA Experiment 20000070 PARAMETER Experiment Name: At_100uM_ABA_Mutants_cDNA_P Parameter: Treatment Value: 100uM ABA vs. No Treatment
  misc_feature: MA Experiment ID: 20000071 Result: Up-regulated in Transcription
  misc_feature: MA Experiment 20000071 PARAMETER Experiment Name: At_100uM_ABA_Mutants_cDNA_P Parameter: Plant Line Value: CS8104
  misc_feature: MA Experiment 20000071 PARAMETER Experiment Name: At_100uM_ABA_Mutants_cDNA_P Parameter: Timepoint (hr) Value: 6
  misc_feature: MA Experiment 20000071 PARAMETER Experiment Name: At_100uM_ABA_Mutants_cDNA_P Parameter: Tissue Value: Aerial
  misc_feature: MA Experiment 20000071 PARAMETER Experiment Name: At_100uM_ABA_Mutants_cDNA_P Parameter: Treatment Value: 100uM ABA vs. No Treatment
  misc_feature: MA Experiment ID: 20000072 Result: Up-regulated in Transcription
  misc_feature: MA Experiment 20000072 PARAMETER Experiment Name: At_100uM_ABA_Mutants_cDNA_P Parameter: Plant Line Value: CS8105
  misc_feature: MA Experiment 20000072 PARAMETER Experiment Name: At_100uM_ABA_Mutants_cDNA_P Parameter: Timepoint (hr) Value: 6
  misc_feature: MA Experiment 20000072 PARAMETER Experiment Name: At_100uM_ABA_Mutants_cDNA_P Parameter: Tissue Value: Aerial
  misc_feature: MA Experiment 20000072 PARAMETER Experiment Name: At_100uM_ABA_Mutants_cDNA_P Parameter: Treatment Value: 100uM ABA vs. No Treatment
  misc_feature: MA Experiment ID: 20000086 Result: Up-regulated in Transcription
  misc_feature: MA Experiment 20000086 PARAMETER Experiment Name: At_100uM_ABA_Mutants_cDNA_P Parameter: Plant Line Value: CS22
  misc_feature: MA Experiment 20000086 PARAMETER Experiment Name: At_100uM_ABA_Mutants_cDNA_P Parameter: Timepoint (hr) Value: 6
  misc_feature: MA Experiment 20000086 PARAMETER Experiment Name: At_100uM_ABA_Mutants_cDNA_P Parameter: Tissue Value: Aerial
  misc_feature: MA Experiment 20000086 PARAMETER Experiment Name: At_100uM_ABA_Mutants_cDNA_P Parameter: Treatment Value: 100uM ABA vs. No Treatment
  misc_feature: MA Experiment ID: 20000088 Result: Up-regulated in Transcription
  misc_feature: MA Experiment 20000088 PARAMETER Experiment Name: At_100uM_ABA_Mutants_cDNA_P Parameter: Plant Line Value: Landsberg
  misc_feature: MA Experiment 20000088 PARAMETER Experiment Name: At_100uM_ABA_Mutants_cDNA_P Parameter: Timepoint (hr) Value: 6
  misc_feature: MA Experiment 20000088 PARAMETER Experiment Name: At_100uM_ABA_Mutants_cDNA_P Parameter: Tissue Value: Aerial
  misc_feature: MA Experiment 20000088 PARAMETER Experiment Name: At_100uM_ABA_Mutants_cDNA_P Parameter: Treatment Value: 100uM ABA vs. No Treatment
gcttcaaccccacaagtaaactctctctgattctctctttctctctttctctcgctctctatctctctctcctctgtttgttatatcaattaatcaagaagatttcttgtgtttttttttttctgttaaagaagatttcttgggagaaaataaggtggattgaaggattagtctttaggaatggtggtggaggaggagaatagaagcatggaggaaggacttcttcagcatcaaaacgacagagatgatcgtcgtatcacagcttgtgtcatcctcagcacttttgtcgctgtttgtagtgccttcagctacggatgtgccgctggttatacttcaggcgctgagactgctatcatgaaggagttagacctttctatggcacaattttcagcgtttggctcctttctgaatgtgggaggtgcggtgggggccttgttcagcggtcaattggcagtcatcctcggcagaagacgaacgttgtgggcatgcgattttttctgcgtttttggctggctctccattgctttcgcaaagaatgtcttctggctggacttgggaagaatttccttgggcataggagtcggcttgattagctacgtggtcccagtctatattgcggaaatcactccaaaacatgttcgtggcgcatttactgcttcaaaccagcttcttcaaaacagtggagtttccctgatttatttttttgggactgtaattaattggcgggttatggccgttataggtgcaattccatgcatccttcaaacgatcggtatattttttataccggaatctccaagatggctggctaaaatccgtttaagtaaagaagtagaaagttctttgcatcgacttagagggaaagatactgatgtttcaggtgaagcagctgaaattcaggttatgacaaaaatgcttgaagaagattcaaagtctagtttctctgacatgtttcagaagaagtacagacgaactcttgtggttggaattggtttaatgttgatacaacaattatctggagctagcggtatcacatattattcaaatgccatatttagaaaagctggcttttcagagagacttggatcaatgatatttggtgtgttcgtgatcccaaaagctttggttggtctgattcttgtggatagatggggaagacgaccactcctattggcttctgctgttggaatgtccatcggatccttgcttattggagttagcttcacgttacagcaaatgaatgtgcttcctgaattgatcccaattttcgtcttcgtaaacattctggtctacttcggatgttttgcattcggtataggagggctaccttgggtcattatgtctgagatctttccgataaatataaaagtttcagcaggaacaattgtagcattaacatcatggactagtgggtggttcgtgagttacgctttcaactttatgtttgaatggagcgcacaaggtctttattttctctattacttttttattaatttggataaaacaatttaccaaaaaaagttaagagttatctttataaaaatacacaaatcaaacataaagttatttaaaaatcgtgttcgaattttgacatttgtatcaaacagttttagatgtg

SEQ ID NO: 77933 - protein, 479 aa, Arabidopsis thaliana
  peptide (1)..(479): Ceres Seq. ID no. 12581091
  misc_feature (32)..(412): Pfam Name: Sugar (and other) transporter Pfam Description: Sugar (and other) transporter
  misc_feature (1)..(478): Homolog of NCBI NO: 20260272 NR Description: putative sugar transporter [Arabidopsis thaliana]
  misc_feature (1)..(433): Homolog of NCBI NO: 18397141 NR Description: Expressed protein; protein id: At3g05165.1
  misc_feature (10)..(433): Homolog of NCBI NO: 18397139 NR Description: putative sugar transporter; protein id: supported by cDNA: gi_16604315 [Arabidopsis thaliana] AT3g05160/T12H1_13 [Arabidopsis thaliana]
  misc_feature (2)..(412): Homolog of NCBI NO: 6729026 NR Description: putative sugar transporter [Arabidopsis thaliana]
  misc_feature (2)..(433): Homolog of NCBI NO: 14585699 NR Description: sugar-porter family protein 1 [Arabidopsis
  misc_feature (2)..(433): Homolog of NCBI NO: 18421106 NR Description: sugar transporter-like protein; protein id: supported by cDNA: gi_14585698, supported by cDNA: gi_15294181
  misc_feature (1)..(433): Homolog of NCBI NO: 18421108 NR Description: sugar transporter-like protein; protein id:
  misc_feature (1)..(310): Homolog of NCBI NO: 6729026 NR Description: putative sugar transporter [Arabidopsis thaliana]
  misc_feature (389)..(433): Homolog of NCBI NO: 6729026 NR Description: putative sugar transporter [Arabidopsis thaliana]
  misc_feature (1)..(434): Homolog of NCBI NO: 18390957 NR Description: putative sugar transport protein, ERD6; protein At1g08920.1, supported by cDNA: gi_14194108 [Arabidopsis >gi|14194109|gb|AAK56249.1|AF367260_1 At1g08920/F7G19_20
MVVEEENRSMEEGLLQHQNDRDDRRITACVILSTFVAVCSAFSYGCAAGYTSGAETAIMKELDLSMAQFSAFGSFLNVGGAVGALFSGQLAVILGRRRTLWACDFFCVFGWLSIAFAKNVFWLDLGRISLGIGVGLISYVVPVYIAEITPKHVRGAFTASNQLLQNSGVSLIYFFGTVINWRVMAVIGAIPCILQTIGIFFIPESPRWLAKIRLSKEVESSLHRLRGKDTDVSGEAAEIQVMTKMLEEDSKSSFSDMFQKKYRRTLVVGIGLMLIQQLSGASGITYYSNAIFRKAGFSERLGSMIFGVFVIPKALVGLILVDRWGRRPLLLASAVGMSIGSLLIGVSFTLQQMNVLPELIPIFVFVNILVYFGCFAFGIGGLPWVIMSEIFPINIKVSAGTIVALTSWTSGWFVSYAFNFMFEWSAQGLYFLYYFFINLDKTIYQKKLRVIFIKIHKSNIKLFKNRVRILTFVSNSFRC

SEQ ID NO: 77934 - protein, 470 aa, Arabidopsis thaliana
  peptide (1)..(470): Ceres Seq. ID no. 12581092
  misc_feature (23)..(403): Pfam Name: Sugar (and other) transporter Pfam Description: Sugar (and other) transporter
  misc_feature (1)..(469): Homolog of NCBI NO: 20260272 NR Description: putative sugar transporter [Arabidopsis thaliana]
  misc_feature (1)..(424): Homolog of NCBI NO: 18397141 NR Description: Expressed protein; protein id: At3g05165.1
  misc_feature (1)..(424): Homolog of NCBI NO: 18397139 NR Description: putative sugar transporter; protein id: supported by cDNA: gi_16604315 [Arabidopsis thaliana] AT3g05160/T12H1_13 [Arabidopsis thaliana]
  misc_feature (1)..(403): Homolog of NCBI NO: 6729026 NR Description: putative sugar transporter [Arabidopsis thaliana]
  misc_feature (1)..(424): Homolog of NCBI NO: 14585699 NR Description: sugar-porter family protein 1 [Arabidopsis
  misc_feature (1)..(424): Homolog of NCBI NO: 18421106 NR Description: sugar transporter-like protein; protein id: supported by cDNA: gi_14585698, supported by cDNA: gi_15294181
  misc_feature (1)..(424): Homolog of NCBI NO: 18421108 NR Description: sugar transporter-like protein; protein id:
  misc_feature (1)..(301): Homolog of NCBI NO: 6729026 NR Description: putative sugar transporter [Arabidopsis thaliana]
  misc_feature (380)..(424): Homolog of NCBI NO: 6729026 NR Description: putative sugar transporter [Arabidopsis thaliana]
  misc_feature (1)..(425): Homolog of NCBI NO: 18390957 NR Description: putative sugar transport protein, ERD6; protein At1g08920.1, supported by cDNA: gi_14194108 [Arabidopsis >gi|14194109|gb|AAK56249.1|AF367260_1 At1g08920/F7G19_20
MEEGLLQHQNDRDDRRITACVILSTFVAVCSAFSYGCAAGYTSGAETAIMKELDLSMAQFSAFGSFLNVGGAVGALFSGQLAVILGRRRTLWACDFFCVFGWLSIAFAKNVFWLDLGRISLGIGVGLISYVVPVYIAEITPKHVRGAFTASNQLLQNSGVSLIYFFGTVINWRVMAVIGAIPCILQTIGIFFIPESPRWLAKIRLSKEVESSLHRLRGKDTDVSGEAAEIQVMTKMLEEDSKSSFSDMFQKKYRRTLVVGIGLMLIQQLSGASGITYYSNAIFRKAGFSERLGSMIFGVFVIPKALVGLILVDRWGRRPLLLASAVGMSIGSLLIGVSFTLQQMNVLPELIPIFVFVNILVYFGCFAFGIGGLPWVIMSEIFPINIKVSAGTIVALTSWTSGWFVSYAFNFMFEWSAQGLYFLYYFFINLDKTIYQKKLRVIFIKIHKSNIKLFKNRVRILTFVSNSFRC

SEQ ID NO: 77935 - protein, 421 aa, Arabidopsis thaliana
  peptide (1)..(421): Ceres Seq. ID no. 12581093
  misc_feature (1)..(354): Pfam Name: Sugar (and other) transporter Pfam Description: Sugar (and other) transporter
  misc_feature (1)..(420): Homolog of NCBI NO: 20260272 NR Description: putative sugar transporter [Arabidopsis thaliana]
  misc_feature (1)..(375): Homolog of NCBI NO: 18397141 NR Description: Expressed protein; protein id: At3g05165.1
  misc_feature (1)..(375): Homolog of NCBI NO: 18397139 NR Description: putative sugar transporter; protein id: supported by cDNA: gi_16604315 [Arabidopsis thaliana] AT3g05160/T12H1_13 [Arabidopsis thaliana]
  misc_feature (1)..(354): Homolog of NCBI NO: 6729026 NR Description: putative sugar transporter [Arabidopsis thaliana]
  misc_feature (1)..(375): Homolog of NCBI NO: 14585699 NR Description: sugar-porter family protein 1 [Arabidopsis
  misc_feature (1)..(375): Homolog of NCBI NO: 18421106 NR Description: sugar transporter-like protein; protein id: supported by cDNA: gi_14585698, supported by cDNA: gi_15294181
  misc_feature (1)..(375): Homolog of NCBI NO: 18421108 NR Description: sugar transporter-like protein; protein id:
  misc_feature (1)..(252): Homolog of NCBI NO: 6729026 NR Description: putative sugar transporter [Arabidopsis thaliana]
  misc_feature (331)..(375): Homolog of NCBI NO: 6729026 NR Description: putative sugar transporter [Arabidopsis thaliana]
  misc_feature (1)..(376): Homolog of NCBI NO: 18390957 NR Description: putative sugar transport protein, ERD6; protein At1g08920.1, supported by cDNA: gi_14194108 [Arabidopsis >gi|14194109|gb|AAK56249.1|AF367260_1 At1g08920/F7G19_20
MKELDLSMAQFSAFGSFLNVGGAVGALFSGQLAVILGRRRTLWACDFFCVFGWLSIAFAKNVFWLDLGRISLGIGVGLISYVVPVYIAEITPKHVRGAFTASNQLLQNSGVSLIYFFGTVINWRVMAVIGAIPCILQTIGIFFIPESPRWLAKIRLSKEVESSLHRLRGKDTDVSGEAAEIQVMTKMLEEDSKSSFSDMFQKKYRRTLVVGIGLMLIQQLSGASGITYYSNAIFRKAGFSERLGSMIFGVFVIPKALVGLILVDRWGRRPLLLASAVGMSIGSLLIGVSFTLQQMNVLPELIPIFVFVNILVYFGCFAFGIGGLPWVIMSEIFPINIKVSAGTIVALTSWTSGWFVSYAFNFMFEWSAQGLYFLYYFFINLDKTIYQKKLRVIFIKIHKSNIKLFKNRVRILTFVSNSFRC

SEQ ID NO: 77936 - DNA, 1756 bp, Arabidopsis thaliana
  misc_feature (1)..(1756): Ceres Seq. ID no. 12581094
  misc_feature: MA Experiment ID: 108488 Result: Down-regulated in Transcription
  misc_feature: MA Experiment ID: 108573 Result: Down-regulated in Transcription
  misc_feature: MA Experiment 108573 PARAMETER Experiment Name: At_Drought_cDNA_P Parameter: Timepoint (hr) Value: 6
  misc_feature: MA Experiment 108573 PARAMETER Experiment Name: At_Drought_cDNA_P Parameter: Tissue Value: Aerial
  misc_feature: MA Experiment 108573 PARAMETER Experiment Name: At_Drought_cDNA_P Parameter: Treatment Value: Drought vs. No Drought
  misc_feature: MA Experiment ID: 20000071 Result: Up-regulated in Transcription
  misc_feature: MA Experiment 20000071 PARAMETER Experiment Name: At_100uM_ABA_Mutants_cDNA_P Parameter: Plant Line Value: CS8104
  misc_feature: MA Experiment 20000071 PARAMETER Experiment Name: At_100uM_ABA_Mutants_cDNA_P Parameter: Timepoint (hr) Value: 6
  misc_feature: MA Experiment 20000071 PARAMETER Experiment Name: At_100uM_ABA_Mutants_cDNA_P Parameter: Tissue Value: Aerial
  misc_feature: MA Experiment 20000071 PARAMETER Experiment Name: At_100uM_ABA_Mutants_cDNA_P Parameter: Treatment Value: 100uM ABA vs. No Treatment
  misc_feature: MA Experiment ID: 20000171 Result: Down-regulated in Transcription
  misc_feature: MA Experiment 20000171 PARAMETER Experiment Name: At_42deg_Heat_P Parameter: Age (day) Value: 14
  misc_feature: MA Experiment 20000171 PARAMETER Experiment Name: At_42deg_Heat_P Parameter: Organism Value: A. thaliana
  misc_feature: MA Experiment 20000171 PARAMETER Experiment Name: At_42deg_Heat_P Parameter: Plant Line Value: WS
  misc_feature: MA Experiment 20000171 PARAMETER Experiment Name: At_42deg_Heat_P Parameter: Temperature (deg C) Value: 42 vs. 22
  misc_feature: MA Experiment 20000171 PARAMETER Experiment Name: At_42deg_Heat_P Parameter: Timepoint (hr) Value: 1
  misc_feature: MA Experiment 20000171 PARAMETER Experiment Name: At_42deg_Heat_P Parameter: Tissue Value: Aerial
  misc_feature: MA Experiment ID: 20000173 Result: Down-regulated in Transcription
  misc_feature: MA Experiment 20000173 PARAMETER Experiment Name: At_42deg_Heat_P Parameter: Age (day) Value: 14
  misc_feature: MA Experiment 20000173 PARAMETER Experiment Name: At_42deg_Heat_P Parameter: Organism Value: A. thaliana
  misc_feature: MA Experiment 20000173 PARAMETER Experiment Name: At_42deg_Heat_P Parameter: Plant Line Value: WS
  misc_feature: MA Experiment 20000173 PARAMETER Experiment Name: At_42deg_Heat_P Parameter: Temperature (deg C) Value: 42 vs. 22
  misc_feature: MA Experiment 20000173 PARAMETER Experiment Name: At_42deg_Heat_P Parameter: Timepoint (hr) Value: 6
  misc_feature: MA Experiment 20000173 PARAMETER Experiment Name: At_42deg_Heat_P Parameter: Tissue Value: Aerial
  misc_feature: MA Experiment ID: 20000180 Result: Up-regulated in Transcription
  misc_feature: MA Experiment 20000180 PARAMETER Experiment Name: At_Germinating_Seeds_P Parameter: Age (hr) Value: 24 vs. 0
  misc_feature: MA Experiment 20000180 PARAMETER Experiment Name: At_Germinating_Seeds_P Parameter: Tissue Value: Germinating Seeds
  misc_feature: MA Experiment ID: 20000182 Result: Down-regulated in Transcription
  misc_feature: MA Experiment 20000182 PARAMETER Experiment Name: At_2mM_SA_P Parameter: Age (day) Value: 14
  misc_feature: MA Experiment 20000182 PARAMETER Experiment Name: At_2mM_SA_P Parameter: Organism Value: A. thaliana
  misc_feature: MA Experiment 20000182 PARAMETER Experiment Name: At_2mM_SA_P Parameter: Plant Line Value: WS
  misc_feature: MA Experiment 20000182 PARAMETER Experiment Name: At_2mM_SA_P Parameter: Timepoint (hr) Value: 6
  misc_feature: MA Experiment 20000182 PARAMETER Experiment Name: At_2mM_SA_P Parameter: Tissue Value: Aerial
  misc_feature: MA Experiment 20000182 PARAMETER Experiment Name: At_2mM_SA_P Parameter: Treatment Value: 2mM SA vs. No Treatment
  misc_feature: MA Experiment ID: 20000184 Result: Up-regulated in Transcription
  misc_feature: MA Experiment 20000184 PARAMETER Experiment Name: At_Shoots__P Parameter: Age (day) Value: 7
  misc_feature: MA Experiment 20000184 PARAMETER Experiment Name: At_Shoots__P Parameter: Tissue Value: Shoots vs. Whole Plant
  misc_feature: MA Experiment ID: 20000214 Result: Down-regulated in Transcription
  misc_feature: MA Experiment 20000214 PARAMETER Experiment Name: At_4deg_Cold_P Parameter: Timepoint (hr) Value: 6
  misc_feature: MA Experiment ID: 20000227 Result: Up-regulated in Transcription
  misc_feature: MA Experiment 20000227 PARAMETER Experiment Name: At_Root-Tips-vs-Tops_P Parameter: Tissue Value: Root Tips vs. Root Tops
  misc_feature: MA Experiment ID: 20000436 Result: Down-regulated in Transcription
  misc_feature: MA Experiment 20000436 PARAMETER Experiment Name: At_Drought_P Parameter: Age (day) Value: 7
  misc_feature: MA Experiment 20000436 PARAMETER Experiment Name: At_Drought_P Parameter: Organism Value: A. thaliana
  misc_feature: MA Experiment 20000436 PARAMETER Experiment Name: At_Drought_P Parameter: Plant Line Value: WS
  misc_feature: MA Experiment 20000436 PARAMETER Experiment Name: At_Drought_P Parameter: Timepoint (hr) Value: 12
  misc_feature: MA Experiment 20000436 PARAMETER Experiment Name: At_Drought_P Parameter: Tissue Value: Whole Plant
  misc_feature: MA Experiment 20000436 PARAMETER Experiment Name: At_Drought_P Parameter: Treatment Value: Drought vs. No Drought
  misc_feature: MA Experiment ID: 20000437 Result: Down-regulated in Transcription
  misc_feature: MA Experiment 20000437 PARAMETER Experiment Name: At_Drought_P Parameter: Age (day) Value: 8
  misc_feature: MA Experiment 20000437 PARAMETER Experiment Name: At_Drought_P Parameter: Organism Value: A. thaliana
  misc_feature: MA Experiment 20000437 PARAMETER Experiment Name: At_Drought_P Parameter: Plant Line Value: WS
  misc_feature: MA Experiment 20000437 PARAMETER Experiment Name: At_Drought_P Parameter: Timepoint (hr) Value: 24
  misc_feature: MA Experiment 20000437 PARAMETER Experiment Name: At_Drought_P Parameter: Tissue Value: Whole Plant
  misc_feature: MA Experiment 20000437 PARAMETER Experiment Name: At_Drought_P Parameter: Treatment Value: Drought vs. No Drought
  misc_feature: MA Experiment ID: 20000438 Result: Up-regulated in Transcription
  misc_feature: MA Experiment 20000438 PARAMETER Experiment Name: At_Shoots__P Parameter: Age (day) Value: 14
  misc_feature: MA Experiment 20000438 PARAMETER Experiment Name: At_Shoots__P Parameter: Tissue Value: Shoots vs. Whole Plant
  misc_feature: MA Experiment ID: 20000794 Result: Down-regulated in Transcription
  misc_feature: MA Experiment 20000794 PARAMETER Experiment Name: At_Petals_P Parameter: Age (day) Value: 23-25 days
  misc_feature: MA Experiment 20000794 PARAMETER Experiment Name: At_Petals_P Parameter: Plant Line Value: WS
  misc_feature: MA Experiment 20000794 PARAMETER Experiment Name: At_Petals_P Parameter: Tissue Value: Petals vs. Whole plant
  misc_feature: MA Experiment ID: 20001554 Result: Down-regulated in Transcription
  misc_feature: MA Experiment 20001554 PARAMETER Experiment Name: At_Drought_Soil_Dry_P Parameter: Age (day) Value: 21
  misc_feature: MA Experiment 20001554 PARAMETER Experiment Name: At_Drought_Soil_Dry_P Parameter: Organism Value: A. thaliana
  misc_feature: MA Experiment 20001554 PARAMETER Experiment Name: At_Drought_Soil_Dry_P Parameter: Plant Line Value: WS
  misc_feature: MA Experiment 20001554 PARAMETER Experiment Name: At_Drought_Soil_Dry_P Parameter: Post Timepoint (hr) Value: None
  misc_feature: MA Experiment 20001554 PARAMETER Experiment Name: At_Drought_Soil_Dry_P Parameter: Post-Treatment Value: None
  misc_feature: MA Experiment 20001554 PARAMETER Experiment Name: At_Drought_Soil_Dry_P Parameter: Timepoint (day) Value: 7
  misc_feature: MA Experiment 20001554 PARAMETER Experiment Name: At_Drought_Soil_Dry_P Parameter: Treatment Value: Drought vs. No Drought
  misc_feature: MA Experiment ID: 20001555 Result: Down-regulated in Transcription
  misc_feature: MA Experiment 20001555 PARAMETER Experiment Name: At_Drought_Soil_Dry_P Parameter: Age (day) Value: 24
  misc_feature: MA Experiment 20001555 PARAMETER Experiment Name: At_Drought_Soil_Dry_P Parameter: Organism Value: A. thaliana
  misc_feature: MA Experiment 20001555 PARAMETER Experiment Name: At_Drought_Soil_Dry_P Parameter: Plant Line Value: WS
  misc_feature: MA Experiment 20001555 PARAMETER Experiment Name: At_Drought_Soil_Dry_P Parameter: Post Timepoint (hr) Value: None
  misc_feature: MA Experiment 20001555 PARAMETER Experiment Name: At_Drought_Soil_Dry_P Parameter: Post-Treatment Value: None
  misc_feature: MA Experiment 20001555 PARAMETER Experiment Name: At_Drought_Soil_Dry_P Parameter: Timepoint (day) Value: 10
  misc_feature: MA Experiment 20001555 PARAMETER Experiment Name: At_Drought_Soil_Dry_P Parameter: Treatment Value: Drought vs. No Drought
  misc_feature: MA Experiment ID: 20001556 Result: Down-regulated in Transcription
  misc_feature: MA Experiment 20001556 PARAMETER Experiment Name: At_Drought_Soil_Dry_P Parameter: Age (day) Value: 26
  misc_feature: MA Experiment 20001556 PARAMETER Experiment Name: At_Drought_Soil_Dry_P Parameter: Organism Value: A. thaliana
  misc_feature: MA Experiment 20001556 PARAMETER Experiment Name: At_Drought_Soil_Dry_P Parameter: Plant Line Value: WS
  misc_feature: MA Experiment 20001556 PARAMETER Experiment Name: At_Drought_Soil_Dry_P Parameter: Post Timepoint (hr) Value: None
  misc_feature: MA Experiment 20001556 PARAMETER Experiment Name: At_Drought_Soil_Dry_P Parameter: Post-Treatment Value: None
  misc_feature: MA Experiment 20001556 PARAMETER Experiment Name: At_Drought_Soil_Dry_P Parameter: Timepoint (day) Value: 12
  misc_feature: MA Experiment 20001556 PARAMETER Experiment Name: At_Drought_Soil_Dry_P Parameter: Treatment Value: Drought vs. No Drought
  misc_feature: MA Experiment ID: 20001558 Result: Up-regulated in Transcription
  misc_feature: MA Experiment 20001558 PARAMETER Experiment Name: At_Drought_Soil_Dry_P Parameter: Age (day) Value: 27
  misc_feature: MA Experiment 20001558 PARAMETER Experiment Name: At_Drought_Soil_Dry_P Parameter: Organism Value: A. thaliana
  misc_feature: MA Experiment 20001558 PARAMETER Experiment Name: At_Drought_Soil_Dry_P Parameter: Plant Line Value: WS
  misc_feature: MA Experiment 20001558 PARAMETER Experiment Name: At_Drought_Soil_Dry_P Parameter: Post Timepoint (hr) Value: 6
  misc_feature: MA Experiment 20001558 PARAMETER Experiment Name: At_Drought_Soil_Dry_P Parameter: Post-Treatment Value: Re-Water vs. No Drought
  misc_feature: MA Experiment 20001558 PARAMETER Experiment Name: At_Drought_Soil_Dry_P Parameter: Timepoint (day) Value: 13
  misc_feature: MA Experiment 20001558 PARAMETER Experiment Name: At_Drought_Soil_Dry_P Parameter: Treatment Value: Drought vs. No Drought
  misc_feature: MA Experiment ID: 20001559 Result: Down-regulated in Transcription
  misc_feature: MA Experiment 20001559 PARAMETER Experiment Name: At_Drought_Soil_Dry_P Parameter: Age (day) Value: 28
  misc_feature: MA Experiment 20001559 PARAMETER Experiment Name: At_Drought_Soil_Dry_P Parameter: Organism Value: A. thaliana
  misc_feature: MA Experiment 20001559 PARAMETER Experiment Name: At_Drought_Soil_Dry_P Parameter: Plant Line Value: WS
  misc_feature: MA Experiment 20001559 PARAMETER Experiment Name: At_Drought_Soil_Dry_P Parameter: Post Timepoint (hr) Value: 29
  misc_feature: MA Experiment 20001559 PARAMETER Experiment Name: At_Drought_Soil_Dry_P Parameter: Post-Treatment Value: Re-Water vs. No Drought
  misc_feature: MA Experiment 20001559 PARAMETER Experiment Name: At_Drought_Soil_Dry_P Parameter: Timepoint (day) Value: 14
  misc_feature: MA Experiment 20001559 PARAMETER Experiment Name: At_Drought_Soil_Dry_P Parameter: Treatment Value: Drought vs. No Drought
  misc_feature: MA Experiment ID: 20001560 Result: Up-regulated in Transcription
  misc_feature: MA Experiment 20001560 PARAMETER Experiment Name: At_Drought_Soil_Dry_P Parameter: Age (day) Value: 28
  misc_feature: MA Experiment 20001560 PARAMETER Experiment Name: At_Drought_Soil_Dry_P Parameter: Organism Value: A. thaliana
  misc_feature: MA Experiment 20001560 PARAMETER Experiment Name: At_Drought_Soil_Dry_P Parameter: Plant Line Value: WS
  misc_feature: MA Experiment 20001560 PARAMETER Experiment Name: At_Drought_Soil_Dry_P Parameter: Post Timepoint (hr) Value: None
  misc_feature: MA Experiment 20001560 PARAMETER Experiment Name: At_Drought_Soil_Dry_P Parameter: Post-Treatment Value: None
  misc_feature: MA Experiment 20001560 PARAMETER Experiment Name: At_Drought_Soil_Dry_P Parameter: Timepoint (day) Value: 14
  misc_feature: MA Experiment 20001560 PARAMETER Experiment Name: At_Drought_Soil_Dry_P Parameter: Treatment Value: Drought vs. No Drought
  misc_feature: MA Experiment ID: 20001904 Result: Down-regulated in Transcription
  misc_feature: MA Experiment 20001904 PARAMETER Experiment Name: At_Drought_Reproduction_P Parameter: Age (day) Value: 37
  misc_feature: MA Experiment 20001904 PARAMETER Experiment Name: At_Drought_Reproduction_P Parameter: Organism Value: A. thaliana
  misc_feature: MA Experiment 20001904 PARAMETER Experiment Name: At_Drought_Reproduction_P Parameter: Plant Line Value: WS
  misc_feature: MA Experiment 20001904 PARAMETER Experiment Name: At_Drought_Reproduction_P Parameter: Timepoint (day) Value: 7
  misc_feature: MA Experiment 20001904 PARAMETER Experiment Name: At_Drought_Reproduction_P Parameter: Tissue Value: Rosettes
  misc_feature: MA Experiment 20001904 PARAMETER Experiment Name: At_Drought_Reproduction_P Parameter: Treatment Value: Drought vs. No Drought
  misc_feature: MA Experiment ID: 20001906 Result: Down-regulated in Transcription
  misc_feature: MA Experiment 20001906 PARAMETER Experiment Name: At_Drought_Reproduction_P Parameter: Age (day) Value: 35
  misc_feature: MA Experiment 20001906 PARAMETER Experiment Name: At_Drought_Reproduction_P Parameter: Organism Value: A. thaliana
  misc_feature: MA Experiment 20001906 PARAMETER Experiment Name: At_Drought_Reproduction_P Parameter: Plant Line Value: WS
  misc_feature: MA Experiment 20001906 PARAMETER Experiment Name: At_Drought_Reproduction_P Parameter: Timepoint (day) Value: 5
  misc_feature: MA Experiment 20001906 PARAMETER Experiment Name: At_Drought_Reproduction_P Parameter: Tissue Value: Siliques
  misc_feature: MA Experiment 20001906 PARAMETER Experiment Name: At_Drought_Reproduction_P Parameter: Treatment Value: Drought vs. No Drought
  misc_feature: MA Experiment ID: 20001911 Result: Down-regulated in Transcription
  misc_feature: MA Experiment 20001911 PARAMETER Experiment Name: At_Drought_Reproduction_P Parameter: Age (day) Value: 40
  misc_feature: MA Experiment 20001911 PARAMETER Experiment Name: At_Drought_Reproduction_P Parameter: Organism Value: A. thaliana
  misc_feature: MA Experiment 20001911 PARAMETER Experiment Name: At_Drought_Reproduction_P Parameter: Plant Line Value: WS
  misc_feature: MA Experiment 20001911 PARAMETER Experiment Name: At_Drought_Reproduction_P Parameter: Timepoint (day) Value: 10
  misc_feature: MA Experiment 20001911 PARAMETER Experiment Name: At_Drought_Reproduction_P Parameter: Tissue Value: Flowers
  misc_feature: MA Experiment 20001911 PARAMETER Experiment Name: At_Drought_Reproduction_P Parameter: Treatment Value: Drought vs. No Drought
tctctctgagtgtctggttacatttggcgcgaaaagttcttcactttatagcttttttatctctttaattatccgacagcttcgttacaaataaagatgtcagtggtaacaatcttgatactggcattaaccagtgttattcccatttacgcaaacgttcacggcgccgggaaaatatgcgacgaacttggccggcgatcattgagtacaagaccacacagtgtctccattacagattttggagctgttggagatggcaaaacgctcaacactcttgcgtttcaaaacgccgttttctatcttatgtctttcgccgacaaaggtggggcccagctctatgttccgccgggacattggctcaccgggagttttagcctcaccagccacctcactctctttctcgaaaacggcgccgttatagtcgcttctcaggatccatcgcattgggaagtggttgatcctttaccttcatacggaaggggaattgatttgcctgggaagcgatacaagagtttgatcaacggtaacaagctacatgatgttgttgtaacaggtgataatggaactatagatggtcaaggcttggtttggtgggatcggtttacttctcattccttaaagtataaccgtcctcacctcatcgagtttctttcttctgaaaatgtaattgtctccaatcttacgttcttgaatgctcctgcttattcaatctattcaatctactctagccatgtatatattcataagatattggcccattcttctcctaaatctccttatacaatcggtattgtaccagattcttctgattacgtctgcatccaaaactctaccattaacgtggggtatgacgcgatttccctcaaaagcggttgggatgaatatggaattgcctattctcgtcccactgaaaatgttcatataagaaatgtgtaccttcgaggagcttctggttcctctatctcctttggcagtgaaatgtctggtggaatatctgatgtcgtggttgataacgctcatatacactactcgttaaccggcattgcctttagaaccacaaaaggcagaggtggttatatcaaagagatcgatatttcaaacatcgatatgttgagaataggtactgccattgttgctaatggtagctttggatctcaccctgatgataaatatgatgtgaatgctctcccacttgtgagtcacatcagattaagcaacatttctggagagaacattggcattgcggggaaattgtttgggatcaaagaatctccatttagctcagtgactttgtcgaatgtttctttgtcgatgagctcaggttcttctgtttcttggcaatgctcctacgtttacgggtcctcggagtcagtcattcctgaaccgtgtcccgagctgaagagagatgctgatgcttacggtagagctgcagtctagtgaaacagactgcaaaagaaaaaagaaaaaaaaagcaagaaacatttcttgggattctttgataggattcaattcatcaatcatttcatattttgtggagttagagaaggtcagattctttcctcaagtaaaccacattgtctttagatcatacatgttcctttcggttattctggtttcctatttttatgttgtttgcatattctgagataagaaatctgtacaggttcatttcttcattcatgtgtaaacaaagaaattttgtttcagcagttttccacaagccattaataataaaaaggagagatagtttcatttt

SEQ ID NO: 77937 - protein, 446 aa, Arabidopsis thaliana
  peptide (1)..(446): Ceres Seq. ID no. 12581095
  misc_feature (75)..(431): Pfam Name: Glycosyl hydrolases family 28 Pfam Description: Glycosyl hydrolases family 28
  misc_feature (1)..(446): Homolog of NCBI NO: 30679999 NR Description: polygalacturonase, putative [Arabidopsis >gi|20260262|gb|AAM13029.1| unknown protein [Arabidopsis >gi|22136514|gb|AAM91335.1| unknown protein [Arabidopsis
  misc_feature (70)..(446): Homolog of NCBI NO: 18397713 NR Description: polygalacturonase, putative; protein id: supported by cDNA: 38575. [Arabidopsis thaliana]
  misc_feature (70)..(446): Homolog of NCBI NO: 21593399 NR Description: polygalacturonase-like protein [Arabidopsis
  misc_feature (1)..(444): Homolog of NCBI NO: 22327662 NR Description: Expressed protein; protein id: At5g49215.1, by cDNA: gi_20258820 [Arabidopsis thaliana] unknown protein [Arabidopsis thaliana]
  misc_feature (1)..(434): Homolog of NCBI NO: 15228881 NR Description: polygalacturonase, putative; protein id: supported by cDNA: 17203., supported by cDNA: gi_14334801, by cDNA: gi_21280834 [Arabidopsis thaliana]
  misc_feature (1)..(434): Homolog of NCBI NO: 7939578 NR Description: polygalacturonase-like protein [Arabidopsis
  misc_feature (1)..(434): Homolog of NCBI NO: 21553827 NR Description: polygalacturonase, putative [Arabidopsis thaliana]
  misc_feature (2)..(437): Homolog of NCBI NO: 40714685 NR Description: putative polygalacturonase [Oryza sativa
  misc_feature (1)..(435): Homolog of NCBI NO: 18412253 NR Description: polygalacturonase, putative; protein id: supported by cDNA: gi_13358184 [Arabidopsis thaliana] AT3g62110 [Arabidopsis thaliana] >gi|23397166|gb|AAN31866.1|
  misc_feature (1)..(435): Homolog of NCBI NO: 11263971 NR Description: hypothetical protein T17J13.70 - Arabidopsis >gi|6899921|emb|CAB71871.1| putative protein [Arabidopsis
MSVVTILILALTSVIPIYANVHGAGKICDELGRRSLSTRPHSVSITDFGAVGDGKTLNTLAFQNAVFYLMSFADKGGAQLYVPPGHWLTGSFSLTSHLTLFLENGAVIVASQDPSHWEVVDPLPSYGRGIDLPGKRYKSLINGNKLHDVVVTGDNGTIDGQGLVWWDRFTSHSLKYNRPHLIEFLSSENVIVSNLTFLNAPAYSIYSIYSSHVYIHKILAHSSPKSPYTIGIVPDSSDYVCIQNSTINVGYDAISLKSGWDEYGIAYSRPTENVHIRNVYLRGASGSSISFGSEMSGGISDVVVDNAHIHYSLTGIAFRTTKGRGGYIKEIDISNIDMLRIGTAIVANGSFGSHPDDKYDVNALPLVSHIRLSNISGENIGIAGKLFGIKESPFSSVTLSNVSLSMSSGSSVSWQCSYVYGSSESVIPEPCPELKRDADAYGRAAV

SEQ ID NO: 77938 - protein, 377 aa, Arabidopsis thaliana; identical to SEQ ID NO: 48553
  peptide (1)..(377): Ceres Seq. ID no. 12581096
  misc_feature (6)..(362): Pfam Name: Glycosyl hydrolases family 28 Pfam Description: Glycosyl hydrolases family 28
  misc_feature (1)..(377): Homolog of NCBI NO: 30679999 NR Description: polygalacturonase, putative [Arabidopsis >gi|20260262|gb|AAM13029.1| unknown protein [Arabidopsis >gi|22136514|gb|AAM91335.1| unknown protein [Arabidopsis
  misc_feature (1)..(377): Homolog of NCBI NO: 18397713 NR Description: polygalacturonase, putative; protein id: supported by cDNA: 38575. [Arabidopsis thaliana]
  misc_feature (1)..(377): Homolog of NCBI NO: 21593399 NR Description: polygalacturonase-like protein [Arabidopsis
  misc_feature (1)..(375): Homolog of NCBI NO: 22327662 NR Description: Expressed protein; protein id: At5g49215.1, by cDNA: gi_20258820 [Arabidopsis thaliana] unknown protein [Arabidopsis thaliana]
  misc_feature (1)..(365): Homolog of NCBI NO: 15228881 NR Description: polygalacturonase, putative; protein id: supported by cDNA: 17203., supported by cDNA: gi_14334801, by cDNA: gi_21280834 [Arabidopsis thaliana]
  misc_feature (1)..(365): Homolog of NCBI NO: 7939578 NR Description: polygalacturonase-like protein [Arabidopsis
  misc_feature (1)..(365): Homolog of NCBI NO: 21553827 NR Description: polygalacturonase, putative [Arabidopsis thaliana]
  misc_feature (1)..(368): Homolog of NCBI NO: 40714685 NR Description: putative polygalacturonase [Oryza sativa
  misc_feature (1)..(366): Homolog of NCBI NO: 18412253 NR Description: polygalacturonase, putative; protein id: supported by cDNA: gi_13358184 [Arabidopsis thaliana] AT3g62110 [Arabidopsis thaliana] >gi|23397166|gb|AAN31866.1|
  misc_feature (1)..(366): Homolog of NCBI NO: 11263971 NR Description: hypothetical protein T17J13.70 - Arabidopsis >gi|6899921|emb|CAB71871.1| putative protein [Arabidopsis

SEQ ID NO: 77939 - DNA, 1003 bp, Arabidopsis thaliana
  misc_feature (1)..(1003): Ceres Seq. ID no. 12581104
  misc_feature: MA Experiment ID: 108434 Result: Up-regulated in Transcription
  misc_feature: MA Experiment 108434 PARAMETER Experiment Name: At_Root_Tips_cDNA_P Parameter: Tissue Value: Root Tips
  misc_feature: MA Experiment ID: 108435 Result: Up-regulated in Transcription
  misc_feature: MA Experiment 108435 PARAMETER Experiment Name: At_stm_Mutants_cDNA_P Parameter: Plant Line Value: wt Landsburg vs stm
  misc_feature: MA Experiment 108435 PARAMETER Experiment Name: At_stm_Mutants_cDNA_P Parameter: Tissue Value: Shoot Apical Meristem Region
  misc_feature: MA Experiment ID: 108461 Result: Up-regulated in Transcription
  misc_feature: MA Experiment 108461 PARAMETER Experiment Name: At_Germinating_Seeds_cDNA_P Parameter: Age (day) Value: 1 vs. 0
  misc_feature: MA Experiment 108461 PARAMETER Experiment Name: At_Germinating_Seeds_cDNA_P Parameter: Tissue Value: Germinating Seeds
  misc_feature: MA Experiment ID: 108462 Result: Up-regulated in Transcription
  misc_feature: MA Experiment 108462 PARAMETER Experiment Name: At_Germinating_Seeds_cDNA_P Parameter: Age (day) Value: 2 vs. 0
  misc_feature: MA Experiment 108462 PARAMETER Experiment Name: At_Germinating_Seeds_cDNA_P Parameter: Tissue Value: Germinating Seeds
  misc_feature: MA Experiment ID: 108464 Result: Up-regulated in Transcription
  misc_feature: MA Experiment 108464 PARAMETER Experiment Name: At_Germinating_Seeds_cDNA_P Parameter: Age (day) Value: 4 vs. 0
  misc_feature: MA Experiment 108464 PARAMETER Experiment Name: At_Germinating_Seeds_cDNA_P Parameter: Tissue Value: Germinating Seeds
  misc_feature: MA Experiment ID: 108573 Result: Up-regulated in Transcription
  misc_feature: MA Experiment 108573 PARAMETER Experiment Name: At_Drought_cDNA_P Parameter: Timepoint (hr) Value: 6
  misc_feature: MA Experiment 108573 PARAMETER Experiment Name: At_Drought_cDNA_P Parameter: Tissue Value: Aerial
  misc_feature: MA Experiment 108573 PARAMETER Experiment Name: At_Drought_cDNA_P Parameter: Treatment Value: Drought vs. No Drought
  misc_feature: MA Experiment ID: 108577 Result: Up-regulated in Transcription
  misc_feature: MA Experiment 108577 PARAMETER Experiment Name: At_42deg_Heat_cDNA_P Parameter: Temperature (deg C) Value: 42 vs. 22
  misc_feature: MA Experiment 108577 PARAMETER Experiment Name: At_42deg_Heat_cDNA_P Parameter: Timepoint (hr) Value: 6
  misc_feature: MA Experiment 108577 PARAMETER Experiment Name: At_42deg_Heat_cDNA_P Parameter: Tissue Value: Aerial
  misc_feature: MA Experiment ID: 20000068 Result: Up-regulated in Transcription
  misc_feature: MA Experiment ID: 20000093 Result: Up-regulated in Transcription
  misc_feature: MA Experiment 20000093 PARAMETER Experiment Name: At_42deg_Heat_cDNA_P Parameter: Temperature (deg C) Value: 42 vs. 22
  misc_feature: MA Experiment 20000093 PARAMETER Experiment Name: At_42deg_Heat_cDNA_P Parameter: Timepoint (hr) Value: 0.5
  misc_feature: MA Experiment 20000093 PARAMETER Experiment Name: At_42deg_Heat_cDNA_P Parameter: Tissue Value: Aerial
  misc_feature: MA Experiment ID: 20000111 Result: Up-regulated in Transcription
  misc_feature: MA Experiment 20000111 PARAMETER Experiment Name: At_42deg_Heat_cDNA_P Parameter: Temperature (deg C) Value: 42 vs. 22
  misc_feature: MA Experiment 20000111 PARAMETER Experiment Name: At_42deg_Heat_cDNA_P Parameter: Timepoint (hr) Value: 6
  misc_feature: MA Experiment 20000111 PARAMETER Experiment Name: At_42deg_Heat_cDNA_P Parameter: Tissue Value: Aerial
  misc_feature: MA Experiment ID: 20000112 Result: Up-regulated in Transcription
  misc_feature: MA Experiment 20000112 PARAMETER Experiment Name: At_42deg_Heat_cDNA_P Parameter: Temperature (deg C) Value: 42 vs. 22
  misc_feature: MA Experiment 20000112 PARAMETER Experiment Name: At_42deg_Heat_cDNA_P Parameter: Timepoint (hr) Value: 2
  misc_feature: MA Experiment 20000112 PARAMETER Experiment Name: At_42deg_Heat_cDNA_P Parameter: Tissue Value: Aerial
  misc_feature: MA Experiment ID: 20000113 Result: Up-regulated in Transcription
  misc_feature: MA Experiment 20000113 PARAMETER Experiment Name: At_42deg_Heat_cDNA_P Parameter: Temperature (deg C) Value: 42 vs. 22
  misc_feature: MA Experiment 20000113 PARAMETER Experiment Name: At_42deg_Heat_cDNA_P Parameter: Timepoint (hr) Value: 8
  misc_feature: MA Experiment 20000113 PARAMETER Experiment Name: At_42deg_Heat_cDNA_P Parameter: Tissue Value: Aerial
  misc_feature: MA Experiment ID: 20000117 Result: Up-regulated in Transcription
  misc_feature: MA Experiment 20000117 PARAMETER Experiment Name: At_100uM_ABA_Mutants_cDNA_P Parameter: Plant Line Value: Columbia
  misc_feature: MA Experiment 20000117 PARAMETER Experiment Name: At_100uM_ABA_Mutants_cDNA_P Parameter: Timepoint (hr) Value: 6
  misc_feature: MA Experiment 20000117 PARAMETER Experiment Name: At_100uM_ABA_Mutants_cDNA_P Parameter: Tissue Value: Aerial
  misc_feature: MA Experiment 20000117 PARAMETER Experiment Name: At_100uM_ABA_Mutants_cDNA_P Parameter: Treatment Value: 100uM ABA vs. No Treatment
  misc_feature: MA Experiment ID: 20000144 Result: Up-regulated in Transcription
  misc_feature: MA Experiment 20000144 PARAMETER Experiment Name: At_42deg_Heat_cDNA_P Parameter: Temperature (deg C) Value: 42 vs. 22
  misc_feature: MA Experiment 20000144 PARAMETER Experiment Name: At_42deg_Heat_cDNA_P Parameter: Timepoint (hr) Value: 1
  misc_feature: MA Experiment 20000144 PARAMETER Experiment Name: At_42deg_Heat_cDNA_P Parameter: Tissue Value: Aerial
  misc_feature: MA Experiment ID: 20000224 Result: Down-regulated in Transcription
  misc_feature: MA Experiment ID: 20000306 Result: Up-regulated in Transcription
  misc_feature: MA Experiment 20000306 PARAMETER Experiment Name: At_Germinating_Seeds_Sub_P Parameter: Age (hr) Value: 6 vs. 0
  misc_feature: MA Experiment 20000306 PARAMETER Experiment Name: At_Germinating_Seeds_Sub_P Parameter: Organism Value: A. thaliana
  misc_feature: MA Experiment 20000306 PARAMETER Experiment Name: At_Germinating_Seeds_Sub_P Parameter: Plant Line Value: WS
  misc_feature: MA Experiment 20000306 PARAMETER Experiment Name: At_Germinating_Seeds_Sub_P Parameter: Tissue Value: Germinating Seeds
  misc_feature: MA Experiment ID: 20000307 Result: Up-regulated in Transcription
  misc_feature: MA Experiment 20000307 PARAMETER Experiment Name: At_Germinating_Seeds_Sub_P Parameter: Age (hr) Value: 24 vs. 0
  misc_feature: MA Experiment 20000307 PARAMETER Experiment Name: At_Germinating_Seeds_Sub_P Parameter: Organism Value: A. thaliana
  misc_feature: MA Experiment 20000307 PARAMETER Experiment Name: At_Germinating_Seeds_Sub_P Parameter: Plant Line Value: WS
  misc_feature: MA Experiment 20000307 PARAMETER Experiment Name: At_Germinating_Seeds_Sub_P Parameter: Tissue Value: Germinating Seeds
  misc_feature: MA Experiment ID: 20000314 Result: Down-regulated in Transcription
  misc_feature: MA Experiment 20000314 PARAMETER Experiment Name: At_14day_Shoots-Roots_Sub_P Parameter: Age (day) Value: 14
  misc_feature: MA Experiment 20000314 PARAMETER Experiment Name: At_14day_Shoots-Roots_Sub_P Parameter: Organism Value: A. thaliana
  misc_feature: MA Experiment 20000314 PARAMETER Experiment Name: At_14day_Shoots-Roots_Sub_P Parameter: Plant Line Value: WS
  misc_feature: MA Experiment 20000314 PARAMETER Experiment Name: At_14day_Shoots-Roots_Sub_P Parameter: Tissue Value: Roots vs. Whole Plant
  misc_feature: MA Experiment ID: 20000327 Result: Up-regulated in Transcription
  misc_feature: MA Experiment 20000327 PARAMETER Experiment Name: At_42deg_Heat_Sub_P Parameter: Age (day) Value: 14
  misc_feature: MA Experiment 20000327 PARAMETER Experiment Name: At_42deg_Heat_Sub_P Parameter: Organism Value: A. thaliana
  misc_feature: MA Experiment 20000327 PARAMETER Experiment Name: At_42deg_Heat_Sub_P Parameter: Plant Line Value: WS
  misc_feature: MA Experiment 20000327 PARAMETER Experiment Name: At_42deg_Heat_Sub_P Parameter: Temperature (deg C) Value: 42 vs. 22
  misc_feature: MA Experiment 20000327 PARAMETER Experiment Name: At_42deg_Heat_Sub_P Parameter: Timepoint (hr) Value: 1
  misc_feature: MA Experiment 20000327 PARAMETER Experiment Name: At_42deg_Heat_Sub_P Parameter: Tissue Value: Aerial
  misc_feature: MA Experiment ID: 20000328 Result: Up-regulated in Transcription
  misc_feature: MA Experiment 20000328 PARAMETER Experiment Name: At_42deg_Heat_Sub_P Parameter: Age (day) Value: 14
  misc_feature: MA Experiment 20000328 PARAMETER Experiment Name: At_42deg_Heat_Sub_P Parameter: Organism Value: A. thaliana
  misc_feature: MA Experiment 20000328 PARAMETER Experiment Name: At_42deg_Heat_Sub_P Parameter: Plant Line Value: WS
  misc_feature: MA Experiment 20000328 PARAMETER Experiment Name: At_42deg_Heat_Sub_P Parameter: Temperature (deg C) Value: 42 vs. 22
  misc_feature: MA Experiment 20000328 PARAMETER Experiment Name: At_42deg_Heat_Sub_P Parameter: Timepoint (hr) Value: 6
  misc_feature: MA Experiment 20000328 PARAMETER Experiment Name: At_42deg_Heat_Sub_P Parameter: Tissue Value: Aerial
  misc_feature: MA Experiment ID: 20000355 Result: Up-regulated in Transcription
  misc_feature: MA Experiment 20000355 PARAMETER Experiment Name: At_Siliques_Sub_P Parameter: Age (day) Value: 21
  misc_feature: MA Experiment 20000355 PARAMETER Experiment Name: At_Siliques_Sub_P Parameter: Organism Value: A. thaliana
  misc_feature: MA Experiment 20000355 PARAMETER Experiment Name: At_Siliques_Sub_P Parameter: Plant Line Value: WS
  misc_feature: MA Experiment 20000355 PARAMETER Experiment Name: At_Siliques_Sub_P Parameter: Tissue Value: Less Than 5mm Siliques vs. Whole Plant
  misc_feature: MA Experiment ID: 20000440 Result: Up-regulated in Transcription
  misc_feature: MA Experiment 20000440 PARAMETER Experiment Name: At_Closed-Flower__Sub_P Parameter: Tissue Value: Closed Flower vs. Whole Plant
  misc_feature: MA Experiment ID: 20000634 Result: Down-regulated in Transcription
  misc_feature: MA Experiment 20000634 PARAMETER Experiment Name: At_10percent_PEG_Sub_P Parameter: Age (day) Value: 12
  misc_feature: MA Experiment 20000634 PARAMETER Experiment Name: At_10percent_PEG_Sub_P Parameter: Organism Value: A. thaliana
  misc_feature: MA Experiment 20000634 PARAMETER Experiment Name: At_10percent_PEG_Sub_P Parameter: Plant Line Value: WS
  misc_feature: MA Experiment 20000634 PARAMETER Experiment Name: At_10percent_PEG_Sub_P Parameter: Timepoint (day) Value: 12
  misc_feature: MA Experiment 20000634 PARAMETER Experiment Name: At_10percent_PEG_Sub_P Parameter: Tissue Value: Whole Plant
  misc_feature: MA Experiment 20000634 PARAMETER Experiment Name: At_10percent_PEG_Sub_P Parameter: Treatment Value: 10% PEG vs. No Treatment
attcgtcttctccaattttctcgcgaagaaaactttcctactttgtttcaatccaaacgagtcaaaatgcttctcaagactgtttcttcatcttcttcttcagctctctcgctggtgaatttccatggcgtgaagaaggatgtgtctcctttgttaccttccatttcatcgaatcttcgagtttcttctggaaaatctggaaacttaactttctcttttcgcgcatctaaaagctcaaccaccgacgcgctaagcggcgttgtcttcgagccgtttaaggaagtaaaaaaggagctcgatctcgtccctaccagctctcatctctcactcgctcgacaaaagtactcagacgagtgcgaagccgccattaacgagcagatcaatgtggaatacaatgtctcgtatgtgtatcacgctatgtatgcttactttgatcgggataacatcgcgctcaaaggtcttgccaagttctttaaggaatcaagtttggaagaaagagagcatgctgagaagttaatggagtatcagaacaaacgtggtgggagggttaagttacagtccattgtaatgcctctttcagagtttgaacatgttgacaaaggagatgctctttatggcatggagcttgctctgtcactggagaaactagttaatgagaagctcttaaaccttcacagtgttgcttcgaagaacaatgatgtccacttggcagattttattgagagcgagtttctgacagagcaggtggaagcaatcaagttgatctcagaatatgtggctcaactgcgacgagttggcaaaggacacggaacatggcatttcaatcagatgcttctggaagggtaagcagcttcgagggactcttgtgtctactgtgtttctatatgtgtctactttatgtttagttctttagcttttacgattttgtgaggtagtagacttctttttctgtaagagacaaaagacatgatcacataactttatattctggtataaggttcat

SEQ ID NO: 77940 - protein, 281 aa, Arabidopsis thaliana
  peptide (1)..(281): Ceres Seq. ID no. 12581105
  misc_feature (120)..(265): Pfam Name: Ferritin-like domain Pfam Description: Ferritin-like domain
  misc_feature (23)..(281): Homolog of NCBI NO: 15225679 NR Description: putative ferritin; protein id: At2g40300.1, by cDNA: gi_17065437, supported by cDNA: gi_20148572 [Arabidopsis
  misc_feature (23)..(281): Homolog of NCBI NO: 15228818 NR Description: putative protein; protein id: At3g56090.1, by cDNA: 33282., supported by cDNA: gi_13358190, supported by
IRLLQFSREENFPTLFQSKRVKMLLKTVSSSSSSALSLVNFHGVKKDVSPLLPSISSNLRVSSGKSGNLTFSFRASKSSTTDALSGVVFEPFKEVKKELDLVPTSSHLSLARQKYSDECEAAINEQINVEYNVSYVYHAMYAYFDRDNIALKGLAKFFKESSLEEREHAEKLMEYQNKRGGRVKLQSIVMPLSEFEHVDKGDALYGMELALSLEKLVNEKLLNLHSVASKNNDVHLADFIESEFLTEQVEAIKLISEYVAQLRRVGKGHGTWHFNQMLLEG

SEQ ID NO: 77941 - protein, 259 aa, Arabidopsis thaliana
  peptide (1)..(259): Ceres Seq. ID no. 12581106
  misc_feature (98)..(243): Pfam Name: Ferritin-like domain Pfam Description: Ferritin-like domain
  misc_feature (1)..(259): Homolog of NCBI NO: 15225679 NR Description: putative ferritin; protein id: At2g40300.1, by cDNA: gi_17065437, supported by cDNA: gi_20148572 [Arabidopsis
  misc_feature (1)..(259): Homolog of NCBI NO: 15228818 NR Description: putative protein; protein id: At3g56090.1, by cDNA: 33282., supported by cDNA: gi_13358190, supported by
MLLKTVSSSSSSALSLVNFHGVKKDVSPLLPSISSNLRVSSGKSGNLTFSFRASKSSTTDALSGVVFEPFKEVKKELDLVPTSSHLSLARQKYSDECEAAINEQINVEYNVSYVYHAMYAYFDRDNIALKGLAKFFKESSLEEREHAEKLMEYQNKRGGRVKLQSIVMPLSEFEHVDKGDALYGMELALSLEKLVNEKLLNLHSVASKNNDVHLADFIESEFLTEQVEAIKLISEYVAQLRRVGKGHGTWHFNQMLLEG

SEQ ID NO: 77942 - protein, 142 aa, Arabidopsis thaliana
  peptide (1)..(142): Ceres Seq. ID no. 12581107
  misc_feature (1)..(126): Pfam Name: Ferritin-like domain Pfam Description: Ferritin-like domain
  misc_feature (1)..(142): Homolog of NCBI NO: 15225679 NR Description: putative ferritin; protein id: At2g40300.1, by cDNA: gi_17065437, supported by cDNA: gi_20148572 [Arabidopsis
  misc_feature (1)..(142): Homolog of NCBI NO: 15228818 NR Description: putative protein; protein id: At3g56090.1, by cDNA: 33282., supported by cDNA: gi_13358190, supported by
MYAYFDRDNIALKGLAKFFKESSLEEREHAEKLMEYQNKRGGRVKLQSIVMPLSEFEHVDKGDALYGMELALSLEKLVNEKLLNLHSVASKNNDVHLADFIESEFLTEQVEAIKLISEYVAQLRRVGKGHGTWHFNQMLLEG

SEQ ID NO: 77943 - DNA, 999 bp, Arabidopsis thaliana
  misc_feature (1)..(999): Ceres Seq. ID no. 12581112
  misc_feature: MA Experiment ID: 20000173 Result: Down-regulated in Transcription
  misc_feature: MA Experiment 20000173 PARAMETER Experiment Name: At_42deg_Heat_P Parameter: Age (day) Value: 14
  misc_feature: MA Experiment 20000173 PARAMETER Experiment Name: At_42deg_Heat_P Parameter: Organism Value: A. thaliana
  misc_feature: MA Experiment 20000173 PARAMETER Experiment Name: At_42deg_Heat_P Parameter: Plant Line Value: WS
  misc_feature: MA Experiment 20000173 PARAMETER Experiment Name: At_42deg_Heat_P Parameter: Temperature (deg C) Value: 42 vs. 22
  misc_feature: MA Experiment 20000173 PARAMETER Experiment Name: At_42deg_Heat_P Parameter: Timepoint (hr) Value: 6
  misc_feature: MA Experiment 20000173 PARAMETER Experiment Name: At_42deg_Heat_P Parameter: Tissue Value: Aerial
  misc_feature: MA Experiment ID: 20001560 Result: Down-regulated in Transcription
  misc_feature: MA Experiment 20001560 PARAMETER Experiment Name: At_Drought_Soil_Dry_P Parameter: Age (day) Value: 28
  misc_feature: MA Experiment 20001560 PARAMETER Experiment Name: At_Drought_Soil_Dry_P Parameter: Organism Value: A. thaliana
  misc_feature: MA Experiment 20001560 PARAMETER Experiment Name: At_Drought_Soil_Dry_P Parameter: Plant Line Value: WS
  misc_feature: MA Experiment 20001560 PARAMETER Experiment Name: At_Drought_Soil_Dry_P Parameter: Post Timepoint (hr) Value: None
  misc_feature: MA Experiment 20001560 PARAMETER Experiment Name: At_Drought_Soil_Dry_P Parameter: Post-Treatment Value: None
  misc_feature: MA Experiment 20001560 PARAMETER Experiment Name: At_Drought_Soil_Dry_P Parameter: Timepoint (day) Value: 14
  misc_feature: MA Experiment 20001560 PARAMETER Experiment Name: At_Drought_Soil_Dry_P Parameter: Treatment Value: Drought vs. No Drought
gcggaaacttacgccggcggcacaaactttgtgtcttgctcaagatgattgcgtcgaattttatgtaaacaattggctctccgatgttgtcagccatggatgttatgattcactcttcaagctttctcctcccttgcgacgaaacttgtgggacgagatacgctctcgttgttcttaaccagaatttaccacgattcactcctcttctctgggaacatgcaaaacttcgtctctgtgctgatggaggcgctaatcgcatctacgacgaattacctctcttcttccctcacgaagacccttttgtcattcgaaacaggtataagcccgatgttatcaagggagatatggattctatacgccgtgacgtcctcgacttttatgtttactggggaactaaggttatagatgaatctcatgatcaagataccactgatcttgataaatgcatttcgtatatccgtcactctactttgaatcaggagagttccagaattcttgccactggagcactcgggggaagattcgatcatgaagccggtaatctcaacgtcttatatcgatatccagacacaaggatagtccttttatctgatgattgtctcatccaactccttccaaagactcatcgacatgaaatacatattcactcttctcttcaaggacctcactgtggacttatacccattggaactccatctgccaataccactacctcagggcttaaatgggatctcagcaacactgagatgagatttggtgggttgataagtacatcgaacttggttaaagaagagataatcacagtcgaatcggattcggatcttctctggactatttccatcaagaagacaggacttcctgtacaagaccataaaccttagtggcgccactctttagttttatacgctactattatattcatgatgcatcgaagaattacttcaacattattgtgttgatttgttttcactataccagcaaataacaatttattgcctt

SEQ ID NO: 77944 - protein, 265 aa, Arabidopsis thaliana
  peptide (1)..(265): Ceres Seq. ID no. 12581113
  misc_feature (32)..(170): Pfam Name: Thiamin pyrophosphokinase, catalytic domain Pfam Description: Thiamin pyrophosphokinase, catalytic domain
  misc_feature (1)..(265): Homolog of NCBI NO: 18406621 NR Description: putative thiamin pyrophosphokinase; protein id: supported by cDNA: gi_14596220, supported by cDNA: gi_20148328 thaliana] >gi|14596221|gb|AAK68838.1| putative thiamin
  misc_feature (1)..(265): Homolog of NCBI NO: 30689827 NR Description: thiamin pyrophosphokinase -related [Arabidopsis
  misc_feature (5)..(265): Homolog of NCBI NO: 7488367 NR Description: probable thiamin pyrophosphokinase At2g44750
  misc_feature (2)..(265): Homolog of NCBI NO: 30678415 NR Description: thiamin pyrophosphokinase -related [Arabidopsis
  misc_feature (5)..(265): Homolog of NCBI NO: 18379026 NR Description: thiamin pyrophosphokinase, putative; protein id:
  misc_feature (78)..(265): Homolog of NCBI NO: 30678410 NR Description: thiamin pyrophosphokinase -related [Arabidopsis >gi|16648736|gb|AAL25560.1| At1g02880/F22D16_33 [Arabidopsis >gi|20856331|gb|AAM26660.1| At1g02880/F22D16_33 [Arabidopsis
  misc_feature (100)..(254): Homolog of NCBI NO: 34915046 NR Description: putative thiamin pyrophosphokinase [Oryza sativa
  misc_feature (5)..(72): Homolog of NCBI NO: 34915046 NR Description: putative thiamin pyrophosphokinase [Oryza sativa
  misc_feature (8)..(254): Homolog of NCBI NO: 34907130 NR Description: putative thiamine pyrophosphokinase [Oryza sativa
  misc_feature (8)..(254): Homolog of NCBI NO: 21362110 NR Description: thiamin pyrophosphokinase 1; mouse thiamin homolog; thiamine pyrophosphokinase [Homo sapiens] thiamin pyrophosphokinase [Homo sapiens]
MLSAMDVMIHSSSFLLPCDETCGTRYALVVLNQNLPRFTPLLWEHAKLRLCADGGANRIYDELPLFFPHEDPFVIRNRYKPDVIKGDMDSIRRDVLDFYVYWGTKVIDESHDQDTTDLDKCISYIRHSTLNQESSRILATGALGGRFDHEAGNLNVLYRYPDTRIVLLSDDCLIQLLPKTHRHEIHIHSSLQGPHCGLIPIGTPSANTTTSGLKWDLSNTEMRFGGLISTSNLVKEEIITVESDSDLLWTISIKKTGLPVQDHKP

SEQ ID NO: 77945 - protein, 261 aa, Arabidopsis thaliana
  peptide (1)..(261): Ceres Seq. ID no. 12581114
  misc_feature (28)..(166): Pfam Name: Thiamin pyrophosphokinase, catalytic domain Pfam Description: Thiamin pyrophosphokinase, catalytic domain
  misc_feature (1)..(261): Homolog of NCBI NO: 18406621 NR Description: putative thiamin pyrophosphokinase; protein id: supported by cDNA: gi_14596220, supported by cDNA: gi_20148328 thaliana] >gi|14596221|gb|AAK68838.1| putative thiamin
  misc_feature (1)..(261): Homolog of NCBI NO: 30689827 NR Description: thiamin pyrophosphokinase -related [Arabidopsis
  misc_feature (1)..(261): Homolog of NCBI NO: 7488367 NR Description: probable thiamin pyrophosphokinase At2g44750
  misc_feature (1)..(261): Homolog of NCBI NO: 30678415 NR Description: thiamin pyrophosphokinase -related [Arabidopsis
  misc_feature (1)..(261): Homolog of NCBI NO: 18379026 NR Description: thiamin pyrophosphokinase, putative; protein id:
  misc_feature (74)..(261): Homolog of NCBI NO: 30678410 NR Description: thiamin pyrophosphokinase -related [Arabidopsis >gi|16648736|gb|AAL25560.1| At1g02880/F22D16_33 [Arabidopsis >gi|20856331|gb|AAM26660.1| At1g02880/F22D16_33 [Arabidopsis
  misc_feature (96)..(250): Homolog of NCBI NO: 34915046 NR Description: putative thiamin pyrophosphokinase [Oryza sativa
  misc_feature (1)..(68): Homolog of NCBI NO: 34915046 NR Description: putative thiamin pyrophosphokinase [Oryza sativa
  misc_feature (4)..(250): Homolog of NCBI NO: 34907130 NR Description: putative thiamine pyrophosphokinase [Oryza sativa
  misc_feature (4)..(250): Homolog of NCBI NO: 21362110 NR Description: thiamin pyrophosphokinase 1; mouse thiamin homolog; thiamine pyrophosphokinase [Homo sapiens] thiamin pyrophosphokinase [Homo sapiens]
MDVMIHSSSFLLPCDETCGTRYALVVLNQNLPRFTPLLWEHAKLRLCADGGANRIYDELPLFFPHEDPFVIRNRYKPDVIKGDMDSIRRDVLDFYVYWGTKVIDESHDQDTTDLDKCISYIRHSTLNQESSRILATGALGGRFDHEAGNLNVLYRYPDTRIVLLSDDCLIQLLPKTHRHEIHIHSSLQGPHCGLIPIGTPSANTTTSGLKWDLSNTEMRFGGLISTSNLVKEEIITVESDSDLLWTISIKKTGLPVQDHKP

SEQ ID NO: 77946 - protein, 258 aa, Arabidopsis thaliana
  peptide (1)..(258): Ceres Seq. ID no. 12581115
  misc_feature (25)..(163): Pfam Name: Thiamin pyrophosphokinase, catalytic domain Pfam Description: Thiamin pyrophosphokinase, catalytic domain
  misc_feature (1)..(258): Homolog of NCBI NO: 18406621 NR Description: putative thiamin pyrophosphokinase; protein id: supported by cDNA: gi_14596220, supported by cDNA: gi_20148328 thaliana] >gi|14596221|gb|AAK68838.1| putative thiamin
  misc_feature (1)..(258): Homolog of NCBI NO: 30689827 NR Description: thiamin pyrophosphokinase -related [Arabidopsis
  misc_feature (1)..(258): Homolog of NCBI NO: 7488367 NR Description: probable thiamin pyrophosphokinase At2g44750
  misc_feature (1)..(258): Homolog of NCBI NO: 30678415 NR Description: thiamin pyrophosphokinase -related [Arabidopsis
  misc_feature (1)..(258): Homolog of NCBI NO: 18379026 NR Description: thiamin pyrophosphokinase, putative; protein id:
  misc_feature (71)..(258): Homolog of NCBI NO: 30678410 NR Description: thiamin pyrophosphokinase -related [Arabidopsis >gi|16648736|gb|AAL25560.1| At1g02880/F22D16_33 [Arabidopsis >gi|20856331|gb|AAM26660.1| At1g02880/F22D16_33 [Arabidopsis
  misc_feature (93)..(247): Homolog of NCBI NO: 34915046 NR Description: putative thiamin pyrophosphokinase [Oryza sativa
  misc_feature (1)..(65): Homolog of NCBI NO: 34915046 NR Description: putative thiamin pyrophosphokinase [Oryza sativa
  misc_feature (1)..(247): Homolog of NCBI NO: 34907130 NR Description: putative thiamine pyrophosphokinase [Oryza sativa
  misc_feature (1)..(247): Homolog of NCBI NO: 21362110 NR Description: thiamin pyrophosphokinase 1; mouse thiamin homolog; thiamine pyrophosphokinase [Homo sapiens] thiamin pyrophosphokinase [Homo sapiens]
MIHSSSFLLPCDETCGTRYALVVLNQNLPRFTPLLWEHAKLRLCADGGANRIYDELPLFFPHEDPFVIRNRYKPDVIKGDMDSIRRDVLDFYVYWGTKVIDESHDQDTTDLDKCISYIRHSTLNQESSRILATGALGGRFDHEAGNLNVLYRYPDTRIVLLSDDCLIQLLPKTHRHEIHIHSSLQGPHCGLIPIGTPSANTTTSGLKWDLSNTEMRFGGLISTSNLVKEEIITVESDSDLLWTISIKKTGLPVQDHKP

SEQ ID NO: 77947 - DNA, 682 bp, Arabidopsis thaliana
  misc_feature (1)..(682): Ceres Seq. ID no. 12581182
  misc_feature: MA Experiment ID: 20000314 Result: Up-regulated in Transcription
  misc_feature: MA Experiment 20000314 PARAMETER Experiment Name: At_14day_Shoots-Roots_Sub_P Parameter: Age (day) Value: 14
  misc_feature: MA Experiment 20000314 PARAMETER Experiment Name: At_14day_Shoots-Roots_Sub_P Parameter: Organism Value: A. thaliana
  misc_feature: MA Experiment 20000314 PARAMETER Experiment Name: At_14day_Shoots-Roots_Sub_P Parameter: Plant Line Value: WS
  misc_feature: MA Experiment 20000314 PARAMETER Experiment Name: At_14day_Shoots-Roots_Sub_P Parameter: Tissue Value: Roots vs. Whole Plant
  misc_feature: MA Experiment ID: 20000346 Result: Up-regulated in Transcription
  misc_feature: MA Experiment 20000346 PARAMETER Experiment Name: At_2mM_SA_Sub_P Parameter: Age (day) Value: 14
  misc_feature: MA Experiment 20000346 PARAMETER Experiment Name: At_2mM_SA_Sub_P Parameter: Organism Value: A. thaliana
  misc_feature: MA Experiment 20000346 PARAMETER Experiment Name: At_2mM_SA_Sub_P Parameter: Plant Line Value: WS
  misc_feature: MA Experiment 20000346 PARAMETER Experiment Name: At_2mM_SA_Sub_P Parameter: Timepoint (hr) Value: 1
  misc_feature: MA Experiment 20000346 PARAMETER Experiment Name: At_2mM_SA_Sub_P Parameter: Tissue Value: Aerial
  misc_feature: MA Experiment 20000346 PARAMETER Experiment Name: At_2mM_SA_Sub_P Parameter: Treatment Value: 2mM SA vs. No Treatment
  misc_feature: MA Experiment ID: 20000347 Result: Up-regulated in Transcription
  misc_feature: MA Experiment 20000347 PARAMETER Experiment Name: At_2mM_SA_Sub_P Parameter: Age (day) Value: 14
  misc_feature: MA Experiment 20000347 PARAMETER Experiment Name: At_2mM_SA_Sub_P Parameter: Organism Value: A. thaliana
  misc_feature: MA Experiment 20000347 PARAMETER Experiment Name: At_2mM_SA_Sub_P Parameter: Plant Line Value: WS
  misc_feature: MA Experiment 20000347 PARAMETER Experiment Name: At_2mM_SA_Sub_P Parameter: Timepoint (hr) Value: 6
  misc_feature: MA Experiment 20000347 PARAMETER Experiment Name: At_2mM_SA_Sub_P Parameter: Tissue Value: Aerial
  misc_feature: MA Experiment 20000347 PARAMETER Experiment Name: At_2mM_SA_Sub_P Parameter: Treatment Value: 2mM SA vs. No Treatment
  misc_feature: MA Experiment ID: 20000355 Result: Down-regulated in Transcription
  misc_feature: MA Experiment 20000355 PARAMETER Experiment Name: At_Siliques_Sub_P Parameter: Age (day) Value: 21
  misc_feature: MA Experiment 20000355 PARAMETER Experiment Name: At_Siliques_Sub_P Parameter: Organism Value: A. thaliana
  misc_feature: MA Experiment 20000355 PARAMETER Experiment Name: At_Siliques_Sub_P Parameter: Plant Line Value: WS
  misc_feature: MA Experiment 20000355 PARAMETER Experiment Name: At_Siliques_Sub_P Parameter: Tissue Value: Less Than 5mm Siliques vs. Whole Plant
  misc_feature: MA Experiment ID: 20000440 Result: Down-regulated in Transcription
  misc_feature: MA Experiment 20000440 PARAMETER Experiment Name: At_Closed-Flower__Sub_P Parameter: Tissue Value: Closed Flower vs. Whole Plant
acaaaaccttacattgctttccatttaaaactctcttcttcttttttgttctctctctctcttcatggaagctcaacaccttcatgccaagcctcatgctgaaggagaatggtccacaggcttctgtgattgcttttctgactgcaaaaattgttgtatcacattctggtgtccatgtatcacctttggccaagtcgccgagattgtagatcgaggatccacatcgtgtggtactgctggagctctatacgcgttgatagccgtagtaactggttgtgcatgtatatactcatgtttctatcgtggaaagatgagagctcaatataatattaaaggagatgattgtactgattgccttaaacatttctgctgtgagctttgttctttgacccaacaataccgtgaactcaagcaccgcggttacgatatgagtcttggatgggcggggaacgtggagagacaacagaatcaaggaggtgtggccatgggtgctccggtcttccaaggcggcatgacccgctaagaattatttctttatgtaattcatttgtcttttatatgtagtaataaaacgaggtttaatcctctgtttgtgttgttaatatgcttgttgtgatttgaacaaaaaaaaatgcttgttgtgaaagtttagacatacagtatatgaatgtttcttcattgt

SEQ ID NO: 77948 - protein, 152 aa, Arabidopsis thaliana; identical to SEQ ID NO: 27254
  peptide (1)..(152): Ceres Seq. ID no. 12581183
  misc_feature (12)..(116): Pfam Name: Protein of unknown function, DUF614 Pfam Description: Protein of unknown function, DUF614
  misc_feature (1)..(152): Homolog of NCBI NO: 15223920 NR Description: unknown protein; protein id: At1g14870.1, by cDNA: gi_18252924 [Arabidopsis thaliana] F10B6.27 [Arabidopsis thaliana] >gi|18252925|gb|AAL62389.1|
  misc_feature (1)..(152): Homolog of NCBI NO: 15223921 NR Description: unknown protein; protein id: At1g14880.1 thaliana] >gi|8778224|gb|AAF79233.1|AC006917_18 F10B6.29 thaliana] >gi|26452733|dbj|BAC43448.1| unknown protein
  misc_feature (54)..(152): Homolog of NCBI NO: 22327352 NR Description: unknown protein; protein id: At5g35525.1
  misc_feature (1)..(33): Homolog of NCBI NO: 22327352 NR Description: unknown protein; protein id: At5g35525.1
  misc_feature (8)..(147): Homolog of NCBI NO: 34897268 NR Description: unknown protein [Oryza sativa (japonica
  misc_feature (10)..(137): Homolog of NCBI NO: 34897274 NR Description: hypothetical protein [Oryza sativa (japonica group)] >gi|28372695|gb|AAO39879.1| hypothetical protein [Oryza
  misc_feature (10)..(132): Homolog of NCBI NO: 34897270 NR Description: hypothetical protein [Oryza sativa (japonica group)] >gi|28372688|gb|AAO39872.1| hypothetical protein [Oryza
  misc_feature (15)..(152): Homolog of NCBI NO: 15221456 NR Description: hypothetical protein; protein id: At1g68610.1
  misc_feature (1)..(152): Homolog of NCBI NO: 8272626 NR Description: ORFX [Lycopersicon esculentum] fw2.2 [Lycopersicon esculentum] >gi|27413997|gb|AAO12186.1| fw2.2 esculentum] >gi|27413999|gb|AAO12187.1| fw2.2 [Lycopersicon
  misc_feature (1)..(152): Homolog of NCBI NO: 27414005 NR Description: fw2.2 [Lycopersicon pimpinellifolium] fw2.2 [Lycopersicon pimpinellifolium] >gi|27414009|gb|AAO12192.1| [Lycopersicon pimpinellifolium] >gi|27414011|gb|AAO12193.1| fw2.2

SEQ ID NO: 77949 - DNA, 1773 bp, Arabidopsis thaliana
  misc_feature (1)..(1773): Ceres Seq. ID no. 12581184
  misc_feature: MA Experiment ID: 20000169 Result: Up-regulated in Transcription
  misc_feature: MA Experiment 20000169 PARAMETER Experiment Name: At_100uM_ABA_P Parameter: Age (day) Value: 14
  misc_feature: MA Experiment 20000169 PARAMETER Experiment Name: At_100uM_ABA_P Parameter: Organism Value: A. thaliana
  misc_feature: MA Experiment 20000169 PARAMETER Experiment Name: At_100uM_ABA_P Parameter: Plant Line Value: WS
  misc_feature: MA Experiment 20000169 PARAMETER Experiment Name: At_100uM_ABA_P Parameter: Timepoint (hr) Value: 6
  misc_feature: MA Experiment 20000169 PARAMETER Experiment Name: At_100uM_ABA_P Parameter: Tissue Value: Aerial
  misc_feature: MA Experiment 20000169 PARAMETER Experiment Name: At_100uM_ABA_P Parameter: Treatment Value: 100uM ABA vs. No Treatment
  misc_feature: MA Experiment ID: 20000173 Result: Down-regulated in Transcription
  misc_feature: MA Experiment 20000173 PARAMETER Experiment Name: At_42deg_Heat_P Parameter: Age (day) Value: 14
  misc_feature: MA Experiment 20000173 PARAMETER Experiment Name: At_42deg_Heat_P Parameter: Organism Value: A. thaliana
  misc_feature: MA Experiment 20000173 PARAMETER Experiment Name: At_42deg_Heat_P Parameter: Plant Line Value: WS
  misc_feature: MA Experiment 20000173 PARAMETER Experiment Name: At_42deg_Heat_P Parameter: Temperature (deg C) Value: 42 vs. 22
  misc_feature: MA Experiment 20000173 PARAMETER Experiment Name: At_42deg_Heat_P Parameter: Timepoint (hr) Value: 6
  misc_feature: MA Experiment 20000173 PARAMETER Experiment Name: At_42deg_Heat_P Parameter: Tissue Value: Aerial
  misc_feature: MA Experiment ID: 20000179 Result: Up-regulated in Transcription
  misc_feature: MA Experiment 20000179 PARAMETER Experiment Name: At_Germinating_Seeds_P Parameter: Age (hr) Value: 6 vs. 0
  misc_feature: MA Experiment 20000179 PARAMETER Experiment Name: At_Germinating_Seeds_P Parameter: Tissue Value: Germinating Seeds
  misc_feature: MA Experiment ID: 20000180 Result: Up-regulated in Transcription
  misc_feature: MA Experiment 20000180 PARAMETER Experiment Name: At_Germinating_Seeds_P Parameter: Age (hr) Value: 24 vs. 0
  misc_feature: MA Experiment 20000180 PARAMETER Experiment Name: At_Germinating_Seeds_P Parameter: Tissue Value: Germinating Seeds
  misc_feature: MA Experiment ID: 20000185 Result: Up-regulated in Transcription
  misc_feature: MA Experiment 20000185 PARAMETER Experiment Name: At_Roots__P Parameter: Age (day) Value: 7 vs. 21
  misc_feature: MA Experiment 20000185 PARAMETER Experiment Name: At_Roots__P Parameter: Organism Value: A. thaliana
  misc_feature: MA Experiment 20000185 PARAMETER Experiment Name: At_Roots__P Parameter: Tissue Value: Roots vs. Whole Plant
  misc_feature: MA Experiment ID: 20000264 Result: Up-regulated in Transcription
  misc_feature: MA Experiment 20000264 PARAMETER Experiment Name: At_Open_Flower_P Parameter: Age (day) Value: 21
  misc_feature: MA Experiment 20000264 PARAMETER Experiment Name: At_Open_Flower_P Parameter: Plant Line Value: WS
  misc_feature: MA Experiment 20000264 PARAMETER Experiment Name: At_Open_Flower_P Parameter: Tissue Value: Open Flower vs. Whole Plant
  misc_feature: MA Experiment ID: 20000265 Result: Up-regulated in Transcription
  misc_feature: MA Experiment 20000265 PARAMETER Experiment Name: At_Open_Flower_P Parameter: Age (day) Value: 21
  misc_feature: MA Experiment 20000265 PARAMETER Experiment Name: At_Open_Flower_P Parameter: Plant Line Value: WS
  misc_feature: MA Experiment 20000265 PARAMETER Experiment Name: At_Open_Flower_P Parameter: Tissue Value: Closed Flower vs. Whole Plant
  misc_feature: MA Experiment ID: 20000286 Result: Up-regulated in Transcription
  misc_feature: MA Experiment 20000286 PARAMETER Experiment Name: At_Open_Flower_P Parameter: Age (day) Value: 21
  misc_feature: MA Experiment 20000286 PARAMETER Experiment Name: At_Open_Flower_P Parameter: Plant Line Value: WS
  misc_feature: MA Experiment 20000286 PARAMETER Experiment Name: At_Open_Flower_P Parameter: Tissue Value: Half Open vs. Whole Plant
  misc_feature: MA Experiment ID: 20000439 Result: Up-regulated in Transcription
  misc_feature: MA Experiment 20000439 PARAMETER Experiment Name: At_Roots__P Parameter: Age (day) Value: 14 vs. 21
  misc_feature: MA Experiment 20000439 PARAMETER Experiment Name: At_Roots__P Parameter: Organism Value: A. thaliana
  misc_feature: MA Experiment 20000439 PARAMETER Experiment Name: At_Roots__P Parameter: Tissue Value: Roots vs. Whole Plant
  misc_feature: MA Experiment ID: 20000794 Result: Up-regulated in Transcription
  misc_feature: MA Experiment 20000794 PARAMETER Experiment Name: At_Petals_P Parameter: Age (day) Value: 23-25 days
  misc_feature: MA Experiment 20000794 PARAMETER Experiment Name: At_Petals_P Parameter: Plant Line Value: WS
  misc_feature: MA Experiment 20000794 PARAMETER Experiment Name: At_Petals_P Parameter: Tissue Value: Petals vs. Whole plant
  misc_feature: MA Experiment ID: 20001557 Result: Down-regulated in Transcription
  misc_feature: MA Experiment 20001557 PARAMETER Experiment Name: At_Drought_Soil_Dry_P Parameter: Age (day) Value: 27
  misc_feature: MA Experiment 20001557 PARAMETER Experiment Name: At_Drought_Soil_Dry_P Parameter: Organism Value: A. thaliana
  misc_feature: MA Experiment 20001557 PARAMETER Experiment Name: At_Drought_Soil_Dry_P Parameter: Plant Line Value: WS
  misc_feature: MA Experiment 20001557 PARAMETER Experiment Name: At_Drought_Soil_Dry_P Parameter: Post Timepoint (hr) Value: 3
  misc_feature: MA Experiment 20001557 PARAMETER Experiment Name: At_Drought_Soil_Dry_P Parameter: Post-Treatment Value: Re-Water vs. No Drought
  misc_feature: MA Experiment 20001557 PARAMETER Experiment Name: At_Drought_Soil_Dry_P Parameter: Timepoint (day) Value: 13
  misc_feature: MA Experiment 20001557 PARAMETER Experiment Name: At_Drought_Soil_Dry_P Parameter: Treatment Value: Drought vs. No Drought
  misc_feature: MA Experiment ID: 20001558 Result: Down-regulated in Transcription
  misc_feature: MA Experiment 20001558 PARAMETER Experiment Name: At_Drought_Soil_Dry_P Parameter: Age (day) Value: 27
  misc_feature: MA Experiment 20001558 PARAMETER Experiment Name: At_Drought_Soil_Dry_P Parameter: Organism Value: A. thaliana
  misc_feature: MA Experiment 20001558 PARAMETER Experiment Name: At_Drought_Soil_Dry_P Parameter: Plant Line Value: WS
  misc_feature: MA Experiment 20001558 PARAMETER Experiment Name: At_Drought_Soil_Dry_P Parameter: Post Timepoint (hr) Value: 6
  misc_feature: MA Experiment 20001558 PARAMETER Experiment Name: At_Drought_Soil_Dry_P Parameter: Post-Treatment Value: Re-Water vs. No Drought
  misc_feature: MA Experiment 20001558 PARAMETER Experiment Name: At_Drought_Soil_Dry_P Parameter: Timepoint (day) Value: 13
  misc_feature: MA Experiment 20001558 PARAMETER Experiment Name: At_Drought_Soil_Dry_P Parameter: Treatment Value: Drought vs. No Drought
  misc_feature: MA Experiment ID: 20001905 Result: Up-regulated in Transcription
  misc_feature: MA Experiment 20001905 PARAMETER Experiment Name: At_Drought_Reproduction_P Parameter: Age (day) Value: 40
  misc_feature: MA Experiment 20001905 PARAMETER Experiment Name: At_Drought_Reproduction_P Parameter: Organism Value: A. thaliana
  misc_feature: MA Experiment 20001905 PARAMETER Experiment Name: At_Drought_Reproduction_P Parameter: Plant Line Value: WS
  misc_feature: MA Experiment 20001905 PARAMETER Experiment Name: At_Drought_Reproduction_P Parameter: Timepoint (day) Value: 10
  misc_feature: MA Experiment 20001905 PARAMETER Experiment Name: At_Drought_Reproduction_P Parameter: Tissue Value: Rosettes
  misc_feature: MA Experiment 20001905 PARAMETER Experiment Name: At_Drought_Reproduction_P Parameter: Treatment Value: Drought vs. No Drought
  misc_feature: MA Experiment ID: 20001911 Result: Down-regulated in Transcription
  misc_feature: MA Experiment 20001911 PARAMETER Experiment Name: At_Drought_Reproduction_P Parameter: Age (day) Value: 40
  misc_feature: MA Experiment 20001911 PARAMETER Experiment Name: At_Drought_Reproduction_P Parameter: Organism Value: A. thaliana
  misc_feature: MA Experiment 20001911 PARAMETER Experiment Name: At_Drought_Reproduction_P Parameter: Plant Line Value: WS
  misc_feature: MA Experiment 20001911 PARAMETER Experiment Name: At_Drought_Reproduction_P Parameter: Timepoint (day) Value: 10
  misc_feature: MA Experiment 20001911 PARAMETER Experiment Name: At_Drought_Reproduction_P Parameter: Tissue Value: Flowers
  misc_feature: MA Experiment 20001911 PARAMETER Experiment Name: At_Drought_Reproduction_P Parameter: Treatment Value: Drought vs. No Drought
acgagcaacgtcaatatctacgaaaagaatatttattttcttgaattcaagaaaaattctcgggatccgaactcaatatttgttctcttctcttctctctctctttgcccgtgattactgattactgtgttaattatttttattctgcgtacgttacgtaagagagatattgaggaatggctgcgaagaaggtttttggatcggcggaagcgagtaatttggtgacggagcttcgtcggagttttgatgatggtgtgacacgtggttatgaatggagagtgactcagcttaagaaactgatgattatttgtgataatcatgagcctgagatcgtcgcggctcttcgcgatgatcttggtaagcctgagcttgaatcttctgtttatgaggtatctctactgagaaactctatcaagttggctcttaagcagctaaagaactggatggctccggagaaggcaaagacttctctaacaacgtttcctgcatccgcggagattgtgtctgagcctcttggtgttgtgctagtgatctcggcttggaactatccttttctgttgtctattgatcctgttattggtgcaatttctgctgggaatgctgttgttttaaagccatcagaattggctccagcttcgtcagctctgctcactaagttactggaacagtatcttgatccttctgcggtgcgagttgtcgaaggagctgttaccgaaacaagtgctctgctagagcagaagtgggacaagatattctacacaggtagttcaaaaatcggacgtgtcataatggcggcagctgcgaagcatctcacaccggttgttctagagcttggaggaaaatctcctgtcgttgtagactcggataccgatttgaaagttaccgtcaggcggataatcgtaggcaaatggggttgtaacaacggacaggcgtgcgtttcgccggactatatcttgacgacaaaagaatatgctcctaaattgattgatgccatgaagcttgaattggagaaattttatgggaagaaccctatagagtcgaaagatatgtcacgtatcgtaaactcgaatcactttgatcgcttgtctaagttgttagacgagaaggaagtttctgacaaaattgtctatggtggtgaaaaggacagagaaaacttgaaaattgctccgacaatcttgctcgatgtaccattagattctctgatcatgagtgaagaaatatttggccctctccttccaatcctcacgcttaacaacttggaagagagctttgacgtgattcgttctcgacctaagccacttgcggcatacttgtttacacataacaagaagttgaaagagagattcgcagcgacagtctccgctggaggcatagtagtcaatgacatagctgttcatcttgcacttcacacattgccattcggaggagttggtgaaagtggaatgggtgcttaccatggtaaattctcatttgatgcttttagtcacaagaaggcggttctctacagaagccttttcggtgattcagccgtcaggtatccgccatactcgagaggaaagcttagattgttaaaagcccttgtcgacagcaatatattcgatttattcaaagtccttctcggtttagcttaaacggtaaaaagaccgaggacacttccctttgtaccttatttacttgttttatttttcaaacatggacttagttggttgatatgttttggtttggtgttgattctatgaatattgaagttgataaataaaagattttcggttg

SEQ ID NO: 77950 - protein, 484 aa, Arabidopsis thaliana
  peptide (1)..(484): Ceres Seq. ID no. 12581185
  misc_feature (1)..(445): Pfam Name: Aldehyde dehydrogenase family Pfam Description: Aldehyde dehydrogenase family
  misc_feature (1)..(484): Homolog of NCBI NO: 15219358 NR Description: aldehyde dehydrogenase, putative; protein id: supported by cDNA: 1141., supported by cDNA: gi_18175878
  misc_feature (1)..(484): Homolog of NCBI NO: 21536879 NR Description: aldehyde dehydrogenase, putative [Arabidopsis
  misc_feature (11)..(482): Homolog of NCBI NO: 17065918 NR Description: aldehyde dehydrogenase [Craterostigma
  misc_feature (1)..(484): Homolog of NCBI NO: 18418408 NR Description: putative aldehyde dehydrogenase; protein id: supported by cDNA: gi_15451105, supported by cDNA: gi_20148406 thaliana] >gi|15451106|gb|AAK96824.1| putative aldehyde
  misc_feature (1)..(484): Homolog of NCBI NO: 17065876 NR Description: aldehyde dehydrogenase [Arabidopsis thaliana]
  misc_feature (8)..(483): Homolog of NCBI NO: 33317836 NR Description: aldehyde dehydrogenase [Oryza sativa (indica group)] >gi|38344982|emb|CAE02788.2| OSJNBa0011L07.12 [Oryza
  misc_feature (10)..(469): Homolog of NCBI NO: 23126018 NR Description: hypothetical protein [Nostoc punctiforme]
  misc_feature (1)..(483): Homolog of NCBI NO: 4973431 NR Description: putative aldehyde dehydrogenase OS-ALDH [Oryza
  misc_feature (18)..(228): Homolog of NCBI NO: 15234364 NR Description: aldehyde dehydrogenase like protein; protein id: [Arabidopsis thaliana] >gi|7431493|pir||T04594 aldehyde
  misc_feature (331)..(483): Homolog of NCBI NO: 15234364 NR Description: aldehyde dehydrogenase like protein; protein id: [Arabidopsis thaliana] >gi|7431493|pir||T04594 aldehyde
MAAKKVFGSAEASNLVTELRRSFDDGVTRGYEWRVTQLKKLMIICDNHEPEIVAALRDDLGKPELESSVYEVSLLRNSIKLALKQLKNWMAPEKAKTSLTTFPASAEIVSEPLGVVLVISAWNYPFLLSIDPVIGAISAGNAVVLKPSELAPASSALLTKLLEQYLDPSAVRVVEGAVTETSALLEQKWDKIFYTGSSKIGRVIMAAAAKHLTPVVLELGGKSPVVVDSDTDLKVTVRRIIVGKWGCNNGQACVSPDYILTTKEYAPKLIDAMKLELEKFYGKNPIESKDMSRIVNSNHFDRLSKLLDEKEVSDKIVYGGEKDRENLKIAPTILLDVPLDSLIMSEEIFGPLLPILTLNNLEESFDVIRSRPKPLAAYLFTHNKKLKERFAATVSAGGIVVNDIAVHLALHTLPFGGVGESGMGAYHGKFSFDAFSHKKAVLYRSLFGDSAVRYPPYSRGKLRLLKALVDSNIFDLFKVLLGLA

SEQ ID NO: 77951 - protein, 443 aa, Arabidopsis thaliana
  peptide (1)..(443): Ceres Seq. ID no. 12581186
  misc_feature (1)..(404): Pfam Name: Aldehyde dehydrogenase family Pfam Description: Aldehyde dehydrogenase family
  misc_feature (1)..(443): Homolog of NCBI NO: 15219358 NR Description: aldehyde dehydrogenase, putative; protein id: supported by cDNA: 1141., supported by cDNA: gi_18175878
  misc_feature (1)..(443): Homolog of NCBI NO: 21536879 NR Description: aldehyde dehydrogenase, putative [Arabidopsis
  misc_feature (1)..(441): Homolog of NCBI NO: 17065918 NR Description: aldehyde dehydrogenase [Craterostigma
  misc_feature (1)..(443): Homolog of NCBI NO: 18418408 NR Description: putative aldehyde dehydrogenase; protein id: supported by cDNA: gi_15451105, supported by cDNA: gi_20148406 thaliana] >gi|15451106|gb|AAK96824.1| putative aldehyde
  misc_feature (1)..(443): Homolog of NCBI NO: 17065876 NR Description: aldehyde dehydrogenase [Arabidopsis thaliana]
  misc_feature (1)..(442): Homolog of NCBI NO: 33317836 NR Description: aldehyde dehydrogenase [Oryza sativa (indica group)] >gi|38344982|emb|CAE02788.2| OSJNBa0011L07.12 [Oryza
  misc_feature (1)..(428): Homolog of NCBI NO: 23126018 NR Description: hypothetical protein [Nostoc punctiforme]
  misc_feature (1)..(442): Homolog of NCBI NO: 4973431 NR Description: putative aldehyde dehydrogenase OS-ALDH [Oryza
  misc_feature (1)..(187): Homolog of NCBI NO: 15234364 NR Description: aldehyde dehydrogenase like protein; protein id: [Arabidopsis thaliana] >gi|7431493|pir||T04594 aldehyde
  misc_feature (290)..(442): Homolog of NCBI NO: 15234364 NR Description: aldehyde dehydrogenase like protein; protein id: [Arabidopsis thaliana] >gi|7431493|pir||T04594 aldehyde
MIICDNHEPEIVAALRDDLGKPELESSVYEVSLLRNSIKLALKQLKNWMAPEKAKTSLTTFPASAEIVSEPLGVVLVISAWNYPFLLSIDPVIGAISAGNAVVLKPSELAPASSALLTKLLEQYLDPSAVRVVEGAVTETSALLEQKWDKIFYTGSSKIGRVIMAAAAKHLTPVVLELGGKSPVVVDSDTDLKVTVRRIIVGKWGCNNGQACVSPDYILTTKEYAPKLIDAMKLELEKFYGKNPIESKDMSRIVNSNHFDRLSKLLDEKEVSDKIVYGGEKDRENLKIAPTILLDVPLDSLIMSEEIFGPLLPILTLNNLEESFDVIRSRPKPLAAYLFTHNKKLKERFAATVSAGGIVVNDIAVHLALHTLPFGGVGESGMGAYHGKFSFDAFSHKKAVLYRSLFGDSAVRYPPYSRGKLRLLKALVDSNIFDLFKVLLGLA

SEQ ID NO: 77952 - protein, 395 aa, Arabidopsis thaliana; identical to SEQ ID NO: 74729
  peptide (1)..(395): Ceres Seq. ID no. 12581187
  misc_feature (1)..(356): Pfam Name: Aldehyde dehydrogenase family Pfam Description: Aldehyde dehydrogenase family
  misc_feature (1)..(395): Homolog of NCBI NO: 15219358 NR Description: aldehyde dehydrogenase, putative; protein id: supported by cDNA: 1141., supported by cDNA: gi_18175878
  misc_feature (1)..(395): Homolog of NCBI NO: 21536879 NR Description: aldehyde dehydrogenase, putative [Arabidopsis
  misc_feature (1)..(393): Homolog of NCBI NO: 17065918 NR Description: aldehyde dehydrogenase [Craterostigma
  misc_feature (1)..(395): Homolog of NCBI NO: 18418408 NR Description: putative aldehyde dehydrogenase; protein id: supported by cDNA: gi_15451105, supported by cDNA: gi_20148406 thaliana] >gi|15451106|gb|AAK96824.1| putative aldehyde
  misc_feature (1)..(395): Homolog of NCBI NO: 17065876 NR Description: aldehyde dehydrogenase [Arabidopsis thaliana]
  misc_feature (1)..(394): Homolog of NCBI NO: 33317836 NR Description: aldehyde dehydrogenase [Oryza sativa (indica group)] >gi|38344982|emb|CAE02788.2| OSJNBa0011L07.12 [Oryza
  misc_feature (1)..(380): Homolog of NCBI NO: 23126018 NR Description: hypothetical protein [Nostoc punctiforme]
  misc_feature (1)..(394): Homolog of NCBI NO: 4973431 NR Description: putative aldehyde dehydrogenase OS-ALDH [Oryza
  misc_feature (1)..(139): Homolog of NCBI NO: 15234364 NR Description: aldehyde dehydrogenase like protein; protein id: [Arabidopsis thaliana] >gi|7431493|pir||T04594 aldehyde
  misc_feature (242)..(394): Homolog of NCBI NO: 15234364 NR Description: aldehyde dehydrogenase like protein; protein id: [Arabidopsis thaliana] >gi|7431493|pir||T04594 aldehyde

SEQ ID NO: 77953 - DNA, 1839 bp, Arabidopsis thaliana
  misc_feature (1)..(1839): Ceres Seq. ID no. 12581193
  misc_feature: MA Experiment ID: 108434 Result: Down-regulated in Transcription
  misc_feature: MA Experiment 108434 PARAMETER Experiment Name: At_Root_Tips_cDNA_P Parameter: Tissue Value: Root Tips
  misc_feature: MA Experiment ID: 108488 Result: Down-regulated in Transcription
  misc_feature: MA Experiment ID: 108561 Result: Up-regulated in Transcription
  misc_feature: MA Experiment 108561 PARAMETER Experiment Name: At_100uM_ABA_cDNA_P Parameter: Timepoint (hr) Value: 6
  misc_feature: MA Experiment 108561 PARAMETER Experiment Name: At_100uM_ABA_cDNA_P Parameter: Tissue Value: Aerial
  misc_feature: MA Experiment 108561 PARAMETER Experiment Name: At_100uM_ABA_cDNA_P Parameter: Treatment Value: 100uM ABA vs. No Treatment
  misc_feature: MA Experiment ID: 108569 Result: Up-regulated in Transcription
  misc_feature: MA Experiment 108569 PARAMETER Experiment Name: At_0.001%_MeJA__cDNA_P Parameter: Timepoint (hr) Value: 6
  misc_feature: MA Experiment 108569 PARAMETER Experiment Name: At_0.001%_MeJA__cDNA_P Parameter: Tissue Value: Aerial
  misc_feature: MA Experiment 108569 PARAMETER Experiment Name: At_0.001%_MeJA__cDNA_P Parameter: Treatment Value: 0.001% MeJA vs. No Treatment
  misc_feature: MA Experiment ID: 108572 Result: Up-regulated in Transcription
  misc_feature: MA Experiment 108572 PARAMETER Experiment Name: At_Drought_cDNA_P Parameter: Timepoint (hr) Value: 1
  misc_feature: MA Experiment 108572 PARAMETER Experiment Name: At_Drought_cDNA_P Parameter: Tissue Value: Aerial
  misc_feature: MA Experiment 108572 PARAMETER Experiment Name: At_Drought_cDNA_P Parameter: Treatment Value: Drought vs. No Drought
  misc_feature: MA Experiment ID: 108573 Result: Up-regulated in Transcription
  misc_feature: MA Experiment 108573 PARAMETER Experiment Name: At_Drought_cDNA_P Parameter: Timepoint (hr) Value: 6
  misc_feature: MA Experiment 108573 PARAMETER Experiment Name: At_Drought_cDNA_P Parameter: Tissue Value: Aerial
  misc_feature: MA Experiment 108573 PARAMETER Experiment Name: At_Drought_cDNA_P Parameter: Treatment Value: Drought vs. No Drought
  misc_feature: MA Experiment ID: 108585 Result: Up-regulated in Transcription
  misc_feature: MA Experiment 108585 PARAMETER Experiment Name: At_5mM_NaNP_cDNA_P Parameter: Timepoint (hr) Value: 6
  misc_feature: MA Experiment 108585 PARAMETER Experiment Name: At_5mM_NaNP_cDNA_P Parameter: Tissue Value: Aerial
  misc_feature: MA Experiment 108585 PARAMETER Experiment Name: At_5mM_NaNP_cDNA_P Parameter: Treatment Value: null
  misc_feature: MA Experiment ID: 108595 Result: Down-regulated in Transcription
  misc_feature: MA Experiment 108595 PARAMETER Experiment Name: At_Ler-pi_Ovule_cDNA_P Parameter: Plant Line Value: null
  misc_feature: MA Experiment ID: 108605 Result: Up-regulated in Transcription
  misc_feature: MA Experiment 108605 PARAMETER Experiment Name: At_100uM_ABA_cDNA_P Parameter: Timepoint (hr) Value: 6
  misc_feature: MA Experiment 108605 PARAMETER Experiment Name: At_100uM_ABA_cDNA_P Parameter: Tissue Value: Aerial
  misc_feature: MA Experiment 108605 PARAMETER Experiment Name: At_100uM_ABA_cDNA_P Parameter: Treatment Value: 100uM ABA vs. No Treatment
  misc_feature: MA Experiment ID: 108607 Result: Up-regulated in Transcription
  misc_feature: MA Experiment 108607 PARAMETER Experiment Name: At_100uM_ABA_cDNA_P Parameter: Timepoint (hr) Value: 4
  misc_feature: MA Experiment 108607 PARAMETER Experiment Name: At_100uM_ABA_cDNA_P Parameter: Tissue Value: Aerial
  misc_feature: MA Experiment 108607 PARAMETER Experiment Name: At_100uM_ABA_cDNA_P Parameter: Treatment Value: 100uM ABA vs. No Treatment
  misc_feature: MA Experiment ID: 20000070 Result: Up-regulated in Transcription
  misc_feature: MA Experiment 20000070 PARAMETER Experiment Name: At_100uM_ABA_Mutants_cDNA_P Parameter: Plant Line Value: CS24
  misc_feature: MA Experiment 20000070 PARAMETER Experiment Name: At_100uM_ABA_Mutants_cDNA_P Parameter: Timepoint (hr) Value: 6
  misc_feature: MA Experiment 20000070 PARAMETER Experiment Name: At_100uM_ABA_Mutants_cDNA_P Parameter: Tissue Value: Aerial
  misc_feature: MA Experiment 20000070 PARAMETER Experiment Name: At_100uM_ABA_Mutants_cDNA_P Parameter: Treatment Value: 100uM ABA vs. No Treatment
  misc_feature: MA Experiment ID: 20000071 Result: Up-regulated in Transcription
  misc_feature: MA Experiment 20000071 PARAMETER Experiment Name: At_100uM_ABA_Mutants_cDNA_P Parameter: Plant Line Value: CS8104
  misc_feature: MA Experiment 20000071 PARAMETER Experiment Name: At_100uM_ABA_Mutants_cDNA_P Parameter: Timepoint (hr) Value: 6
  misc_feature: MA Experiment 20000071 PARAMETER Experiment Name: At_100uM_ABA_Mutants_cDNA_P Parameter: Tissue Value: Aerial
  misc_feature: MA Experiment 20000071 PARAMETER Experiment Name: At_100uM_ABA_Mutants_cDNA_P Parameter: Treatment Value: 100uM ABA vs. No Treatment
  misc_feature: MA Experiment ID: 20000072 Result: Up-regulated in Transcription
  misc_feature: MA Experiment 20000072 PARAMETER Experiment Name: At_100uM_ABA_Mutants_cDNA_P Parameter: Plant Line Value: CS8105
  misc_feature: MA Experiment 20000072 PARAMETER Experiment Name: At_100uM_ABA_Mutants_cDNA_P Parameter: Timepoint (hr) Value: 6
  misc_feature: MA Experiment 20000072 PARAMETER Experiment Name: At_100uM_ABA_Mutants_cDNA_P Parameter: Tissue Value: Aerial
  misc_feature: MA Experiment 20000072 PARAMETER Experiment Name: At_100uM_ABA_Mutants_cDNA_P Parameter: Treatment Value: 100uM ABA vs. No Treatment
  misc_feature: MA Experiment ID: 20000086 Result: Up-regulated in Transcription
  misc_feature: MA Experiment 20000086 PARAMETER Experiment Name: At_100uM_ABA_Mutants_cDNA_P Parameter: Plant Line Value: CS22
  misc_feature: MA Experiment 20000086 PARAMETER Experiment Name: At_100uM_ABA_Mutants_cDNA_P Parameter: Timepoint (hr) Value: 6
  misc_feature: MA Experiment 20000086 PARAMETER Experiment Name: At_100uM_ABA_Mutants_cDNA_P Parameter: Tissue Value: Aerial
  misc_feature: MA Experiment 20000086 PARAMETER Experiment Name: At_100uM_ABA_Mutants_cDNA_P Parameter: Treatment Value: 100uM ABA vs. No Treatment
  misc_feature: MA Experiment ID: 20000088 Result: Up-regulated in Transcription
  misc_feature: MA Experiment 20000088 PARAMETER Experiment Name: At_100uM_ABA_Mutants_cDNA_P Parameter: Plant Line Value: Landsberg
  misc_feature: MA Experiment 20000088 PARAMETER Experiment Name: At_100uM_ABA_Mutants_cDNA_P Parameter: Timepoint (hr) Value: 6
  misc_feature: MA Experiment 20000088 PARAMETER Experiment Name: At_100uM_ABA_Mutants_cDNA_P Parameter: Tissue Value: Aerial
  misc_feature: MA Experiment 20000088 PARAMETER Experiment Name: At_100uM_ABA_Mutants_cDNA_P Parameter: Treatment Value: 100uM ABA vs. No Treatment
  misc_feature: MA Experiment ID: 20000117 Result: Up-regulated in Transcription
  misc_feature: MA Experiment 20000117 PARAMETER Experiment Name: At_100uM_ABA_Mutants_cDNA_P Parameter: Plant Line Value: Columbia
  misc_feature: MA Experiment 20000117 PARAMETER Experiment Name: At_100uM_ABA_Mutants_cDNA_P Parameter: Timepoint (hr) Value: 6
  misc_feature: MA Experiment 20000117 PARAMETER Experiment Name: At_100uM_ABA_Mutants_cDNA_P Parameter: Tissue Value: Aerial
  misc_feature: MA Experiment 20000117 PARAMETER Experiment Name: At_100uM_ABA_Mutants_cDNA_P Parameter: Treatment Value: 100uM ABA vs. No Treatment
  misc_feature: MA Experiment ID: 20000169 Result: Up-regulated in Transcription
  misc_feature: MA Experiment 20000169 PARAMETER Experiment Name: At_100uM_ABA_P Parameter: Age (day) Value: 14
  misc_feature: MA Experiment 20000169 PARAMETER Experiment Name: At_100uM_ABA_P Parameter: Organism Value: A. thaliana
  misc_feature: MA Experiment 20000169 PARAMETER Experiment Name: At_100uM_ABA_P Parameter: Plant Line Value: WS
  misc_feature: MA Experiment 20000169 PARAMETER Experiment Name: At_100uM_ABA_P Parameter: Timepoint (hr) Value: 6
  misc_feature: MA Experiment 20000169 PARAMETER Experiment Name: At_100uM_ABA_P Parameter: Tissue Value: Aerial
  misc_feature: MA Experiment 20000169 PARAMETER Experiment Name: At_100uM_ABA_P Parameter: Treatment Value: 100uM ABA vs. No Treatment
  misc_feature: MA Experiment ID: 20000184 Result: Down-regulated in Transcription
  misc_feature: MA Experiment 20000184 PARAMETER Experiment Name: At_Shoots__P Parameter: Age (day) Value: 7
  misc_feature: MA Experiment 20000184 PARAMETER Experiment Name: At_Shoots__P Parameter: Tissue Value: Shoots vs. Whole Plant
  misc_feature: MA Experiment ID: 20000185 Result: Down-regulated in Transcription
  misc_feature: MA Experiment 20000185 PARAMETER Experiment Name: At_Roots__P Parameter: Age (day) Value: 7 vs. 21
  misc_feature: MA Experiment 20000185 PARAMETER Experiment Name: At_Roots__P Parameter: Organism Value: A. thaliana
  misc_feature: MA Experiment 20000185 PARAMETER Experiment Name: At_Roots__P Parameter: Tissue Value: Roots vs. Whole Plant
  misc_feature: MA Experiment ID: 20000234 Result: Down-regulated in Transcription
  misc_feature: MA Experiment 20000234 PARAMETER Experiment Name: At_Siliques_P Parameter: Age (day) Value: 21
  misc_feature: MA Experiment 20000234 PARAMETER Experiment Name: At_Siliques_P Parameter: Organism Value: A. thaliana
  misc_feature: MA Experiment 20000234 PARAMETER Experiment Name: At_Siliques_P Parameter: Plant Line Value: WS
  misc_feature: MA Experiment 20000234 PARAMETER Experiment Name: At_Siliques_P Parameter: Tissue Value: Less Than 5mm Siliques vs. Whole Plant
  misc_feature: MA Experiment ID: 20000235 Result: Down-regulated in Transcription
  misc_feature: MA Experiment 20000235 PARAMETER Experiment Name: At_Siliques_P Parameter: Age (day) Value: 21
  misc_feature: MA Experiment 20000235 PARAMETER Experiment Name: At_Siliques_P Parameter: Organism Value: A. thaliana
  misc_feature: MA Experiment 20000235 PARAMETER Experiment Name: At_Siliques_P Parameter: Plant Line Value: WS
  misc_feature: MA Experiment 20000235 PARAMETER Experiment Name: At_Siliques_P Parameter: Tissue Value: 5-10mm Siliques vs. Whole Plant
  misc_feature: MA Experiment ID: 20000265 Result: Down-regulated in Transcription
  misc_feature: MA Experiment 20000265 PARAMETER Experiment Name: At_Open_Flower_P Parameter: Age (day) Value: 21
  misc_feature: MA Experiment 20000265 PARAMETER Experiment Name: At_Open_Flower_P Parameter: Plant Line Value: WS
  misc_feature: MA Experiment 20000265 PARAMETER Experiment Name: At_Open_Flower_P Parameter: Tissue Value: Closed Flower vs. Whole Plant
  misc_feature: MA Experiment ID: 20000436 Result: Up-regulated in Transcription
  misc_feature: MA Experiment 20000436 PARAMETER Experiment Name: At_Drought_P Parameter: Age (day) Value: 7
  misc_feature: MA Experiment 20000436 PARAMETER Experiment Name: At_Drought_P Parameter: Organism Value: A. thaliana
  misc_feature: MA Experiment 20000436 PARAMETER Experiment Name: At_Drought_P Parameter: Plant Line Value: WS
  misc_feature: MA Experiment 20000436 PARAMETER Experiment Name: At_Drought_P Parameter: Timepoint (hr) Value: 12
  misc_feature: MA Experiment 20000436 PARAMETER Experiment Name: At_Drought_P Parameter: Tissue Value: Whole Plant
  misc_feature: MA Experiment 20000436 PARAMETER Experiment Name: At_Drought_P Parameter: Treatment Value: Drought vs. No Drought
  misc_feature: MA Experiment ID: 20000437 Result: Up-regulated in Transcription
  misc_feature: MA Experiment 20000437 PARAMETER Experiment Name: At_Drought_P Parameter: Age (day) Value: 8
  misc_feature: MA Experiment 20000437 PARAMETER Experiment Name: At_Drought_P Parameter: Organism Value: A. thaliana
  misc_feature: MA Experiment 20000437 PARAMETER Experiment Name: At_Drought_P Parameter: Plant Line Value: WS
  misc_feature: MA Experiment 20000437 PARAMETER Experiment Name: At_Drought_P Parameter: Timepoint (hr) Value: 24
  misc_feature: MA Experiment 20000437 PARAMETER Experiment Name: At_Drought_P Parameter: Tissue Value: Whole Plant
  misc_feature: MA Experiment 20000437 PARAMETER Experiment Name: At_Drought_P Parameter: Treatment Value: Drought vs. No Drought
  misc_feature: MA Experiment ID: 20000438 Result: Down-regulated in Transcription
  misc_feature: MA Experiment 20000438 PARAMETER Experiment Name: At_Shoots__P Parameter: Age (day) Value: 14
  misc_feature: MA Experiment 20000438 PARAMETER Experiment Name: At_Shoots__P Parameter: Tissue Value: Shoots vs. Whole Plant
  misc_feature: MA Experiment ID: 20000439 Result: Down-regulated in Transcription
  misc_feature: MA Experiment 20000439 PARAMETER Experiment Name: At_Roots__P Parameter: Age (day) Value: 14 vs. 21
  misc_feature: MA Experiment 20000439 PARAMETER Experiment Name: At_Roots__P Parameter: Organism Value: A. thaliana
  misc_feature: MA Experiment 20000439 PARAMETER Experiment Name: At_Roots__P Parameter: Tissue Value: Roots vs. Whole Plant
  misc_feature: MA Experiment ID: 20000453 Result: Up-regulated in Transcription
  misc_feature: MA Experiment 20000453 PARAMETER Experiment Name: At_100uM_ABA_P Parameter: Age (day) Value: 15
  misc_feature: MA Experiment 20000453 PARAMETER Experiment Name: At_100uM_ABA_P Parameter: Organism Value: A. thaliana
  misc_feature: MA Experiment 20000453 PARAMETER Experiment Name: At_100uM_ABA_P Parameter: Plant Line Value: WS
  misc_feature: MA Experiment 20000453 PARAMETER Experiment Name: At_100uM_ABA_P Parameter: Timepoint (hr) Value: 24
  misc_feature: MA Experiment 20000453 PARAMETER Experiment Name: At_100uM_ABA_P Parameter: Tissue Value: Aerial
  misc_feature: MA Experiment 20000453 PARAMETER Experiment Name: At_100uM_ABA_P Parameter: Treatment Value: 100uM ABA vs. No Treatment
  misc_feature: MA Experiment ID: 20000794 Result: Up-regulated in Transcription
  misc_feature: MA Experiment 20000794 PARAMETER Experiment Name: At_Petals_P Parameter: Age (day) Value: 23-25 days
  misc_feature: MA Experiment 20000794 PARAMETER Experiment Name: At_Petals_P Parameter: Plant Line Value: WS
  misc_feature: MA Experiment 20000794 PARAMETER Experiment Name: At_Petals_P Parameter: Tissue Value: Petals vs. Whole plant
  misc_feature: MA Experiment ID: 20001450 Result: Up-regulated in Transcription
  misc_feature: MA Experiment 20001450 PARAMETER Experiment Name: At_Far-red-induction_P Parameter: Age (day) Value: 7
  misc_feature: MA Experiment 20001450 PARAMETER Experiment Name: At_Far-red-induction_P Parameter: Light Value: Far-red vs. White
  misc_feature: MA Experiment 20001450 PARAMETER Experiment Name: At_Far-red-induction_P Parameter: Organism Value: A. thaliana
  misc_feature: MA Experiment 20001450 PARAMETER Experiment Name: At_Far-red-induction_P Parameter: Plant Line Value: Columbia
  misc_feature: MA Experiment 20001450 PARAMETER Experiment Name: At_Far-red-induction_P Parameter: Timepoint (hr) Value: 8
  misc_feature: MA Experiment 20001450 PARAMETER Experiment Name: At_Far-red-induction_P Parameter: Tissue Value: Whole Plant
  misc_feature: MA Experiment ID: 20001558 Result: Down-regulated in Transcription
  misc_feature: MA Experiment 20001558 PARAMETER Experiment Name: At_Drought_Soil_Dry_P Parameter: Age (day) Value: 27
  misc_feature: MA Experiment 20001558 PARAMETER Experiment Name: At_Drought_Soil_Dry_P Parameter: Organism Value: A. thaliana
  misc_feature: MA Experiment 20001558 PARAMETER Experiment Name: At_Drought_Soil_Dry_P Parameter: Plant Line Value: WS
  misc_feature: MA Experiment 20001558 PARAMETER Experiment Name: At_Drought_Soil_Dry_P Parameter: Post Timepoint (hr) Value: 6
  misc_feature: MA Experiment 20001558 PARAMETER Experiment Name: At_Drought_Soil_Dry_P Parameter: Post-Treatment Value: Re-Water vs. No Drought
  misc_feature: MA Experiment 20001558 PARAMETER Experiment Name: At_Drought_Soil_Dry_P Parameter: Timepoint (day) Value: 13
  misc_feature: MA Experiment 20001558 PARAMETER Experiment Name: At_Drought_Soil_Dry_P Parameter: Treatment Value: Drought vs. No Drought
  misc_feature: MA Experiment ID: 20001560 Result: Down-regulated in Transcription
  misc_feature: MA Experiment 20001560 PARAMETER Experiment Name: At_Drought_Soil_Dry_P Parameter: Age (day) Value: 28
  misc_feature: MA Experiment 20001560 PARAMETER Experiment Name: At_Drought_Soil_Dry_P Parameter: Organism Value: A. thaliana
  misc_feature: MA Experiment 20001560 PARAMETER Experiment Name: At_Drought_Soil_Dry_P Parameter: Plant Line Value: WS
  misc_feature: MA Experiment 20001560 PARAMETER Experiment Name: At_Drought_Soil_Dry_P Parameter: Post Timepoint (hr) Value: None
  misc_feature: MA Experiment 20001560 PARAMETER Experiment Name: At_Drought_Soil_Dry_P Parameter: Post-Treatment Value: None
  misc_feature: MA Experiment 20001560 PARAMETER Experiment Name: At_Drought_Soil_Dry_P Parameter: Timepoint (day) Value: 14
  misc_feature: MA Experiment 20001560 PARAMETER Experiment Name: At_Drought_Soil_Dry_P Parameter: Treatment Value: Drought vs. No Drought
  misc_feature: MA Experiment ID: 20001757 Result: Down-regulated in Transcription
  misc_feature: MA Experiment 20001757 PARAMETER Experiment Name: At_50mM_NH4NO3_L-to-H_P Parameter: Timepoint (hr) Value: 6
  misc_feature: MA Experiment 20001757 PARAMETER Experiment Name: At_50mM_NH4NO3_L-to-H_P Parameter: Tissue Value: Leaf
  misc_feature: MA Experiment 20001757 PARAMETER Experiment Name: At_50mM_NH4NO3_L-to-H_P Parameter: Treatment Value: 50mM NH4NO3 vs 100mM Mannitol
  misc_feature: MA Experiment ID: 20001911 Result: Up-regulated in Transcription
  misc_feature: MA Experiment 20001911 PARAMETER Experiment Name: At_Drought_Reproduction_P Parameter: Age (day) Value: 40
  misc_feature: MA Experiment 20001911 PARAMETER Experiment Name: At_Drought_Reproduction_P Parameter: Organism Value: A. thaliana
  misc_feature: MA Experiment 20001911 PARAMETER Experiment Name: At_Drought_Reproduction_P Parameter: Plant Line Value: WS
  misc_feature: MA Experiment 20001911 PARAMETER Experiment Name: At_Drought_Reproduction_P Parameter: Timepoint (day) Value: 10
  misc_feature: MA Experiment 20001911 PARAMETER Experiment Name: At_Drought_Reproduction_P Parameter: Tissue Value: Flowers
  misc_feature: MA Experiment 20001911 PARAMETER Experiment Name: At_Drought_Reproduction_P Parameter: Treatment Value: Drought vs. No Drought
atttcttcttcacctttagatttttcctcgcttaatttctcaataacgctctcagagagaccatttgatgaagcttctcgcttctggaatttgaaaaggatttgataagacgagttcatagaagattaccgcaagttcatcaactttttgaacttgttatggagataatctcactgaacgttgtgccccagtgctctgtggttacttggagtagtaaattagcaacgaaaagattggtcccaaatcggtcaagtttgttattctcaggggtcaaaaaatccagacttgtgattcgaagtggaaattccgatggttatgttgttggtgagaatgatgacttgggtcgtatagccagaagaggagaatcaacgtcaaaggttttgattcctggtttgcctgatgaatcaaatggtgaaattgctgctcgaatcagtcattctcactgcgagtggaagcccaagcttagagtacattatgagaaagccggttgtgacaatctcgatgctcctgcggtgttgtttcttcctggctttggcgttggttcatttcactatgagaagcagcttaccgatttgggaagggattatcgagtatgggctattgattttcttggacagggtttatctctccctactgaagatcctactaccatgactgaagaaaccagttcctcggaagataaggaaccattttggggatttggtgacaaaactgaaccgtgggctgatcaacttgtattctctctggatctctggagggatcaagttcagtattttgtagaagaggttatcggtgagcctgtgtacattgcagggaactcacttggagggtatgtagctctctactttgcagcaacccatcctcacctggttaagggtgttaccttgcttaatgcaacacctttctggggtttcttccctaatccagtaagatccccaaagctagcacgtctctttccatggcccggagcattccctctgccggaaagagtgaaaaaaatcacagaattggtgtggcaaaagataagtgatcctgaaagcatagctgagatacttaaacaggtctacacagaccattctatcaatgtggataaagtattctcacgtattgtggaggtcacacagcatccggctgctgcagcatcgtttgcttcaatcatgcttgctcctggtggagagctatctttctccgaagctttatctaggtgtaaggaaaacaatgttcagatatgtctcatgtatggaagagaagatccatgggtgagaccgttatggggaaagaagataaagaaggaaatccccaacgctccatactacgagatcagcccagcgggtcactgcccacacgatgaagtccctgaggtggtgaactatctgatgcgcgggtggatcaagcacctggagtctggtggttttgaagcgctcccgcttttggaggacactgaagaagattgggaggagtccaggattggtagagaaattgagttcccgagagatggttggaaaaaagcagtgaatctgtggttatatgggtcaaactatacgtactggagaggagttagagaatctttcagatccagttttataagggtgtttggagggaagtctgcatagaagaagcatggaacagtcgtctagtgtaaattaattgtaatctatgttgcatccgatgctagctatataatgttgtctgtagaatcaagtttctaaaatgttcaaaaggaaaagttagaaaaatatctacttgatagttagtcacctaaatcgaaggaactcctttcttgcattgttgtatataatccacaggttcagattaatataggaaggcgacattgcaggc

SEQ ID NO: 77954 - protein, 484 aa, Arabidopsis thaliana
  peptide (1)..(484): Ceres Seq. ID no. 12581194
  misc_feature (143)..(409): Pfam Name: alpha/beta hydrolase fold Pfam Description: alpha/beta hydrolase fold
  misc_feature (1)..(484): Homolog of NCBI NO: 15240707 NR Description: putative protein; protein id: At5g13800.1, by cDNA: gi_15912216, supported by cDNA: gi_17979480 [Arabidopsis >gi|10177646|dbj|BAB11108.1| gene_id:MAC12.25~pir||S77419~similar
  misc_feature (174)..(414): Homolog of NCBI NO: 37521904 NR Description: hypothetical protein gll2335 [Gloeobacter
  misc_feature (103)..(154): Homolog of NCBI NO: 37521904 NR Description: hypothetical protein gll2335 [Gloeobacter
  misc_feature (180)..(411): Homolog of NCBI NO: 23040754 NR Description: hypothetical protein [Trichodesmium erythraeum
  misc_feature (94)..(156): Homolog of NCBI NO: 23040754 NR Description: hypothetical protein [Trichodesmium erythraeum
  misc_feature (180)..(411): Homolog of NCBI NO: 16330114 NR Description: unknown protein [Synechocystis sp. PCC 6803]
  misc_feature (94)..(156): Homolog of NCBI NO: 16330114 NR Description: unknown protein [Synechocystis sp. PCC 6803]
  misc_feature (180)..(411): Homolog of NCBI NO: 23126297 NR Description: hypothetical protein [Nostoc punctiforme]
  misc_feature (91)..(156): Homolog of NCBI NO: 23126297 NR Description: hypothetical protein [Nostoc punctiforme]
  misc_feature (180)..(411): Homolog of NCBI NO: 17229548 NR Description: hypothetical protein [Nostoc sp. PCC 7120]
MEIISLNVVPQCSVVTWSSKLATKRLVPNRSSLLFSGVKKSRLVIRSGNSDGYVVGENDDLGRIARRGESTSKVLIPGLPDESNGEIAARISHSHCEWKPKLRVHYEKAGCDNLDAPAVLFLPGFGVGSFHYEKQLTDLGRDYRVWAIDFLGQGLSLPTEDPTTMTEETSSSEDKEPFWGFGDKTEPWADQLVFSLDLWRDQVQYFVEEVIGEPVYIAGNSLGGYVALYFAATHPHLVKGVTLLNATPFWGFFPNPVRSPKLARLFPWPGAFPLPERVKKITELVWQKISDPESIAEILKQVYTDHSINVDKVFSRIVEVTQHPAAAASFASIMLAPGGELSFSEALSRCKENNVQICLMYGREDPWVRPLWGKKIKKEIPNAPYYEISPAGHCPHDEVPEVVNYLMRGWIKHLESGGFEALPLLEDTEEDWEESRIGREIEFPRDGWKKAVNLWLYGSNYTYWRGVRESFRSSFIRVFGGKSA

SEQ ID NO: 77955 - protein, 320 aa, Arabidopsis thaliana
  peptide (1)..(320): Ceres Seq. ID no. 12581195
  misc_feature (1)..(245): Pfam Name: alpha/beta hydrolase fold Pfam Description: alpha/beta hydrolase fold
  misc_feature (1)..(320): Homolog of NCBI NO: 15240707 NR Description: putative protein; protein id: At5g13800.1, by cDNA: gi_15912216, supported by cDNA: gi_17979480 [Arabidopsis >gi|10177646|dbj|BAB11108.1| gene_id:MAC12.25~pir||S77419~similar
  misc_feature (10)..(250): Homolog of NCBI NO: 37521904 NR Description: hypothetical protein gll2335 [Gloeobacter
  misc_feature (16)..(247): Homolog of NCBI NO: 23040754 NR Description: hypothetical protein [Trichodesmium erythraeum
  misc_feature (16)..(247): Homolog of NCBI NO: 16330114 NR Description: unknown protein [Synechocystis sp. PCC 6803]
  misc_feature (16)..(247): Homolog of NCBI NO: 23126297 NR Description: hypothetical protein [Nostoc punctiforme]
  misc_feature (16)..(247): Homolog of NCBI NO: 17229548 NR Description: hypothetical protein [Nostoc sp. PCC 7120]
  misc_feature (16)..(264): Homolog of NCBI NO: 15234433 NR Description: putative protein; protein id: At4g36530.1, by cDNA: 36845. [Arabidopsis thaliana] >gi|25407735|pir||C85431
  misc_feature (16)..(264): Homolog of NCBI NO: 30690680 NR Description: hydrolase, alpha/beta fold family [Arabidopsis >gi|13877561|gb|AAK43858.1|AF370481_1 Unknown protein thaliana] >gi|30984538|gb|AAP42732.1| At4g36530 [Arabidopsis
  misc_feature (15)..(251): Homolog of NCBI NO: 37523246 NR Description: hypothetical protein gll3677 [Gloeobacter
  misc_feature (16)..(250): Homolog of NCBI NO: 33864695 NR Description: conserved hypothetical protein [Synechococcus sp.
MTEETSSSEDKEPFWGFGDKTEPWADQLVFSLDLWRDQVQYFVEEVIGEPVYIAGNSLGGYVALYFAATHPHLVKGVTLLNATPFWGFFPNPVRSPKLARLFPWPGAFPLPERVKKITELVWQKISDPESIAEILKQVYTDHSINVDKVFSRIVEVTQHPAAAASFASIMLAPGGELSFSEALSRCKENNVQICLMYGREDPWVRPLWGKKIKKEIPNAPYYEISPAGHCPHDEVPEVVNYLMRGWIKHLESGGFEALPLLEDTEEDWEESRIGREIEFPRDGWKKAVNLWLYGSNYTYWRGVRESFRSSFIRVFGGKSA

SEQ ID NO: 77956 - DNA, 1644 bp, Arabidopsis thaliana
  misc_feature (1)..(1644): Ceres Seq. ID no. 12581204
  misc_feature: MA Experiment ID: 108434 Result: Up-regulated in Transcription
  misc_feature: MA Experiment 108434 PARAMETER Experiment Name: At_Root_Tips_cDNA_P Parameter: Tissue Value: Root Tips
  misc_feature: MA Experiment ID: 108462 Result: Down-regulated in Transcription
  misc_feature: MA Experiment 108462 PARAMETER Experiment Name: At_Germinating_Seeds_cDNA_P Parameter: Age (day) Value: 2 vs. 0
  misc_feature: MA Experiment 108462 PARAMETER Experiment Name: At_Germinating_Seeds_cDNA_P Parameter: Tissue Value: Germinating Seeds
  misc_feature: MA Experiment ID: 108463 Result: Down-regulated in Transcription
  misc_feature: MA Experiment 108463 PARAMETER Experiment Name: At_Germinating_Seeds_cDNA_P Parameter: Age (day) Value: 3 vs. 0
  misc_feature: MA Experiment 108463 PARAMETER Experiment Name: At_Germinating_Seeds_cDNA_P Parameter: Tissue Value: Germinating Seeds
  misc_feature: MA Experiment ID: 108464 Result: Down-regulated in Transcription
  misc_feature: MA Experiment 108464 PARAMETER Experiment Name: At_Germinating_Seeds_cDNA_P Parameter: Age (day) Value: 4 vs. 0
  misc_feature: MA Experiment 108464 PARAMETER Experiment Name: At_Germinating_Seeds_cDNA_P Parameter: Tissue Value: Germinating Seeds
  misc_feature: MA Experiment ID: 20000224 Result: Up-regulated in Transcription
  misc_feature: MA Experiment ID: 20000227 Result: Up-regulated in Transcription
  misc_feature: MA Experiment 20000227 PARAMETER Experiment Name: At_Root-Tips-vs-Tops_P Parameter: Tissue Value: Root Tips vs. Root Tops
  misc_feature: MA Experiment ID: 20000451 Result: Down-regulated in Transcription
  misc_feature: MA Experiment 20000451 PARAMETER Experiment Name: At_CS6879_Shoots-Roots_P Parameter: Age (day) Value: 14
  misc_feature: MA Experiment 20000451 PARAMETER Experiment Name: At_CS6879_Shoots-Roots_P Parameter: Organism Value: A. thaliana
  misc_feature: MA Experiment 20000451 PARAMETER Experiment Name: At_CS6879_Shoots-Roots_P Parameter: Plant Line Value: CS6879 vs. WS
  misc_feature: MA Experiment 20000451 PARAMETER Experiment Name: At_CS6879_Shoots-Roots_P Parameter: Tissue Value: Roots
  misc_feature: MA Experiment ID: 20000452 Result: Down-regulated in Transcription
  misc_feature: MA Experiment 20000452 PARAMETER Experiment Name: At_CS6879_Shoots-Roots_P Parameter: Age (day) Value: 14
  misc_feature: MA Experiment 20000452 PARAMETER Experiment Name: At_CS6879_Shoots-Roots_P Parameter: Organism Value: A. thaliana
  misc_feature: MA Experiment 20000452 PARAMETER Experiment Name: At_CS6879_Shoots-Roots_P Parameter: Plant Line Value: CS6879 vs. WS
  misc_feature: MA Experiment 20000452 PARAMETER Experiment Name: At_CS6879_Shoots-Roots_P Parameter: Tissue Value: Shoots
  misc_feature: MA Experiment ID: 20000573 Result: Down-regulated in Transcription
  misc_feature: MA Experiment 20000573 PARAMETER Experiment Name: At_100uM_ABA_Mutants__P Parameter: Organism Value: A. thaliana
  misc_feature: MA Experiment 20000573 PARAMETER Experiment Name: At_100uM_ABA_Mutants__P Parameter: Plant Line Value: CS22 vs. Ler wt
  misc_feature: MA Experiment 20000573 PARAMETER Experiment Name: At_100uM_ABA_Mutants__P Parameter: Timepoint (hr) Value: N/A
  misc_feature: MA Experiment 20000573 PARAMETER Experiment Name: At_100uM_ABA_Mutants__P Parameter: Tissue Value: Whole Plant
  misc_feature: MA Experiment 20000573 PARAMETER Experiment Name: At_100uM_ABA_Mutants__P Parameter: Treatment Value: None
  misc_feature: MA Experiment ID: 20000574 Result: Down-regulated in Transcription
  misc_feature: MA Experiment 20000574 PARAMETER Experiment Name: At_100uM_ABA_Mutants__P Parameter: Organism Value: A. thaliana
  misc_feature: MA Experiment 20000574 PARAMETER Experiment Name: At_100uM_ABA_Mutants__P Parameter: Plant Line Value: CS23 vs. Ler wt
  misc_feature: MA Experiment 20000574 PARAMETER Experiment Name: At_100uM_ABA_Mutants__P Parameter: Timepoint (hr) Value: N/A
  misc_feature: MA Experiment 20000574 PARAMETER Experiment Name: At_100uM_ABA_Mutants__P Parameter: Tissue Value: Whole Plant
  misc_feature: MA Experiment 20000574 PARAMETER Experiment Name: At_100uM_ABA_Mutants__P Parameter: Treatment Value: None
  misc_feature: MA Experiment ID: 20001557 Result: Up-regulated in Transcription
  misc_feature: MA Experiment 20001557 PARAMETER Experiment Name: At_Drought_Soil_Dry_P Parameter: Age (day) Value: 27
  misc_feature: MA Experiment 20001557 PARAMETER Experiment Name: At_Drought_Soil_Dry_P Parameter: Organism Value: A. thaliana
  misc_feature: MA Experiment 20001557 PARAMETER Experiment Name: At_Drought_Soil_Dry_P Parameter: Plant Line Value: WS
  misc_feature: MA Experiment 20001557 PARAMETER Experiment Name: At_Drought_Soil_Dry_P Parameter: Post Timepoint (hr) Value: 3
  misc_feature: MA Experiment 20001557 PARAMETER Experiment Name: At_Drought_Soil_Dry_P Parameter: Post-Treatment Value: Re-Water vs. No Drought
  misc_feature: MA Experiment 20001557 PARAMETER Experiment Name: At_Drought_Soil_Dry_P Parameter: Timepoint (day) Value: 13
  misc_feature: MA Experiment 20001557 PARAMETER Experiment Name: At_Drought_Soil_Dry_P Parameter: Treatment Value: Drought vs. No Drought
  misc_feature: MA Experiment ID: 20001558 Result: Up-regulated in Transcription
  misc_feature: MA Experiment 20001558 PARAMETER Experiment Name: At_Drought_Soil_Dry_P Parameter: Age (day) Value: 27
  misc_feature: MA Experiment 20001558 PARAMETER Experiment Name: At_Drought_Soil_Dry_P Parameter: Organism Value: A. thaliana
  misc_feature: MA Experiment 20001558 PARAMETER Experiment Name: At_Drought_Soil_Dry_P Parameter: Plant Line Value: WS
  misc_feature: MA Experiment 20001558 PARAMETER Experiment Name: At_Drought_Soil_Dry_P Parameter: Post Timepoint (hr) Value: 6
  misc_feature: MA Experiment 20001558 PARAMETER Experiment Name: At_Drought_Soil_Dry_P Parameter: Post-Treatment Value: Re-Water vs. No Drought
  misc_feature: MA Experiment 20001558 PARAMETER Experiment Name: At_Drought_Soil_Dry_P Parameter: Timepoint (day) Value: 13
  misc_feature: MA Experiment 20001558 PARAMETER Experiment Name: At_Drought_Soil_Dry_P Parameter: Treatment Value: Drought vs. No Drought
ctcgcgttatctccttttgtcgatttagccctaacctatacggctgctacatccagatttcctcatcctctattagggaagaagaaccaaaaccctaatcctatcttctcctcttataaatcgcttcaacaacagtttctttctcttctgatttgatccatgatttctcatctggaaccctagtttatacatccatcgggtgttactgttctttatctgggcaatcagtggttagtcaaaagtataggattttcatttaaagatttgattttgcgttgaaatcgaacgaacccagatttcatattttgtctctgttttggctttttttatctttttaggtgtttttgttccttttgtatatctgtcgagacttctaggtgtgaaatcaaagcttgtttggtttatatcgatcttggttttagctgaatcgttgttaagatggctggaggtggaaacaggagagatgaaggatcgatcacgatccagagcactaatttgtttgcagcattggacactcgtaagaagaagaagaagtctgacaaggcagggaagagcaaagggtcttctaagtcacgagagccagagaaggagcctgagcctcaggtctattgggctcctacgcctttgaaagttaagtcttgggctgatattgatgatgaagacgacgatgatgactattatgcaaccactgctcctcctcagtctggttggagtacttctctgccttcccatactgattccaaagacgttcatgttgaggaaagtgaaagtgaggaagatattcttgatgaaggtgatgatgatgtggaggaagagcaggaacaggaaacagaggtacaggttcatccagagcctgaggtgaagaaagctcctgaagttcctgcacctcctaaagaggcagagaggcaactttccaagaaagagaggaaaaagaaggaacttgctgagcttgaagctttgttggctgattttggagttgcccccaaggagaacaatggcctagaggaatctcaagaggctggacaagaaaagaaagaagatgtcaatggagagggagagaagaaggagaatgcagcaggtggggagtcaaaggcatcaaaaaagaagaaaaagaaggataagcagaaggaggtaaaagaatctcaagagcaacaagcaaacaacaatgccgatgctgtagatgaagctgctgggtctgaaccaactgaggaagaatctccaattgacgtcaaggaaaggataaagaagcttgcatccatgaagaagaagaagtcaggcaaagaggtggatgctgcagctaaagctgctgcggaggaggcagctgcaagacgtaagaagctggccgcggcaaagaagaaggagaagaatcactataaccaacagcctgtgcggtaaaatcctgaatcaccaccattttgatcttgatggaaatgcaaatatgaacatgtatttcgccgtatattgttcatatgagtctctgtcctaataaatcttttgaagggtctggttcttagagttaaagacattgaatcctttttctagtcttattacaatgaacaggctaaagacaaaactactctctggagattttcatttctttttgaaacacctttgttttcttaatatcagaccttttttaggttc

SEQ ID NO: 77957 - protein, 318 aa, Arabidopsis thaliana; identical to SEQ ID NO: 28893
  peptide (1)..(318): Ceres Seq. ID no. 12581205
  misc_feature (95)..(315): Pfam Name: Caldesmon Pfam Description: Caldesmon
  misc_feature (1)..(318): Homolog of NCBI NO: 18400901 NR Description: expressed protein; protein id: At2g25670.1, by cDNA: 12261., supported by cDNA: gi_17529065 [Arabidopsis >gi|25412339|pir||C84651 hypothetical protein At2g25670
  misc_feature (1)..(318): Homolog of NCBI NO: 21537167 NR Description: unknown [Arabidopsis thaliana]
  misc_feature (1)..(318): Homolog of NCBI NO: 17529066 NR Description: unknown protein [Arabidopsis thaliana]
  misc_feature (1)..(318): Homolog of NCBI NO: 15233865 NR Description: putative protein; protein id: At4g32610.1
  misc_feature (1)..(318): Homolog of NCBI NO: 33620414 NR Description: M355 [Lilium longiflorum]
  misc_feature (108)..(318): Homolog of NCBI NO: 34906156 NR Description: P0509B06.15 [Oryza sativa (japonica
  misc_feature (1)..(130): Homolog of NCBI NO: 34906156 NR Description: P0509B06.15 [Oryza sativa (japonica
  misc_feature (107)..(318): Homolog of NCBI NO: 7522210 NR Description: hypothetical protein pAFD103 - apple tree
  misc_feature (25)..(301): Homolog of NCBI NO: 8096269 NR Description: KED [Nicotiana tabacum]
  misc_feature (25)..(308): Homolog of NCBI NO: 23001116 NR Description: hypothetical protein [Magnetococcus sp. MC-1]

SEQ ID NO: 77958 - DNA, 974 bp, Arabidopsis thaliana
  misc_feature (1)..(974): Ceres Seq. ID no. 12581208
  misc_feature: MA Experiment ID: 108433 Result: Up-regulated in Transcription
  misc_feature: MA Experiment 108433 PARAMETER Experiment Name: At_rhl_Mutant2_cDNA_P Parameter: Age (day) Value: 7
  misc_feature: MA Experiment 108433 PARAMETER Experiment Name: At_rhl_Mutant2_cDNA_P Parameter: Organism Value: A. thaliana
  misc_feature: MA Experiment 108433 PARAMETER Experiment Name: At_rhl_Mutant2_cDNA_P Parameter: Plant Line Value: rhl Mutant vs. wt landsburg
  misc_feature: MA Experiment 108433 PARAMETER Experiment Name: At_rhl_Mutant2_cDNA_P Parameter: Tissue Value: Roots
  misc_feature: MA Experiment ID: 108434 Result: Down-regulated in Transcription
  misc_feature: MA Experiment 108434 PARAMETER Experiment Name: At_Root_Tips_cDNA_P Parameter: Tissue Value: Root Tips
  misc_feature: MA Experiment ID: 108488 Result: Down-regulated in Transcription
  misc_feature: MA Experiment ID: 108561 Result: Up-regulated in Transcription
  misc_feature: MA Experiment 108561 PARAMETER Experiment Name: At_100uM_ABA_cDNA_P Parameter: Timepoint (hr) Value: 6
  misc_feature: MA Experiment 108561 PARAMETER Experiment Name: At_100uM_ABA_cDNA_P Parameter: Tissue Value: Aerial
  misc_feature: MA Experiment 108561 PARAMETER Experiment Name: At_100uM_ABA_cDNA_P Parameter: Treatment Value: 100uM ABA vs. No Treatment
  misc_feature: MA Experiment ID: 108572 Result: Up-regulated in Transcription
  misc_feature: MA Experiment 108572 PARAMETER Experiment Name: At_Drought_cDNA_P Parameter: Timepoint (hr) Value: 1
  misc_feature: MA Experiment 108572 PARAMETER Experiment Name: At_Drought_cDNA_P Parameter: Tissue Value: Aerial
  misc_feature: MA Experiment 108572 PARAMETER Experiment Name: At_Drought_cDNA_P Parameter: Treatment Value: Drought vs. No Drought
  misc_feature: MA Experiment ID: 108605 Result: Up-regulated in Transcription
  misc_feature: MA Experiment 108605 PARAMETER Experiment Name: At_100uM_ABA_cDNA_P Parameter: Timepoint (hr) Value: 6
  misc_feature: MA Experiment 108605 PARAMETER Experiment Name: At_100uM_ABA_cDNA_P Parameter: Tissue Value: Aerial
  misc_feature: MA Experiment 108605 PARAMETER Experiment Name: At_100uM_ABA_cDNA_P Parameter: Treatment Value: 100uM ABA vs. No Treatment
  misc_feature: MA Experiment ID: 108607 Result: Up-regulated in Transcription
  misc_feature: MA Experiment 108607 PARAMETER Experiment Name: At_100uM_ABA_cDNA_P Parameter: Timepoint (hr) Value: 4
  misc_feature: MA Experiment 108607 PARAMETER Experiment Name: At_100uM_ABA_cDNA_P Parameter: Tissue Value: Aerial
  misc_feature: MA Experiment 108607 PARAMETER Experiment Name: At_100uM_ABA_cDNA_P Parameter: Treatment Value: 100uM ABA vs. No Treatment
  misc_feature: MA Experiment ID: 108668 Result: Up-regulated in Transcription
  misc_feature: MA Experiment 108668 PARAMETER Experiment Name: At_2mM_SA_cDNA_P Parameter: Plant Line Value: WS
  misc_feature: MA Experiment 108668 PARAMETER Experiment Name: At_2mM_SA_cDNA_P Parameter: Timepoint (hr) Value: 6
  misc_feature: MA Experiment 108668 PARAMETER Experiment Name: At_2mM_SA_cDNA_P Parameter: Treatment Value: 2mM SA vs. No Treatment
  misc_feature: MA Experiment ID: 20000069 Result: Up-regulated in Transcription
  misc_feature: MA Experiment 20000069 PARAMETER Experiment Name: At_100uM_ABA_Mutants_cDNA_P Parameter: Plant Line Value: CS23
  misc_feature: MA Experiment 20000069 PARAMETER Experiment Name: At_100uM_ABA_Mutants_cDNA_P Parameter: Timepoint (hr) Value: 6
  misc_feature: MA Experiment 20000069 PARAMETER Experiment Name: At_100uM_ABA_Mutants_cDNA_P Parameter: Tissue Value: Aerial
  misc_feature: MA Experiment 20000069 PARAMETER Experiment Name: At_100uM_ABA_Mutants_cDNA_P Parameter: Treatment Value: 100uM ABA vs. No Treatment
  misc_feature: MA Experiment ID: 20000169 Result: Up-regulated in Transcription
  misc_feature: MA Experiment 20000169 PARAMETER Experiment Name: At_100uM_ABA_P Parameter: Age (day) Value: 14
  misc_feature: MA Experiment 20000169 PARAMETER Experiment Name: At_100uM_ABA_P Parameter: Organism Value: A. thaliana
  misc_feature: MA Experiment 20000169 PARAMETER Experiment Name: At_100uM_ABA_P Parameter: Plant Line Value: WS
  misc_feature: MA Experiment 20000169 PARAMETER Experiment Name: At_100uM_ABA_P Parameter: Timepoint (hr) Value: 6
  misc_feature: MA Experiment 20000169 PARAMETER Experiment Name: At_100uM_ABA_P Parameter: Tissue Value: Aerial
  misc_feature: MA Experiment 20000169 PARAMETER Experiment Name: At_100uM_ABA_P Parameter: Treatment Value: 100uM ABA vs. No Treatment
  misc_feature: MA Experiment ID: 20000182 Result: Up-regulated in Transcription
  misc_feature: MA Experiment 20000182 PARAMETER Experiment Name: At_2mM_SA_P Parameter: Age (day) Value: 14
  misc_feature: MA Experiment 20000182 PARAMETER Experiment Name: At_2mM_SA_P Parameter: Organism Value: A. thaliana
  misc_feature: MA Experiment 20000182 PARAMETER Experiment Name: At_2mM_SA_P Parameter: Plant Line Value: WS
  misc_feature: MA Experiment 20000182 PARAMETER Experiment Name: At_2mM_SA_P Parameter: Timepoint (hr) Value: 6
  misc_feature: MA Experiment 20000182 PARAMETER Experiment Name: At_2mM_SA_P Parameter: Tissue Value: Aerial
  misc_feature: MA Experiment 20000182 PARAMETER Experiment Name: At_2mM_SA_P Parameter: Treatment Value: 2mM SA vs. No Treatment
  misc_feature: MA Experiment ID: 20000185 Result: Up-regulated in Transcription
  misc_feature: MA Experiment 20000185 PARAMETER Experiment Name: At_Roots__P Parameter: Age (day) Value: 7 vs. 21
  misc_feature: MA Experiment 20000185 PARAMETER Experiment Name: At_Roots__P Parameter: Organism Value: A. thaliana
  misc_feature: MA Experiment 20000185 PARAMETER Experiment Name: At_Roots__P Parameter: Tissue Value: Roots vs. Whole Plant
  misc_feature: MA Experiment ID: 20000224 Result: Down-regulated in Transcription
  misc_feature: MA Experiment ID: 20000234 Result: Down-regulated in Transcription
  misc_feature: MA Experiment 20000234 PARAMETER Experiment Name: At_Siliques_P Parameter: Age (day) Value: 21
  misc_feature: MA Experiment 20000234 PARAMETER Experiment Name: At_Siliques_P Parameter: Organism Value: A. thaliana
  misc_feature: MA Experiment 20000234 PARAMETER Experiment Name: At_Siliques_P Parameter: Plant Line Value: WS
  misc_feature: MA Experiment 20000234 PARAMETER Experiment Name: At_Siliques_P Parameter: Tissue Value: Less Than 5mm Siliques vs. Whole Plant
  misc_feature: MA Experiment ID: 20000495 Result: Down-regulated in Transcription
  misc_feature: MA Experiment 20000495 PARAMETER Experiment Name: At_Guard_Cells_P Parameter: Harvest Date Value: 8/2/2002
  misc_feature: MA Experiment 20000495 PARAMETER Experiment Name: At_Guard_Cells_P Parameter: Organism Value: A. thaliana
  misc_feature: MA Experiment 20000495 PARAMETER Experiment Name: At_Guard_Cells_P Parameter: Tissue Value: Guard Cells vs. Leaves
  misc_feature: MA Experiment ID: 20000527 Result: Down-regulated in Transcription
  misc_feature: MA Experiment 20000527 PARAMETER Experiment Name: At_10percent_PEG_P Parameter: Age (day) Value: 20
  misc_feature: MA Experiment 20000527 PARAMETER Experiment Name: At_10percent_PEG_P Parameter: Organism Value: A. thaliana
  misc_feature: MA Experiment 20000527 PARAMETER Experiment Name: At_10percent_PEG_P Parameter: Plant Line Value: WS
  misc_feature: MA Experiment 20000527 PARAMETER Experiment Name: At_10percent_PEG_P Parameter: Timepoint (day) Value: 20
  misc_feature: MA Experiment 20000527 PARAMETER Experiment Name: At_10percent_PEG_P Parameter: Tissue Value: Whole Plant
  misc_feature: MA Experiment 20000527 PARAMETER Experiment Name: At_10percent_PEG_P Parameter: Treatment Value: 10percent PEG vs. No Treatment
  misc_feature: MA Experiment ID: 20001911 Result: Down-regulated in Transcription
  misc_feature: MA Experiment 20001911 PARAMETER Experiment Name: At_Drought_Reproduction_P Parameter: Age (day) Value: 40
  misc_feature: MA Experiment 20001911 PARAMETER Experiment Name: At_Drought_Reproduction_P Parameter: Organism Value: A. thaliana
  misc_feature: MA Experiment 20001911 PARAMETER Experiment Name: At_Drought_Reproduction_P Parameter: Plant Line Value: WS
  misc_feature: MA Experiment 20001911 PARAMETER Experiment Name: At_Drought_Reproduction_P Parameter: Timepoint (day) Value: 10
  misc_feature: MA Experiment 20001911 PARAMETER Experiment Name: At_Drought_Reproduction_P Parameter: Tissue Value: Flowers
  misc_feature: MA Experiment 20001911 PARAMETER Experiment Name: At_Drought_Reproduction_P Parameter: Treatment Value: Drought vs. No Drought
acaacaacaacaacaacaacaacccaaaacccaattttgttacctcttctttcctcaatcctaaagtcaaaacaaacaaaaagcttccattttttttctttgattatcttcaatcggaatttcaggtgtgagagatgggttctgaaggaccaaaagcaataacgattcatgtgactggtttcaagaaatttcttggggtttcagagaatcctactgagaagatagctaatggtttgaaatcgtatgtggagaaacgaggtttgccttctggattgtgtcttggtagctgtagtgttcttgacactgctggggaaggtgcaaaatctaagctttatgaggttttggagtctagtgttgtctctggagataagaacaacaatggaactgttgtctggcttcatctcggggtgaatagcggagcgacaaaattcgccattgaaagacaggcagtgaacgaagctcatttccgttgtcctgatgaattgggctggcaaccgcagcggcttcccatagttgttgaagatggaggcatttcaaaggcaaaagagacttcatgctcgacggagtccattttccagttattaaagaagaaaggctttgaggttgttcaatcagacgatgctggacgttttgtatgcaactacgtgtactatcactctctaaggttcgcagagcaaaagggacacaagtctctgttcgttcacgttcctctcttctccaaaatcgatgaagatactcaaatgcagttcgtggcttcactcttggaggcaattgcagctacttgctagtgtttataagaatccactaaagccaaatattgtaagtatacaatgtatatgatccatttgtctttctatgaagctctttgtgttcttttgttggaaggtttggggatataaaaagacgattgcttttggttctcaaagatcctttgtgattgtctctgactctctgtaataaaagaagtctctctc

SEQ ID NO: 77959 - protein, 217 aa, Arabidopsis thaliana; identical to SEQ ID NO: 28687
  peptide (1)..(217): Ceres Seq. ID no. 12581209
  misc_feature (11)..(217): Pfam Name: Pyroglutamyl peptidase Pfam Description: Pyroglutamyl peptidase
  misc_feature (1)..(217): Homolog of NCBI NO: 13430708 NR Description: unknown protein [Arabidopsis thaliana]
  misc_feature (91)..(217): Homolog of NCBI NO: 8778575 NR Description: F28C11.8 [Arabidopsis thaliana]
  misc_feature (1)..(90): Homolog of NCBI NO: 8778575 NR Description: F28C11.8 [Arabidopsis thaliana]
  misc_feature (1)..(214): Homolog of NCBI NO: 38175741 NR Description: pyrrolidone carboxyl peptidase-like protein
  misc_feature (1)..(217): Homolog of NCBI NO: 18405940 NR Description: expressed protein; protein id: At1g56700.1, by cDNA: 21415. [Arabidopsis thaliana] >gi|25345286|pir||H96608
  misc_feature (1)..(215): Homolog of NCBI NO: 12039349 NR Description: putative pyrrolidone carboxyl peptidase [Oryza
  misc_feature (86)..(217): Homolog of NCBI NO: 15220753 NR Description: hypothetical protein; protein id: At1g23440.1
  misc_feature (1)..(90): Homolog of NCBI NO: 9295697 NR Description: F26F24.31 [Arabidopsis thaliana]
  misc_feature (1)..(90): Homolog of NCBI NO: 15220751 NR Description: hypothetical protein; protein id: At1g23430.1
  misc_feature (54)..(192): Homolog of NCBI NO: 14590492 NR Description: pyrrolidone-carboxylate peptidase [Pyrococcus

SEQ ID NO: 77960 - DNA, 652 bp, Arabidopsis thaliana
  misc_feature (1)..(652): Ceres Seq. ID no. 12581221
  misc_feature: MA Experiment ID: 108434 Result: Up-regulated in Transcription
  misc_feature: MA Experiment 108434 PARAMETER Experiment Name: At_Root_Tips_cDNA_P Parameter: Tissue Value: Root Tips
  misc_feature: MA Experiment ID: 108462 Result: Down-regulated in Transcription
  misc_feature: MA Experiment 108462 PARAMETER Experiment Name: At_Germinating_Seeds_cDNA_P Parameter: Age (day) Value: 2 vs. 0
  misc_feature: MA Experiment 108462 PARAMETER Experiment Name: At_Germinating_Seeds_cDNA_P Parameter: Tissue Value: Germinating Seeds
  misc_feature: MA Experiment ID: 108463 Result: Down-regulated in Transcription
  misc_feature: MA Experiment 108463 PARAMETER Experiment Name: At_Germinating_Seeds_cDNA_P Parameter: Age (day) Value: 3 vs. 0
  misc_feature: MA Experiment 108463 PARAMETER Experiment Name: At_Germinating_Seeds_cDNA_P Parameter: Tissue Value: Germinating Seeds
  misc_feature: MA Experiment ID: 108464 Result: Down-regulated in Transcription
  misc_feature: MA Experiment 108464 PARAMETER Experiment Name: At_Germinating_Seeds_cDNA_P Parameter: Age (day) Value: 4 vs. 0
  misc_feature: MA Experiment 108464 PARAMETER Experiment Name: At_Germinating_Seeds_cDNA_P Parameter: Tissue Value: Germinating Seeds
  misc_feature: MA Experiment ID: 108573 Result: Down-regulated in Transcription
  misc_feature: MA Experiment 108573 PARAMETER Experiment Name: At_Drought_cDNA_P Parameter: Timepoint (hr) Value: 6
  misc_feature: MA Experiment 108573 PARAMETER Experiment Name: At_Drought_cDNA_P Parameter: Tissue Value: Aerial
  misc_feature: MA Experiment 108573 PARAMETER Experiment Name: At_Drought_cDNA_P Parameter: Treatment Value: Drought vs. No Drought
  misc_feature: MA Experiment ID: 20001807 Result: Up-regulated in Transcription
  misc_feature: MA Experiment 20001807 PARAMETER Experiment Name: At_50mM_NH4NO3_L-to-H_Sub_P Parameter: Timepoint (hr) Value: 6
  misc_feature: MA Experiment 20001807 PARAMETER Experiment Name: At_50mM_NH4NO3_L-to-H_Sub_P Parameter: Tissue Value: Leaf
  misc_feature: MA Experiment 20001807 PARAMETER Experiment Name: At_50mM_NH4NO3_L-to-H_Sub_P Parameter: Treatment Value: 50mM NH4NO3 vs 100mM Mannitol
atggcttctctagggtttcagccaccagactcaaacagagagtgaaaatgccggcgggacacggagtgagggcgagaacaagagatctgttcgcgagaccattcaggaagaagggttatattccactctccacttacctcagaaccttcaaggtcggcgattacgtcgatgtcaaggttaatggagctatccacaagggtatgcctcataagttctaccatggtcgtactggtcgcatctggaatgtcactaagcgtgccgttggtgttgaagtcaacaaacagattgggaacagaatcataaggaagaggatacatgtgcgtgtggagcatgtgcaacagtcaaggtgtgctgaggagtttaaactcagaaagaagcagaacgatgtgcttaaggctgatgctaaagccagaggagagactatcagcaccaagagacagcctaaaggtcctaaaccgggtttcatggtcgaaggtatgacattggagactgtcactcccattccttacgatgttgtcaacgatctcaagggtggttattgagttttttccattttattatcattctctactcagaatttttgcacttgcttttttaatgatgtttttgtatcaattaagactaatttctatatggtatgaaagtgcaattc

SEQ ID NO: 77961 - protein, 179 aa, Arabidopsis thaliana
  peptide (1)..(179): Ceres Seq. ID no. 12581222
  misc_feature (17)..(115): Pfam Name: Ribosomal protein L21e Pfam Description: Ribosomal protein L21e
  misc_feature (16)..(179): Homolog of NCBI NO: 18406015 NR Description: 60S ribosomal protein L21, putative; protein id: supported by cDNA: 28545., supported by cDNA: gi_15292812, by cDNA: gi_20258868 [Arabidopsis thaliana]
  misc_feature (16)..(179): Homolog of NCBI NO: 18391042 NR Description: putative 60S ribosomal protein L21; protein id: supported by cDNA: gi_13877928, supported by cDNA: gi_16323461 thaliana] >gi|18391054|ref|NP_563849.1| putative 60S come from
  misc_feature (16)..(179): Homolog of NCBI NO: 37535194 NR Description: 60S ribosomal protein L21 [Oryza sativa (japonica group)] >gi|13489167|gb|AAK27801.1| 60S ribosomal protein L21
  misc_feature (16)..(179): Homolog of NCBI NO: 11276828 NR Description: ribosomal protein L21 [imported] - rice
  misc_feature (15)..(179): Homolog of NCBI NO: 32400808 NR Description: 60s ribosomal protein L21 [Triticum aestivum]
  misc_feature (16)..(170): Homolog of NCBI NO: 6094029 NR Description: 60S RIBOSOMAL PROTEIN L21
  misc_feature (16)..(172): Homolog of NCBI NO: 15213768 NR Description: ribosomal protein L21 [Spodoptera frugiperda]
  misc_feature (16)..(170): Homolog of NCBI NO: 6319668 NR Description: Homology to rat L21; Rpl21ap [Saccharomyces
  misc_feature (16)..(172): Homolog of NCBI NO: 20129705 NR Description: CG12775-PA [Drosophila melanogaster]
  misc_feature (16)..(170): Homolog of NCBI NO: 6325178 NR Description: Homology to rat L21; Rpl21bp [Saccharomyces
GFSRVSATRLKQRVKMPAGHGVRARTRDLFARPFRKKGYIPLSTYLRTFKVGDYVDVKVNGAIHKGMPHKFYHGRTGRIWNVTKRAVGVEVNKQIGNRIIRKRIHVRVEHVQQSRCAEEFKLRKKQNDVLKADAKARGETISTKRQPKGPKPGFMVEGMTLETVTPIPYDVVNDLKGGY

SEQ ID NO: 77962 - protein, 164 aa, Arabidopsis thaliana; identical to SEQ ID NO: 20517
  peptide (1)..(164): Ceres Seq. ID no. 12581223
  misc_feature (2)..(100): Pfam Name: Ribosomal protein L21e Pfam Description: Ribosomal protein L21e
  misc_feature (1)..(164): Homolog of NCBI NO: 18406015 NR Description: 60S ribosomal protein L21, putative; protein id: supported by cDNA: 28545., supported by cDNA: gi_15292812, by cDNA: gi_20258868 [Arabidopsis thaliana]
  misc_feature (1)..(164): Homolog of NCBI NO: 18391042 NR Description: putative 60S ribosomal protein L21; protein id: supported by cDNA: gi_13877928, supported by cDNA: gi_16323461 thaliana] >gi|18391054|ref|NP_563849.1| putative 60S come from
  misc_feature (1)..(164): Homolog of NCBI NO: 37535194 NR Description: 60S ribosomal protein L21 [Oryza sativa (japonica group)] >gi|13489167|gb|AAK27801.1| 60S ribosomal protein L21
  misc_feature (1)..(164): Homolog of NCBI NO: 11276828 NR Description: ribosomal protein L21 [imported] - rice
  misc_feature (1)..(164): Homolog of NCBI NO: 32400808 NR Description: 60s ribosomal protein L21 [Triticum aestivum]
  misc_feature (1)..(155): Homolog of NCBI NO: 6094029 NR Description: 60S RIBOSOMAL PROTEIN L21
  misc_feature (1)..(157): Homolog of NCBI NO: 15213768 NR Description: ribosomal protein L21 [Spodoptera frugiperda]
  misc_feature (1)..(155): Homolog of NCBI NO: 6319668 NR Description: Homology to rat L21; Rpl21ap [Saccharomyces
  misc_feature (1)..(157): Homolog of NCBI NO: 20129705 NR Description: CG12775-PA [Drosophila melanogaster]
  misc_feature (1)..(155): Homolog of NCBI NO: 6325178 NR Description: Homology to rat L21; Rpl21bp [Saccharomyces

SEQ ID NO: 77963 - protein, 113 aa, Arabidopsis thaliana; identical to SEQ ID NO: 20518
  peptide (1)..(113): Ceres Seq. ID no. 12581224
  misc_feature (1)..(113): Homolog of NCBI NO: 18406015 NR Description: 60S ribosomal protein L21, putative; protein id: supported by cDNA: 28545., supported by cDNA: gi_15292812, by cDNA: gi_20258868 [Arabidopsis thaliana]
  misc_feature (1)..(113): Homolog of NCBI NO: 18391042 NR Description: putative 60S ribosomal protein L21; protein id: supported by cDNA: gi_13877928, supported by cDNA: gi_16323461 thaliana] >gi|18391054|ref|NP_563849.1| putative 60S come from
  misc_feature (1)..(113): Homolog of NCBI NO: 37535194 NR Description: 60S ribosomal protein L21 [Oryza sativa (japonica group)] >gi|13489167|gb|AAK27801.1| 60S ribosomal protein L21
  misc_feature (1)..(113): Homolog of NCBI NO: 11276828 NR Description: ribosomal protein L21 [imported] - rice
  misc_feature (1)..(113): Homolog of NCBI NO: 32400808 NR Description: 60s ribosomal protein L21 [Triticum aestivum]
  misc_feature (1)..(104): Homolog of NCBI NO: 6094029 NR Description: 60S RIBOSOMAL PROTEIN L21
  misc_feature (1)..(106): Homolog of NCBI NO: 15213768 NR Description: ribosomal protein L21 [Spodoptera frugiperda]
  misc_feature (1)..(104): Homolog of NCBI NO: 6319668 NR Description: Homology to rat L21; Rpl21ap [Saccharomyces
  misc_feature (1)..(106): Homolog of NCBI NO: 20129705 NR Description: CG12775-PA [Drosophila melanogaster]
  misc_feature (1)..(104): Homolog of NCBI NO: 6325178 NR Description: Homology to rat L21; Rpl21bp [Saccharomyces

SEQ ID NO: 77964 - DNA, 1805 bp, Arabidopsis thaliana
  misc_feature (1)..(1805): Ceres Seq. ID no. 12581231
  misc_feature: MA Experiment ID: 108434 Result: Up-regulated in Transcription
  misc_feature: MA Experiment 108434 PARAMETER Experiment Name: At_Root_Tips_cDNA_P Parameter: Tissue Value: Root Tips
  misc_feature: MA Experiment ID: 108585 Result: Up-regulated in Transcription
  misc_feature: MA Experiment 108585 PARAMETER Experiment Name: At_5mM_NaNP_cDNA_P Parameter: Timepoint (hr) Value: 6
  misc_feature: MA Experiment 108585 PARAMETER Experiment Name: At_5mM_NaNP_cDNA_P Parameter: Tissue Value: Aerial
  misc_feature: MA Experiment 108585 PARAMETER Experiment Name: At_5mM_NaNP_cDNA_P Parameter: Treatment Value: null
  misc_feature: MA Experiment ID: 20000069 Result: Down-regulated in Transcription
  misc_feature: MA Experiment 20000069 PARAMETER Experiment Name: At_100uM_ABA_Mutants_cDNA_P Parameter: Plant Line Value: CS23
  misc_feature: MA Experiment 20000069 PARAMETER Experiment Name: At_100uM_ABA_Mutants_cDNA_P Parameter: Timepoint (hr) Value: 6
  misc_feature: MA Experiment 20000069 PARAMETER Experiment Name: At_100uM_ABA_Mutants_cDNA_P Parameter: Tissue Value: Aerial
  misc_feature: MA Experiment 20000069 PARAMETER Experiment Name: At_100uM_ABA_Mutants_cDNA_P Parameter: Treatment Value: 100uM ABA vs. No Treatment
  misc_feature: MA Experiment ID: 20000113 Result: Down-regulated in Transcription
  misc_feature: MA Experiment 20000113 PARAMETER Experiment Name: At_42deg_Heat_cDNA_P Parameter: Temperature (deg C) Value: 42 vs. 22
  misc_feature: MA Experiment 20000113 PARAMETER Experiment Name: At_42deg_Heat_cDNA_P Parameter: Timepoint (hr) Value: 8
  misc_feature: MA Experiment 20000113 PARAMETER Experiment Name: At_42deg_Heat_cDNA_P Parameter: Tissue Value: Aerial
  misc_feature: MA Experiment ID: 20000224 Result: Down-regulated in Transcription
gagagaaatcagcttcaagcttaagagagcttcgaaagcgaaagcgacgatttcttctccatcgtgagagcaaatctccagagccgttttctcttcttcttcttcctcctcgcgccgtctctgaaactccatcatcgtatcaatcaaattgcttcctcctccaaattgaaaaacaatggaattggattcggagaacaaattgttgaagacgggtttggttatagtggcgacacttgttatagccaaactcatcttctctttcttcacttctgattctaagaagaagcgtcttcctcctactcttaaagcttggcctccattggttggaagtcttatcaaattcttgaaaggacctattattatgcttagagaggaataccctaagcttggaagtgtgtttactgttaatcttgttcacaaaaagattacttttcttattggtcctgaagtctctgctcattttttcaaagcttctgaatctgatcttagtcagcaggaagtgtatcagttcaatgtccctacttttggtcctggagttgttttcgatgttgattattctgttcgtcaggagcagtttcggttcttcactgaggcacttagagttaacaagttgaagggttatgtggatatgatggttactgaagctgaggattacttctctaaatggggagagagtggtgaagttgatattaaggttgagctagagaggctcatcatcttgactgcaagtagatgtttactgggtcgagaagttcgtgatcagctttttgatgatgtctctgctttgttccatgaccttgacaatggaatgcttcccatcagtgttctcttcccatatctcccaattccagctcaccgccgtcgtgaccgtgcccgagaaaagctttcggagattttcgcaaaaatcattgggtcgagaaaacgctctggaaaaacagagaacgacatgctgcagtgtttcatcgaatcaaagtacaaagatggtagacagacaaccgaatctgaagtcactggtttgctcattgctgctctgtttgcaggacaacacacgagctctatcacttccacctggaccggtgcttatctgatgcgatacaaagagtacttctcagctgctcttgatgagcagaagaacctgattgcgaaacatggagacaagatcgatcatgatatcttatccgagatggatgttctctaccgctgcattaaggaagcgttgaggcttcaccctccactcatcatgttaatgagagcctcgcacagtgatttcagcgtgacagctcgggatggaaaaacttacgatatcccaaagggtcacatcgttgcaacctcccctgcatttgccaaccgcttaccgcacatcttcaaagaccccgacacctacgacccagaaagattctcccctggaagagaagaggacaaagccgcaggggcattctcgtacattgcattcggagggggaaggcacgggtgccttggagagccgtttgcttacctgcagatcaaagccatatggagtcatttgttgaggaacttcgagcttgagctagtttcaccgttccctgagattgactggaacgctatggtggttggagttaaaggcaatgtgatggtgcgttacaagaggcgccagctttcttaaagacaagtttaaggttattgcagctttggatttttctctctggtttctgctttgcttttgtccctctctggttttagttttgttgttgaataattcttctgtttttataaactgttgttactctttaattgacatttatttttaagcttcctaagtttgttgg

SEQ ID NO: 77965 - protein, 488 aa, Arabidopsis thaliana; identical to SEQ ID NO: 39837
  peptide (1)..(488): Ceres Seq. ID no. 12581232
  misc_feature (1)..(488): Homolog of NCBI NO: 15221075 NR Description: putative obtusifoliol 14-alpha demethylase; id: At1g11680.1, supported by cDNA: 110306., supported by cDNA: supported by cDNA: gi_15292852, supported by cDNA:
  misc_feature (1)..(488): Homolog of NCBI NO: 18000074 NR Description: obtusifoliol-14-demethylase [Nicotiana tabacum]
  misc_feature (1)..(488): Homolog of NCBI NO: 27461067 NR Description: obtusifoliol-14-demethylase [Nicotiana tabacum]
  misc_feature (6)..(487): Homolog of NCBI NO: 27542762 NR Description: cytochrome P450-like protein [Sorghum bicolor]
  misc_feature (6)..(487): Homolog of NCBI NO: 5921924 NR Description: Cytochrome P450 51 (CYPL1) (P450-L1A1)
  misc_feature (38)..(487): Homolog of NCBI NO: 6166036 NR Description: Cytochrome P450 51 (CYPL1) (P450-L1A1)
  misc_feature (65)..(487): Homolog of NCBI NO: 4586676 NR Description: sterol 14-demethylase [Oryza sativa (japonica
  misc_feature (9)..(488): Homolog of NCBI NO: 15227817 NR Description: putative obtusifoliol 14-alpha demethylase; id: At2g17330.1 [Arabidopsis thaliana] >gi|25282617|pir||H84550
  misc_feature (179)..(487): Homolog of NCBI NO: 7489685 NR Description: probable obtusifoliol 14-alpha-demethylase CYP51
  misc_feature (1)..(485): Homolog of NCBI NO: 6978751 NR Description: cytochrome P450, subfamily 51; Cytochrom P450

SEQ ID NO: 77966 - protein, 426 aa, Arabidopsis thaliana; identical to SEQ ID NO: 39838
  peptide (1)..(426): Ceres Seq. ID no. 12581233
  misc_feature (1)..(426): Homolog of NCBI NO: 15221075 NR Description: putative obtusifoliol 14-alpha demethylase; id: At1g11680.1, supported by cDNA: 110306., supported by cDNA: supported by cDNA: gi_15292852, supported by cDNA:
  misc_feature (1)..(426): Homolog of NCBI NO: 18000074 NR Description: obtusifoliol-14-demethylase [Nicotiana tabacum]
  misc_feature (1)..(426): Homolog of NCBI NO: 27461067 NR Description: obtusifoliol-14-demethylase [Nicotiana tabacum]
  misc_feature (1)..(425): Homolog of NCBI NO: 27542762 NR Description: cytochrome P450-like protein [Sorghum bicolor]
  misc_feature (1)..(425): Homolog of NCBI NO: 5921924 NR Description: Cytochrome P450 51 (CYPL1) (P450-L1A1)
  misc_feature (1)..(425): Homolog of NCBI NO: 6166036 NR Description: Cytochrome P450 51 (CYPL1) (P450-L1A1)
  misc_feature (3)..(425): Homolog of NCBI NO: 4586676 NR Description: sterol 14-demethylase [Oryza sativa (japonica
  misc_feature (1)..(426): Homolog of NCBI NO: 15227817 NR Description: putative obtusifoliol 14-alpha demethylase; id: At2g17330.1 [Arabidopsis thaliana] >gi|25282617|pir||H84550
  misc_feature (117)..(425): Homolog of NCBI NO: 7489685 NR Description: probable obtusifoliol 14-alpha-demethylase CYP51
  misc_feature (1)..(423): Homolog of NCBI NO: 6978751 NR Description: cytochrome P450, subfamily 51; Cytochrom P450

SEQ ID NO: 77967 - protein, 337 aa, Arabidopsis thaliana; identical to SEQ ID NO: 39839
  peptide (1)..(337): Ceres Seq. ID no. 12581234
  misc_feature (1)..(337): Homolog of NCBI NO: 15221075 NR Description: putative obtusifoliol 14-alpha demethylase; id: At1g11680.1, supported by cDNA: 110306., supported by cDNA: supported by cDNA: gi_15292852, supported by cDNA:
  misc_feature (1)..(337): Homolog of NCBI NO: 18000074 NR Description: obtusifoliol-14-demethylase [Nicotiana tabacum]
  misc_feature (1)..(337): Homolog of NCBI NO: 27461067 NR Description: obtusifoliol-14-demethylase [Nicotiana tabacum]
  misc_feature (1)..(336): Homolog of NCBI NO: 27542762 NR Description: cytochrome P450-like protein [Sorghum bicolor]
  misc_feature (1)..(336): Homolog of NCBI NO: 5921924 NR Description: Cytochrome P450 51 (CYPL1) (P450-L1A1)
  misc_feature (1)..(336): Homolog of NCBI NO: 6166036 NR Description: Cytochrome P450 51 (CYPL1) (P450-L1A1)
  misc_feature (1)..(336): Homolog of NCBI NO: 4586676 NR Description: sterol 14-demethylase [Oryza sativa (japonica
  misc_feature (1)..(337): Homolog of NCBI NO: 15227817 NR Description: putative obtusifoliol 14-alpha demethylase; id: At2g17330.1 [Arabidopsis thaliana] >gi|25282617|pir||H84550
  misc_feature (28)..(336): Homolog of NCBI NO: 7489685 NR Description: probable obtusifoliol 14-alpha-demethylase CYP51
  misc_feature (1)..(334): Homolog of NCBI NO: 6978751 NR Description: cytochrome P450, subfamily 51; Cytochrom P450

SEQ ID NO: 77968 - DNA, 1683 bp, Arabidopsis thaliana
  misc_feature (1)..(1683): Ceres Seq. ID no. 12581235
  misc_feature: MA Experiment ID: 108434 Result: Up-regulated in Transcription
  misc_feature: MA Experiment 108434 PARAMETER Experiment Name: At_Root_Tips_cDNA_P Parameter: Tissue Value: Root Tips
  misc_feature: MA Experiment ID: 108461 Result: Down-regulated in Transcription
  misc_feature: MA Experiment 108461 PARAMETER Experiment Name: At_Germinating_Seeds_cDNA_P Parameter: Age (day) Value: 1 vs. 0
  misc_feature: MA Experiment 108461 PARAMETER Experiment Name: At_Germinating_Seeds_cDNA_P Parameter: Tissue Value: Germinating Seeds
  misc_feature: MA Experiment ID: 108462 Result: Down-regulated in Transcription
  misc_feature: MA Experiment 108462 PARAMETER Experiment Name: At_Germinating_Seeds_cDNA_P Parameter: Age (day) Value: 2 vs. 0
  misc_feature: MA Experiment 108462 PARAMETER Experiment Name: At_Germinating_Seeds_cDNA_P Parameter: Tissue Value: Germinating Seeds
  misc_feature: MA Experiment ID: 108464 Result: Down-regulated in Transcription
  misc_feature: MA Experiment 108464 PARAMETER Experiment Name: At_Germinating_Seeds_cDNA_P Parameter: Age (day) Value: 4 vs. 0
  misc_feature: MA Experiment 108464 PARAMETER Experiment Name: At_Germinating_Seeds_cDNA_P Parameter: Tissue Value: Germinating Seeds
  misc_feature: MA Experiment ID: 108573 Result: Up-regulated in Transcription
  misc_feature: MA Experiment 108573 PARAMETER Experiment Name: At_Drought_cDNA_P Parameter: Timepoint (hr) Value: 6
  misc_feature: MA Experiment 108573 PARAMETER Experiment Name: At_Drought_cDNA_P Parameter: Tissue Value: Aerial
  misc_feature: MA Experiment 108573 PARAMETER Experiment Name: At_Drought_cDNA_P Parameter: Treatment Value: Drought vs. No Drought
  misc_feature: MA Experiment ID: 108595 Result: Down-regulated in Transcription
  misc_feature: MA Experiment 108595 PARAMETER Experiment Name: At_Ler-pi_Ovule_cDNA_P Parameter: Plant Line Value: null
aaaatctatcaagggtttgccgtacaaaggtatcggaggagagagtaaagggtaaacaaaagagagactggtttacttcttcttcgtgtgcgagtagctttttcctgcgattctcatcgagttttggttagtgctttgttatcaaggtgaaaatcgatttgaagatggcgagcgaaagtcctgatgttgctgttgtagctccggtggtggagaatggcggcgctgagtcctctaatggtaaagaggaacaattggaatctgagctttcgaagaagcttgagattgcagaagatggtcaagaggagaacgatggagaagaaggaagcaaagctgagacttcaacgaagaagaagaagaagaaaaataaaagcaagaagaagaaggaactccctcaacagactgatccaccttcaattcctgtcgttgagctcttcccatcaggagagtttcctgaaggtgaaatccaagagtataaggatgataatctttggagaacaacatctgaagagaagagagagctggagcgttttgaaaagccaatatataactctgttcgccgagctgcagaagttcatcgccaggttcgtaaatatgtcagaagcatagtgaagcctggaatgttgatgactgatatatgtgagaccctagagaatactgttcgtaagttgatatcagagaatggtcttcaagctggtattgcattccctacaggatgctctttgaattgggtcgctgctcattggacaccaaactctggagataagactgtacttcagtacgacgatgttatgaaattggactttggaacacatattgatgggcatattattgactgtgcatttacagttgccttcaaccctatgttcgatcctctcttagcagcctctcgtgaagctacgtataccggtatcaaggaagctgggatcgatgtccgtctctgtgatatcggtgctgctattcaggaggtcatggagtcttatgaggttgaaatcaacggaaaggtcttccaagttaaaagtatccgaaacttgaatggtcacagcattggaccctatcagatacatgctgggaaatctgttcctatcgtaaaaggaggcgagcagacaaagatggaagagggcgagttttatgccatcgaaacatttggatcaaccgggaaaggatatgtgagagaagacctagaatgtagccattacatgaagaactttgacgctggccacgtccccttgaggttgcctagagcaaaacaactccttgcaaccattaacaagaatttctcgactctcgccttctgcagacgttatttggaccgcattggtgaaaccaaatacttaatggctctaaagaatctttgtgactctggcattgttcagccgtatcctcctctgtgtgatgtgaaaggaagctatgtatcacagtttgaacacaccattttactgcgacctacttgcaaagaagttctctccaagggagacgactactgattcagatcctctgttttgctctgtttacctttattatctcatactgttgtcgagattgtacacttgcttgtttcttttgtcgtcgttaacacaagctttgaatccttttataaaaagcttcagtgcctctgttaaaaaaaaactatgtatttgccatgaacatgaatttgctcatcaatcttactagaagttgattgat

SEQ ID NO: 77969 - protein, 439 aa, Arabidopsis thaliana; identical to SEQ ID NO: 21518
  peptide (1)..(439): Ceres Seq. ID no. 12581236
  misc_feature (1)..(439): Homolog of NCBI NO: 18411408 NR Description: putative protein; protein id: At3g59990.1, by cDNA: 115696., supported by cDNA: gi_11344921, supported by gi_17473818 [Arabidopsis thaliana]
  misc_feature (1)..(439): Homolog of NCBI NO: 17473819 NR Description: putative protein [Arabidopsis thaliana]
  misc_feature (1)..(439): Homolog of NCBI NO: 11264654 NR Description: hypothetical protein F24G16.260 - Arabidopsis >gi|7019693|emb|CAB75818.1| putative protein [Arabidopsis
  misc_feature (1)..(439): Homolog of NCBI NO: 11320962 NR Description: methionine aminopeptidase-like protein
  misc_feature (1)..(439): Homolog of NCBI NO: 18406472 NR Description: putative methionine aminopeptidase; protein id: supported by cDNA: gi_11320961 [Arabidopsis thaliana]
  misc_feature (16)..(439): Homolog of NCBI NO: 7435570 NR Description: methionyl aminopeptidase (EC 3.4.11.18) F6E13.31
  misc_feature (59)..(439): Homolog of NCBI NO: 38636687 NR Description: putative methionyl aminopeptidase (EC 3.4.11.18)
  misc_feature (28)..(439): Homolog of NCBI NO: 27694969 NR Description: Similar to methionine aminopeptidase 2 [Xenopus
  misc_feature (30)..(439): Homolog of NCBI NO: 9789873 NR Description: methionine aminopeptidase 2; eIF-2-associated p67;
  misc_feature (19)..(439): Homolog of NCBI NO: 1703275 NR Description: Methionine aminopeptidase 2 (MetAP 2) (Peptidase

SEQ ID NO: 77970 - protein, 288 aa, Arabidopsis thaliana; identical to SEQ ID NO: 21519
  peptide (1)..(288): Ceres Seq. ID no. 12581237
  misc_feature (1)..(288): Homolog of NCBI NO: 18411408 NR Description: putative protein; protein id: At3g59990.1, by cDNA: 115696., supported by cDNA: gi_11344921, supported by gi_17473818 [Arabidopsis thaliana]
  misc_feature (1)..(288): Homolog of NCBI NO: 17473819 NR Description: putative protein [Arabidopsis thaliana]
  misc_feature (1)..(288): Homolog of NCBI NO: 11264654 NR Description: hypothetical protein F24G16.260 - Arabidopsis >gi|7019693|emb|CAB75818.1| putative protein [Arabidopsis
  misc_feature (1)..(288): Homolog of NCBI NO: 11320962 NR Description: methionine aminopeptidase-like protein
  misc_feature (1)..(288): Homolog of NCBI NO: 18406472 NR Description: putative methionine aminopeptidase; protein id: supported by cDNA: gi_11320961 [Arabidopsis thaliana]
  misc_feature (1)..(288): Homolog of NCBI NO: 7435570 NR Description: methionyl aminopeptidase (EC 3.4.11.18) F6E13.31
  misc_feature (1)..(288): Homolog of NCBI NO: 38636687 NR Description: putative methionyl aminopeptidase (EC 3.4.11.18)
  misc_feature (1)..(288): Homolog of NCBI NO: 27694969 NR Description: Similar to methionine aminopeptidase 2 [Xenopus
  misc_feature (1)..(288): Homolog of NCBI NO: 9789873 NR Description: methionine aminopeptidase 2; eIF-2-associated p67;
  misc_feature (1)..(288): Homolog of NCBI NO: 1703275 NR Description: Methionine aminopeptidase 2 (MetAP 2) (Peptidase

SEQ ID NO: 77971 - protein, 286 aa, Arabidopsis thaliana; identical to SEQ ID NO: 21520
  peptide (1)..(286): Ceres Seq. ID no. 12581238
  misc_feature (1)..(286): Homolog of NCBI NO: 18411408 NR Description: putative protein; protein id: At3g59990.1, by cDNA: 115696., supported by cDNA: gi_11344921, supported by gi_17473818 [Arabidopsis thaliana]
  misc_feature (1)..(286): Homolog of NCBI NO: 17473819 NR Description: putative protein [Arabidopsis thaliana]
  misc_feature (1)..(286): Homolog of NCBI NO: 11264654 NR Description: hypothetical protein F24G16.260 - Arabidopsis >gi|7019693|emb|CAB75818.1| putative protein [Arabidopsis
  misc_feature (1)..(286): Homolog of NCBI NO: 11320962 NR Description: methionine aminopeptidase-like protein
  misc_feature (1)..(286): Homolog of NCBI NO: 18406472 NR Description: putative methionine aminopeptidase; protein id: supported by cDNA: gi_11320961 [Arabidopsis thaliana]
  misc_feature (1)..(286): Homolog of NCBI NO: 7435570 NR Description: methionyl aminopeptidase (EC 3.4.11.18) F6E13.31
  misc_feature (1)..(286): Homolog of NCBI NO: 38636687 NR Description: putative methionyl aminopeptidase (EC 3.4.11.18)
  misc_feature (1)..(286): Homolog of NCBI NO: 27694969 NR Description: Similar to methionine aminopeptidase 2 [Xenopus
  misc_feature (1)..(286): Homolog of NCBI NO: 9789873 NR Description: methionine aminopeptidase 2; eIF-2-associated p67;
  misc_feature (1)..(286): Homolog of NCBI NO: 1703275 NR Description: Methionine aminopeptidase 2 (MetAP 2) (Peptidase

SEQ ID NO: 77972 - DNA, 811 bp, Arabidopsis thaliana
  misc_feature (1)..(811): Ceres Seq. ID no. 12581260
  misc_feature: MA Experiment ID: 108461 Result: Down-regulated in Transcription
  misc_feature: MA Experiment 108461 PARAMETER Experiment Name: At_Germinating_Seeds_cDNA_P Parameter: Age (day) Value: 1 vs. 0
  misc_feature: MA Experiment 108461 PARAMETER Experiment Name: At_Germinating_Seeds_cDNA_P Parameter: Tissue Value: Germinating Seeds
  misc_feature: MA Experiment ID: 108501 Result: Up-regulated in Transcription
  misc_feature: MA Experiment 108501 PARAMETER Experiment Name: At_ap2_floral_buds_cDNA_P Parameter: Plant Line Value: ap2 (Ler.)
  misc_feature: MA Experiment 108501 PARAMETER Experiment Name: At_ap2_floral_buds_cDNA_P Parameter: Tissue Value: Closed Flower
  misc_feature: MA Experiment ID: 108572 Result: Up-regulated in Transcription
  misc_feature: MA Experiment 108572 PARAMETER Experiment Name: At_Drought_cDNA_P Parameter: Timepoint (hr) Value: 1
  misc_feature: MA Experiment 108572 PARAMETER Experiment Name: At_Drought_cDNA_P Parameter: Tissue Value: Aerial
  misc_feature: MA Experiment 108572 PARAMETER Experiment Name: At_Drought_cDNA_P Parameter: Treatment Value: Drought vs. No Drought
  misc_feature: MA Experiment ID: 108576 Result: Up-regulated in Transcription
  misc_feature: MA Experiment 108576 PARAMETER Experiment Name: At_42deg_Heat_cDNA_P Parameter: Temperature (deg C) Value: 42 vs. 22
  misc_feature: MA Experiment 108576 PARAMETER Experiment Name: At_42deg_Heat_cDNA_P Parameter: Timepoint (hr) Value: 1
  misc_feature: MA Experiment 108576 PARAMETER Experiment Name: At_42deg_Heat_cDNA_P Parameter: Tissue Value: Aerial
  misc_feature: MA Experiment ID: 108577 Result: Up-regulated in Transcription
  misc_feature: MA Experiment 108577 PARAMETER Experiment Name: At_42deg_Heat_cDNA_P Parameter: Temperature (deg C) Value: 42 vs. 22
  misc_feature: MA Experiment 108577 PARAMETER Experiment Name: At_42deg_Heat_cDNA_P Parameter: Timepoint (hr) Value: 6
  misc_feature: MA Experiment 108577 PARAMETER Experiment Name: At_42deg_Heat_cDNA_P Parameter: Tissue Value: Aerial
  misc_feature: MA Experiment ID: 108595 Result: Up-regulated in Transcription
  misc_feature: MA Experiment 108595 PARAMETER Experiment Name: At_Ler-pi_Ovule_cDNA_P Parameter: Plant Line Value: null
  misc_feature: MA Experiment ID: 108607 Result: Up-regulated in Transcription
  misc_feature: MA Experiment 108607 PARAMETER Experiment Name: At_100uM_ABA_cDNA_P Parameter: Timepoint (hr) Value: 4
  misc_feature: MA Experiment 108607 PARAMETER Experiment Name: At_100uM_ABA_cDNA_P Parameter: Tissue Value: Aerial
  misc_feature: MA Experiment 108607 PARAMETER Experiment Name: At_100uM_ABA_cDNA_P Parameter: Treatment Value: 100uM ABA vs. No Treatment
  misc_feature: MA Experiment ID: 108608 Result: Up-regulated in Transcription
  misc_feature: MA Experiment 108608 PARAMETER Experiment Name: At_100uM_ABA_cDNA_P Parameter: Timepoint (hr) Value: 1
  misc_feature: MA Experiment 108608 PARAMETER Experiment Name: At_100uM_ABA_cDNA_P Parameter: Tissue Value: Aerial
  misc_feature: MA Experiment 108608 PARAMETER Experiment Name: At_100uM_ABA_cDNA_P Parameter: Treatment Value: 100uM ABA vs. No Treatment
  misc_feature: MA Experiment ID: 20000089 Result: Down-regulated in Transcription
  misc_feature: MA Experiment ID: 20000093 Result: Up-regulated in Transcription
  misc_feature: MA Experiment 20000093 PARAMETER Experiment Name: At_42deg_Heat_cDNA_P Parameter: Temperature (deg C) Value: 42 vs. 22
  misc_feature: MA Experiment 20000093 PARAMETER Experiment Name: At_42deg_Heat_cDNA_P Parameter: Timepoint (hr) Value: 0.5
  misc_feature: MA Experiment 20000093 PARAMETER Experiment Name: At_42deg_Heat_cDNA_P Parameter: Tissue Value: Aerial
  misc_feature: MA Experiment ID: 20000111 Result: Up-regulated in Transcription
  misc_feature: MA Experiment 20000111 PARAMETER Experiment Name: At_42deg_Heat_cDNA_P Parameter: Temperature (deg C) Value: 42 vs. 22
  misc_feature: MA Experiment 20000111 PARAMETER Experiment Name: At_42deg_Heat_cDNA_P Parameter: Timepoint (hr) Value: 6
  misc_feature: MA Experiment 20000111 PARAMETER Experiment Name: At_42deg_Heat_cDNA_P Parameter: Tissue Value: Aerial
  misc_feature: MA Experiment ID: 20000112 Result: Up-regulated in Transcription
  misc_feature: MA Experiment 20000112 PARAMETER Experiment Name: At_42deg_Heat_cDNA_P Parameter: Temperature (deg C) Value: 42 vs. 22
  misc_feature: MA Experiment 20000112 PARAMETER Experiment Name: At_42deg_Heat_cDNA_P Parameter: Timepoint (hr) Value: 2
  misc_feature: MA Experiment 20000112 PARAMETER Experiment Name: At_42deg_Heat_cDNA_P Parameter: Tissue Value: Aerial
  misc_feature: MA Experiment ID: 20000113 Result: Up-regulated in Transcription
  misc_feature: MA Experiment 20000113 PARAMETER Experiment Name: At_42deg_Heat_cDNA_P Parameter: Temperature (deg C) Value: 42 vs. 22
  misc_feature: MA Experiment 20000113 PARAMETER Experiment Name: At_42deg_Heat_cDNA_P Parameter: Timepoint (hr) Value: 8
  misc_feature: MA Experiment 20000113 PARAMETER Experiment Name: At_42deg_Heat_cDNA_P Parameter: Tissue Value: Aerial
  misc_feature: MA Experiment ID: 20000144 Result: Up-regulated in Transcription
  misc_feature: MA Experiment 20000144 PARAMETER Experiment Name: At_42deg_Heat_cDNA_P Parameter: Temperature (deg C) Value: 42 vs. 22
  misc_feature: MA Experiment 20000144 PARAMETER Experiment Name: At_42deg_Heat_cDNA_P Parameter: Timepoint (hr) Value: 1
  misc_feature: MA Experiment 20000144 PARAMETER Experiment Name: At_42deg_Heat_cDNA_P Parameter: Tissue Value: Aerial
  misc_feature: MA Experiment ID: 20000166 Result: Up-regulated in Transcription
  misc_feature: MA Experiment 20000166 PARAMETER Experiment Name: At_100uM_ABA_P Parameter: Age (day) Value: 14
  misc_feature: MA Experiment 20000166 PARAMETER Experiment Name: At_100uM_ABA_P Parameter: Organism Value: A. thaliana
  misc_feature: MA Experiment 20000166 PARAMETER Experiment Name: At_100uM_ABA_P Parameter: Plant Line Value: WS
  misc_feature: MA Experiment 20000166 PARAMETER Experiment Name: At_100uM_ABA_P Parameter: Timepoint (hr) Value: 1
  misc_feature: MA Experiment 20000166 PARAMETER Experiment Name: At_100uM_ABA_P Parameter: Tissue Value: Aerial
  misc_feature: MA Experiment 20000166 PARAMETER Experiment Name: At_100uM_ABA_P Parameter: Treatment Value: 100uM ABA vs. No Treatment
  misc_feature: MA Experiment ID: 20000171 Result: Up-regulated in Transcription
  misc_feature: MA Experiment 20000171 PARAMETER Experiment Name: At_42deg_Heat_P Parameter: Age (day) Value: 14
  misc_feature: MA Experiment 20000171 PARAMETER Experiment Name: At_42deg_Heat_P Parameter: Organism Value: A. thaliana
  misc_feature: MA Experiment 20000171 PARAMETER Experiment Name: At_42deg_Heat_P Parameter: Plant Line Value: WS
  misc_feature: MA Experiment 20000171 PARAMETER Experiment Name: At_42deg_Heat_P Parameter: Temperature (deg C) Value: 42 vs. 22
  misc_feature: MA Experiment 20000171 PARAMETER Experiment Name: At_42deg_Heat_P Parameter: Timepoint (hr) Value: 1
  misc_feature: MA Experiment 20000171 PARAMETER Experiment Name: At_42deg_Heat_P Parameter: Tissue Value: Aerial
  misc_feature: MA Experiment ID: 20000173 Result: Up-regulated in Transcription
  misc_feature: MA Experiment 20000173 PARAMETER Experiment Name: At_42deg_Heat_P Parameter: Age (day) Value: 14
  misc_feature: MA Experiment 20000173 PARAMETER Experiment Name: At_42deg_Heat_P Parameter: Organism Value: A. thaliana
  misc_feature: MA Experiment 20000173 PARAMETER Experiment Name: At_42deg_Heat_P Parameter: Plant Line Value: WS
  misc_feature: MA Experiment 20000173 PARAMETER Experiment Name: At_42deg_Heat_P Parameter: Temperature (deg C) Value: 42 vs. 22
  misc_feature: MA Experiment 20000173 PARAMETER Experiment Name: At_42deg_Heat_P Parameter: Timepoint (hr) Value: 6
  misc_feature: MA Experiment 20000173 PARAMETER Experiment Name: At_42deg_Heat_P Parameter: Tissue Value: Aerial
  misc_feature: MA Experiment ID: 20000234 Result: Up-regulated in Transcription
  misc_feature: MA Experiment 20000234 PARAMETER Experiment Name: At_Siliques_P Parameter: Age (day) Value: 21
  misc_feature: MA Experiment 20000234 PARAMETER Experiment Name: At_Siliques_P Parameter: Organism Value: A. thaliana
  misc_feature: MA Experiment 20000234 PARAMETER Experiment Name: At_Siliques_P Parameter: Plant Line Value: WS
  misc_feature: MA Experiment 20000234 PARAMETER Experiment Name: At_Siliques_P Parameter: Tissue Value: Less Than 5mm Siliques vs. Whole Plant
  misc_feature: MA Experiment ID: 20001248 Result: Down-regulated in Transcription
  misc_feature: MA Experiment 20001248 PARAMETER Experiment Name: At_Far-red-induction_P Parameter: Age (day) Value: 7
  misc_feature: MA Experiment 20001248 PARAMETER Experiment Name: At_Far-red-induction_P Parameter: Light Value: Far-red vs. White
  misc_feature: MA Experiment 20001248 PARAMETER Experiment Name: At_Far-red-induction_P Parameter: Organism Value: A. thaliana
  misc_feature: MA Experiment 20001248 PARAMETER Experiment Name: At_Far-red-induction_P Parameter: Plant Line Value: Columbia
  misc_feature: MA Experiment 20001248 PARAMETER Experiment Name: At_Far-red-induction_P Parameter: Timepoint (hr) Value: 4
  misc_feature: MA Experiment 20001248 PARAMETER Experiment Name: At_Far-red-induction_P Parameter: Tissue Value: Whole Plant
  misc_feature: MA Experiment ID: 20001450 Result: Down-regulated in Transcription
  misc_feature: MA Experiment 20001450 PARAMETER Experiment Name: At_Far-red-induction_P Parameter: Age (day) Value: 7
  misc_feature: MA Experiment 20001450 PARAMETER Experiment Name: At_Far-red-induction_P Parameter: Light Value: Far-red vs. White
  misc_feature: MA Experiment 20001450 PARAMETER Experiment Name: At_Far-red-induction_P Parameter: Organism Value: A. thaliana
  misc_feature: MA Experiment 20001450 PARAMETER Experiment Name: At_Far-red-induction_P Parameter: Plant Line Value: Columbia
  misc_feature: MA Experiment 20001450 PARAMETER Experiment Name: At_Far-red-induction_P Parameter: Timepoint (hr) Value: 8
  misc_feature: MA Experiment 20001450 PARAMETER Experiment Name: At_Far-red-induction_P Parameter: Tissue Value: Whole Plant
  misc_feature: MA Experiment ID: 20001554 Result: Up-regulated in Transcription
  misc_feature: MA Experiment 20001554 PARAMETER Experiment Name: At_Drought_Soil_Dry_P Parameter: Age (day) Value: 21
  misc_feature: MA Experiment 20001554 PARAMETER Experiment Name: At_Drought_Soil_Dry_P Parameter: Organism Value: A. thaliana
  misc_feature: MA Experiment 20001554 PARAMETER Experiment Name: At_Drought_Soil_Dry_P Parameter: Plant Line Value: WS
  misc_feature: MA Experiment 20001554 PARAMETER Experiment Name: At_Drought_Soil_Dry_P Parameter: Post Timepoint (hr) Value: None
  misc_feature: MA Experiment 20001554 PARAMETER Experiment Name: At_Drought_Soil_Dry_P Parameter: Post-Treatment Value: None
  misc_feature: MA Experiment 20001554 PARAMETER Experiment Name: At_Drought_Soil_Dry_P Parameter: Timepoint (day) Value: 7
  misc_feature: MA Experiment 20001554 PARAMETER Experiment Name: At_Drought_Soil_Dry_P Parameter: Treatment Value: Drought vs. No Drought
  misc_feature: MA Experiment ID: 20001555 Result: Up-regulated in Transcription
  misc_feature: MA Experiment 20001555 PARAMETER Experiment Name: At_Drought_Soil_Dry_P Parameter: Age (day) Value: 24
  misc_feature: MA Experiment 20001555 PARAMETER Experiment Name: At_Drought_Soil_Dry_P Parameter: Organism Value: A. thaliana
  misc_feature: MA Experiment 20001555 PARAMETER Experiment Name: At_Drought_Soil_Dry_P Parameter: Plant Line Value: WS
  misc_feature: MA Experiment 20001555 PARAMETER Experiment Name: At_Drought_Soil_Dry_P Parameter: Post Timepoint (hr) Value: None
  misc_feature: MA Experiment 20001555 PARAMETER Experiment Name: At_Drought_Soil_Dry_P Parameter: Post-Treatment Value: None
  misc_feature: MA Experiment 20001555 PARAMETER Experiment Name: At_Drought_Soil_Dry_P Parameter: Timepoint (day) Value: 10
  misc_feature: MA Experiment 20001555 PARAMETER Experiment Name: At_Drought_Soil_Dry_P Parameter: Treatment Value: Drought vs. No Drought
  misc_feature: MA Experiment ID: 20001556 Result: Up-regulated in Transcription
  misc_feature: MA Experiment 20001556 PARAMETER Experiment Name: At_Drought_Soil_Dry_P Parameter: Age (day) Value: 26
  misc_feature: MA Experiment 20001556 PARAMETER Experiment Name: At_Drought_Soil_Dry_P Parameter: Organism Value: A. thaliana
  misc_feature: MA Experiment 20001556 PARAMETER Experiment Name: At_Drought_Soil_Dry_P Parameter: Plant Line Value: WS
  misc_feature: MA Experiment 20001556 PARAMETER Experiment Name: At_Drought_Soil_Dry_P Parameter: Post Timepoint (hr) Value: None
  misc_feature: MA Experiment 20001556 PARAMETER Experiment Name: At_Drought_Soil_Dry_P Parameter: Post-Treatment Value: None
  misc_feature: MA Experiment 20001556 PARAMETER Experiment Name: At_Drought_Soil_Dry_P Parameter: Timepoint (day) Value: 12
  misc_feature: MA Experiment 20001556 PARAMETER Experiment Name: At_Drought_Soil_Dry_P Parameter: Treatment Value: Drought vs. No Drought
  misc_feature: MA Experiment ID: 20001558 Result: Down-regulated in Transcription
  misc_feature: MA Experiment 20001558 PARAMETER Experiment Name: At_Drought_Soil_Dry_P Parameter: Age (day) Value: 27
  misc_feature: MA Experiment 20001558 PARAMETER Experiment Name: At_Drought_Soil_Dry_P Parameter: Organism Value: A. thaliana
  misc_feature: MA Experiment 20001558 PARAMETER Experiment Name: At_Drought_Soil_Dry_P Parameter: Plant Line Value: WS
  misc_feature: MA Experiment 20001558 PARAMETER Experiment Name: At_Drought_Soil_Dry_P Parameter: Post Timepoint (hr) Value: 6
  misc_feature: MA Experiment 20001558 PARAMETER Experiment Name: At_Drought_Soil_Dry_P Parameter: Post-Treatment Value: Re-Water vs. No Drought
  misc_feature: MA Experiment 20001558 PARAMETER Experiment Name: At_Drought_Soil_Dry_P Parameter: Timepoint (day) Value: 13
  misc_feature: MA Experiment 20001558 PARAMETER Experiment Name: At_Drought_Soil_Dry_P Parameter: Treatment Value: Drought vs. No Drought
  misc_feature: MA Experiment ID: 20001559 Result: Up-regulated in Transcription
  misc_feature: MA Experiment 20001559 PARAMETER Experiment Name: At_Drought_Soil_Dry_P Parameter: Age (day) Value: 28
  misc_feature: MA Experiment 20001559 PARAMETER Experiment Name: At_Drought_Soil_Dry_P Parameter: Organism Value: A. thaliana
  misc_feature: MA Experiment 20001559 PARAMETER Experiment Name: At_Drought_Soil_Dry_P Parameter: Plant Line Value: WS
  misc_feature: MA Experiment 20001559 PARAMETER Experiment Name: At_Drought_Soil_Dry_P Parameter: Post Timepoint (hr) Value: 29
  misc_feature: MA Experiment 20001559 PARAMETER Experiment Name: At_Drought_Soil_Dry_P Parameter: Post-Treatment Value: Re-Water vs. No Drought
  misc_feature: MA Experiment 20001559 PARAMETER Experiment Name: At_Drought_Soil_Dry_P Parameter: Timepoint (day) Value: 14
  misc_feature: MA Experiment 20001559 PARAMETER Experiment Name: At_Drought_Soil_Dry_P Parameter: Treatment Value: Drought vs. No Drought
  misc_feature: MA Experiment ID: 20001906 Result: Up-regulated in Transcription
  misc_feature: MA Experiment 20001906 PARAMETER Experiment Name: At_Drought_Reproduction_P Parameter: Age (day) Value: 35
  misc_feature: MA Experiment 20001906 PARAMETER Experiment Name: At_Drought_Reproduction_P Parameter: Organism Value: A. thaliana
  misc_feature: MA Experiment 20001906 PARAMETER Experiment Name: At_Drought_Reproduction_P Parameter: Plant Line Value: WS
  misc_feature: MA Experiment 20001906 PARAMETER Experiment Name: At_Drought_Reproduction_P Parameter: Timepoint (day) Value: 5
  misc_feature: MA Experiment 20001906 PARAMETER Experiment Name: At_Drought_Reproduction_P Parameter: Tissue Value: Siliques
  misc_feature: MA Experiment 20001906 PARAMETER Experiment Name: At_Drought_Reproduction_P Parameter: Treatment Value: Drought vs. No Drought
atcttagggtttcgcgagatctcactctcactgagatagcttagcaatggagcagtcagaagagggtcaacagcaacagcaacagggagtgatggattatgtacctcctcatgcttatcagagtgggccagtaaatgcagcttcccatatggcattccaacaagctcaccacttccaccaccaccatcagcagcaacaacagcagcagcttcagatgttctgggctaaccaaatgcaagagatcgagcataccactgatttcaagaaccacacccttcccctagcccgcatcaagaagatcatgaaagctgatgaagatgtgaggatgatctctgcggaggctcctgtgatttttgccaaggcctgtgagatgttcattttggagctcactctacgtgcttggatccacaccgaggagaacaagaggaggaccttgcagaagaacgacatcgccgctgccatttccaggaccgacgtgtttgatttccttgtggacataatcccgagggacgagctgaaagaagaaggtttaggcgtgaccaaagggaccataccatcggtggtgggttccccgccatactattacttgcaacaacaggggatgatgcaacactggccccaggagcaacaccctgatgagtcttaaaacttttcccctttcgtttgtttggttgtatcgtagtaaggtagctctgctctgctgggaaccatttctattgtgttctgtaatgacatgttagtatatccccagtctatatctatggcaatgcagtttctgttctcatgtgcattaaataataacaagaatgat

SEQ ID NO: 77973 - protein, 199 aa, Arabidopsis thaliana; identical to SEQ ID NO: 25138
  peptide (1)..(199): Ceres Seq. ID no. 12581261
  misc_feature (1)..(199): Homolog of NCBI NO: 15223482 NR Description: transcription factor, putative; protein id: supported by cDNA: 26157., supported by cDNA: gi_18252952 thaliana] >gi|18252953|gb|AAL62403.1| transcription putative
  misc_feature (1)..(199): Homolog of NCBI NO: 21554704 NR Description: transcription factor, putative [Arabidopsis
  misc_feature (63)..(199): Homolog of NCBI NO: 25404100 NR Description: transcription factor [imported] - Arabidopsis >gi|6056368|gb|AAF02832.1|AC009894_3 transcription factor hap5b thaliana] >gi|12321740|gb|AAG50900.1|AC069159_1 transcription
  misc_feature (63)..(193): Homolog of NCBI NO: 2398533 NR Description: Transcription factor [Arabidopsis thaliana]
  misc_feature (1)..(181): Homolog of NCBI NO: 15223986 NR Description: putative transcription factor; protein id: supported by cDNA: 1911. [Arabidopsis thaliana] putative transcription factor [Arabidopsis thaliana]
  misc_feature (1)..(181): Homolog of NCBI NO: 6289057 NR Description: heme activated protein [Arabidopsis thaliana]
  misc_feature (38)..(181): Homolog of NCBI NO: 25372763 NR Description: hypothetical protein [imported] - Arabidopsis
  misc_feature (9)..(181): Homolog of NCBI NO: 15221912 NR Description: heme activated protein, putative; protein id: [Arabidopsis thaliana] >gi|3776575|gb|AAC64892.1| Similar to
  misc_feature (20)..(180): Homolog of NCBI NO: 15228405 NR Description: transcription factor Hap5a; protein id: supported by cDNA: 21604., supported by cDNA: gi_20260195
  misc_feature (1)..(180): Homolog of NCBI NO: 15242784 NR Description: transcription factor Hap5a-like protein; protein At5g63470.1, supported by cDNA: gi_18252934 [Arabidopsis

SEQ ID NO: 77974 - protein, 184 aa, Arabidopsis thaliana; identical to SEQ ID NO: 25139
  peptide (1)..(184): Ceres Seq. ID no. 12581262
  misc_feature (1)..(184): Homolog of NCBI NO: 15223482 NR Description: transcription factor, putative; protein id: supported by cDNA: 26157., supported by cDNA: gi_18252952 thaliana] >gi|18252953|gb|AAL62403.1| transcription putative
  misc_feature (1)..(184): Homolog of NCBI NO: 21554704 NR Description: transcription factor, putative [Arabidopsis
  misc_feature (48)..(184): Homolog of NCBI NO: 25404100 NR Description: transcription factor [imported] - Arabidopsis >gi|6056368|gb|AAF02832.1|AC009894_3 transcription factor hap5b thaliana] >gi|12321740|gb|AAG50900.1|AC069159_1 transcription
  misc_feature (48)..(178): Homolog of NCBI NO: 2398533 NR Description: Transcription factor [Arabidopsis thaliana]
  misc_feature (1)..(166): Homolog of NCBI NO: 15223986 NR Description: putative transcription factor; protein id: supported by cDNA: 1911. [Arabidopsis thaliana] putative transcription factor [Arabidopsis thaliana]
  misc_feature (1)..(166): Homolog of NCBI NO: 6289057 NR Description: heme activated protein [Arabidopsis thaliana]
  misc_feature (23)..(166): Homolog of NCBI NO: 25372763 NR Description: hypothetical protein [imported] - Arabidopsis
  misc_feature (1)..(166): Homolog of NCBI NO: 15221912 NR Description: heme activated protein, putative; protein id: [Arabidopsis thaliana] >gi|3776575|gb|AAC64892.1| Similar to
  misc_feature (5)..(165): Homolog of NCBI NO: 15228405 NR Description: transcription factor Hap5a; protein id: supported by cDNA: 21604., supported by cDNA: gi_20260195
  misc_feature (1)..(165): Homolog of NCBI NO: 15242784 NR Description: transcription factor Hap5a-like protein; protein At5g63470.1, supported by cDNA: gi_18252934 [Arabidopsis

SEQ ID NO: 77975 - protein, 165 aa, Arabidopsis thaliana; identical to SEQ ID NO: 25140
  peptide (1)..(165): Ceres Seq. ID no. 12581263
  misc_feature (1)..(165): Homolog of NCBI NO: 15223482 NR Description: transcription factor, putative; protein id: supported by cDNA: 26157., supported by cDNA: gi_18252952 thaliana] >gi|18252953|gb|AAL62403.1| transcription putative
  misc_feature (1)..(165): Homolog of NCBI NO: 21554704 NR Description: transcription factor, putative [Arabidopsis
  misc_feature (29)..(165): Homolog of NCBI NO: 25404100 NR Description: transcription factor [imported] - Arabidopsis >gi|6056368|gb|AAF02832.1|AC009894_3 transcription factor hap5b thaliana] >gi|12321740|gb|AAG50900.1|AC069159_1 transcription
  misc_feature (29)..(159): Homolog of NCBI NO: 2398533 NR Description: Transcription factor [Arabidopsis thaliana]
  misc_feature (1)..(147): Homolog of NCBI NO: 15223986 NR Description: putative transcription factor; protein id: supported by cDNA: 1911. [Arabidopsis thaliana] putative transcription factor [Arabidopsis thaliana]
  misc_feature (1)..(147): Homolog of NCBI NO: 6289057 NR Description: heme activated protein [Arabidopsis thaliana]
  misc_feature (4)..(147): Homolog of NCBI NO: 25372763 NR Description: hypothetical protein [imported] - Arabidopsis
  misc_feature (1)..(147): Homolog of NCBI NO: 15221912 NR Description: heme activated protein, putative; protein id: [Arabidopsis thaliana] >gi|3776575|gb|AAC64892.1| Similar to
  misc_feature (1)..(146): Homolog of NCBI NO: 15228405 NR Description: transcription factor Hap5a; protein id: supported by cDNA: 21604., supported by cDNA: gi_20260195
  misc_feature (1)..(146): Homolog of NCBI NO: 15242784 NR Description: transcription factor Hap5a-like protein; protein At5g63470.1, supported by cDNA: gi_18252934 [Arabidopsis

SEQ ID NO: 77976 - DNA, 1518 bp, Arabidopsis thaliana
  misc_feature (1)..(1518): Ceres Seq. ID no. 12581306
  misc_feature: MA Experiment ID: 108434 Result: Up-regulated in Transcription
  misc_feature: MA Experiment 108434 PARAMETER Experiment Name: At_Root_Tips_cDNA_P Parameter: Tissue Value: Root Tips
  misc_feature: MA Experiment ID: 108461 Result: Up-regulated in Transcription
  misc_feature: MA Experiment 108461 PARAMETER Experiment Name: At_Germinating_Seeds_cDNA_P Parameter: Age (day) Value: 1 vs. 0
  misc_feature: MA Experiment 108461 PARAMETER Experiment Name: At_Germinating_Seeds_cDNA_P Parameter: Tissue Value: Germinating Seeds
  misc_feature: MA Experiment ID: 108462 Result: Up-regulated in Transcription
  misc_feature: MA Experiment 108462 PARAMETER Experiment Name: At_Germinating_Seeds_cDNA_P Parameter: Age (day) Value: 2 vs. 0
  misc_feature: MA Experiment 108462 PARAMETER Experiment Name: At_Germinating_Seeds_cDNA_P Parameter: Tissue Value: Germinating Seeds
  misc_feature: MA Experiment ID: 20000069 Result: Down-regulated in Transcription
  misc_feature: MA Experiment 20000069 PARAMETER Experiment Name: At_100uM_ABA_Mutants_cDNA_P Parameter: Plant Line Value: CS23
  misc_feature: MA Experiment 20000069 PARAMETER Experiment Name: At_100uM_ABA_Mutants_cDNA_P Parameter: Timepoint (hr) Value: 6
  misc_feature: MA Experiment 20000069 PARAMETER Experiment Name: At_100uM_ABA_Mutants_cDNA_P Parameter: Tissue Value: Aerial
  misc_feature: MA Experiment 20000069 PARAMETER Experiment Name: At_100uM_ABA_Mutants_cDNA_P Parameter: Treatment Value: 100uM ABA vs. No Treatment
  misc_feature: MA Experiment ID: 20000070 Result: Down-regulated in Transcription
  misc_feature: MA Experiment 20000070 PARAMETER Experiment Name: At_100uM_ABA_Mutants_cDNA_P Parameter: Plant Line Value: CS24
  misc_feature: MA Experiment 20000070 PARAMETER Experiment Name: At_100uM_ABA_Mutants_cDNA_P Parameter: Timepoint (hr) Value: 6
  misc_feature: MA Experiment 20000070 PARAMETER Experiment Name: At_100uM_ABA_Mutants_cDNA_P Parameter: Tissue Value: Aerial
  misc_feature: MA Experiment 20000070 PARAMETER Experiment Name: At_100uM_ABA_Mutants_cDNA_P Parameter: Treatment Value: 100uM ABA vs. No Treatment
attaatctctctctgcctctactcactggatcatcatagctccaaacttgtaccagtcgcatcaaagcaagttttggtgaagaagaagagacgaggtcttcctcttactgtggtggtgacattttctctaaaaagaaagtctccgatatgtcgcagagatggagtagaaagaagagtagacttccattagcgggtctcctctttattctcgttgtcacctttatgattctcttcaacgagcgtagcattcagcagatccatcaccacgccgcgagtcacactcaaaatctccgagaaccttccacgttcgatttcgtcaagcctaatgttcctcggattaactacttgggagctcatgaggttttggatagattcagcaaatgcaactcgacgaaagagtacagtgggaagaaaatcggatgggttgacccgtttgaagaccacccgggtcaagtaacaaaggaggagcagaaatgtgatgtcttttctgggaaatgggtctttgataattcatcatcataccctttacacaaggaatctcagtgtccttacatgtccgaccagttggcttgtcagaagcatggtaggaaggatttggagtatcagcattggagatggcaacctcatgcctgcaacttgaagagatggaatgcgatagaaatgtgggagaagctgagaggaaagagattgatgtttgttggagactcgttaaacagaggccaatggatttcaatggtttgtctcttacagtctgtcattccacgtgacaagcagtctatgtctcctaacgctcacctcaccattttcagggctgaggactacaatgccacagtggagtttctctgggcaccgttgctcgtggagtcgaattctgatgaccctgttaatcacagattgagcgagcggattatccgacccgattctgttcttaaacatgcatcaaagtggcaacatgctgatattctaatcttcaacacctacttatggtggagacaagactctgtcaagctccgatggagcagtgaagaaaaagggtcatgcgaggaggtgaagagcgccgagggaatggagatggcaatggatagttggggtgattgggttgctaacaatgtcgatccaaacaaaaagcgagttttcttcgttacaatgtctcctacacatcaatggagccgagaatggaacccgggaagcgaaggaaactgctacggggagaagaaaccaatagaggaagagagttattggggaagtgggtcggacattccgacaatgaggatggtgaagagagttttggagagattgggaccaaaggtctcagttataaacatcactcagttgtctgagtatcgaaaagatggtcatccatcggtgtaccggaaattctgggaacctctaaatgaagaccggttgaaaaacccggcatcgtattctgactgtactcattggtgtgtacctggagttcctgatgtctggaatcaattgcttttccattttttgtgaaaatgaaatgaatataacctt

SEQ ID NO: 77977 - protein, 449 aa, Arabidopsis thaliana; identical to SEQ ID NO: 38720
  peptide (1)..(449): Ceres Seq. ID no. 12581307
  misc_feature (280)..(449): Pfam Name: Arabidopsis proteins of unknown function Pfam Description: Arabidopsis proteins of unknown function
  misc_feature (1)..(449): Homolog of NCBI NO: 18413698 NR Description: putative protein; protein id: At5g01620.1, by cDNA: 108209., supported by cDNA: gi_19347853 [Arabidopsis >gi|19347854|gb|AAL86006.1| unknown protein [Arabidopsis
  misc_feature (1)..(449): Homolog of NCBI NO: 11291876 NR Description: hypothetical protein F7A7.140 - Arabidopsis >gi|7327821|emb|CAB82278.1| putative protein [Arabidopsis
  misc_feature (1)..(449): Homolog of NCBI NO: 21536676 NR Description: unknown [Arabidopsis thaliana]
  misc_feature (108)..(449): Homolog of NCBI NO: 7487161 NR Description: hypothetical protein At2g38320 [imported] -
  misc_feature (108)..(449): Homolog of NCBI NO: 18404712 NR Description: expressed protein; protein id: At2g38320.1, by cDNA: gi_13878094 [Arabidopsis thaliana] unknown protein [Arabidopsis thaliana]
  misc_feature (110)..(446): Homolog of NCBI NO: 28876013 NR Description: unknown protein [Oryza sativa (japonica
  misc_feature (103)..(446): Homolog of NCBI NO: 28393743 NR Description: unknown protein [Arabidopsis thaliana]
  misc_feature (103)..(446): Homolog of NCBI NO: 15226647 NR Description: hypothetical protein; protein id: At2g40320.1
  misc_feature (103)..(446): Homolog of NCBI NO: 15228429 NR Description: unknown protein; protein id: At3g11030.1 thaliana] >gi|6016691|gb|AAF01518.1|AC009991_14 unknown protein thaliana] >gi|27754560|gb|AAO22727.1| unknown protein
  misc_feature (103)..(449): Homolog of NCBI NO: 15219382 NR Description: hypothetical protein; protein id: At1g73140.1

SEQ ID NO: 77978 - protein, 424 aa, Arabidopsis thaliana; identical to SEQ ID NO: 38721
  peptide (1)..(424): Ceres Seq. ID no. 12581308
  misc_feature (255)..(424): Pfam Name: Arabidopsis proteins of unknown function Pfam Description: Arabidopsis proteins of unknown function
  misc_feature (1)..(424): Homolog of NCBI NO: 18413698 NR Description: putative protein; protein id: At5g01620.1, by cDNA: 108209., supported by cDNA: gi_19347853 [Arabidopsis >gi|19347854|gb|AAL86006.1| unknown protein [Arabidopsis
  misc_feature (1)..(424): Homolog of NCBI NO: 11291876 NR Description: hypothetical protein F7A7.140 - Arabidopsis >gi|7327821|emb|CAB82278.1| putative protein [Arabidopsis
  misc_feature (1)..(424): Homolog of NCBI NO: 21536676 NR Description: unknown [Arabidopsis thaliana]
  misc_feature (83)..(424): Homolog of NCBI NO: 7487161 NR Description: hypothetical protein At2g38320 [imported] -
  misc_feature (83)..(424): Homolog of NCBI NO: 18404712 NR Description: expressed protein; protein id: At2g38320.1, by cDNA: gi_13878094 [Arabidopsis thaliana] unknown protein [Arabidopsis thaliana]
  misc_feature (85)..(421): Homolog of NCBI NO: 28876013 NR Description: unknown protein [Oryza sativa (japonica
  misc_feature (78)..(421): Homolog of NCBI NO: 28393743 NR Description: unknown protein [Arabidopsis thaliana]
  misc_feature (78)..(421): Homolog of NCBI NO: 15226647 NR Description: hypothetical protein; protein id: At2g40320.1
  misc_feature (78)..(421): Homolog of NCBI NO: 15228429 NR Description: unknown protein; protein id: At3g11030.1 thaliana] >gi|6016691|gb|AAF01518.1|AC009991_14 unknown protein thaliana] >gi|27754560|gb|AAO22727.1| unknown protein
  misc_feature (78)..(424): Homolog of NCBI NO: 15219382 NR Description: hypothetical protein; protein id: At1g73140.1

SEQ ID NO: 77979 - protein, 314 aa, Arabidopsis thaliana; identical to SEQ ID NO: 38722
  peptide (1)..(314): Ceres Seq. ID no. 12581309
  misc_feature (145)..(314): Pfam Name: Arabidopsis proteins of unknown function Pfam Description: Arabidopsis proteins of unknown function
  misc_feature (1)..(314): Homolog of NCBI NO: 18413698 NR Description: putative protein; protein id: At5g01620.1, by cDNA: 108209., supported by cDNA: gi_19347853 [Arabidopsis >gi|19347854|gb|AAL86006.1| unknown protein [Arabidopsis
  misc_feature (1)..(314): Homolog of NCBI NO: 11291876 NR Description: hypothetical protein F7A7.140 - Arabidopsis >gi|7327821|emb|CAB82278.1| putative protein [Arabidopsis
  misc_feature (1)..(314): Homolog of NCBI NO: 21536676 NR Description: unknown [Arabidopsis thaliana]
  misc_feature (1)..(314): Homolog of NCBI NO: 7487161 NR Description: hypothetical protein At2g38320 [imported] -
  misc_feature (1)..(314): Homolog of NCBI NO: 18404712 NR Description: expressed protein; protein id: At2g38320.1, by cDNA: gi_13878094 [Arabidopsis thaliana] unknown protein [Arabidopsis thaliana]
  misc_feature (1)..(311): Homolog of NCBI NO: 28876013 NR Description: unknown protein [Oryza sativa (japonica
  misc_feature (1)..(311): Homolog of NCBI NO: 28393743 NR Description: unknown protein [Arabidopsis thaliana]
  misc_feature (1)..(311): Homolog of NCBI NO: 15226647 NR Description: hypothetical protein; protein id: At2g40320.1
  misc_feature (1)..(311): Homolog of NCBI NO: 15228429 NR Description: unknown protein; protein id: At3g11030.1 thaliana] >gi|6016691|gb|AAF01518.1|AC009991_14 unknown protein thaliana] >gi|27754560|gb|AAO22727.1| unknown protein
  misc_feature (1)..(314): Homolog of NCBI NO: 15219382 NR Description: hypothetical protein; protein id: At1g73140.1

SEQ ID NO: 77980 - DNA, 1500 bp, Arabidopsis thaliana
  misc_feature (1)..(1500): Ceres Seq. ID no. 12581320
  misc_feature: MA Experiment ID: 108434 Result: Up-regulated in Transcription
  misc_feature: MA Experiment 108434 PARAMETER Experiment Name: At_Root_Tips_cDNA_P Parameter: Tissue Value: Root Tips
  misc_feature: MA Experiment ID: 108461 Result: Up-regulated in Transcription
  misc_feature: MA Experiment 108461 PARAMETER Experiment Name: At_Germinating_Seeds_cDNA_P Parameter: Age (day) Value: 1 vs. 0
  misc_feature: MA Experiment 108461 PARAMETER Experiment Name: At_Germinating_Seeds_cDNA_P Parameter: Tissue Value: Germinating Seeds
  misc_feature: MA Experiment ID: 108462 Result: Up-regulated in Transcription
  misc_feature: MA Experiment 108462 PARAMETER Experiment Name: At_Germinating_Seeds_cDNA_P Parameter: Age (day) Value: 2 vs. 0
  misc_feature: MA Experiment 108462 PARAMETER Experiment Name: At_Germinating_Seeds_cDNA_P Parameter: Tissue Value: Germinating Seeds
  misc_feature: MA Experiment ID: 108569 Result: Up-regulated in Transcription
  misc_feature: MA Experiment 108569 PARAMETER Experiment Name: At_0.001%_MeJA__cDNA_P Parameter: Timepoint (hr) Value: 6
  misc_feature: MA Experiment 108569 PARAMETER Experiment Name: At_0.001%_MeJA__cDNA_P Parameter: Tissue Value: Aerial
  misc_feature: MA Experiment 108569 PARAMETER Experiment Name: At_0.001%_MeJA__cDNA_P Parameter: Treatment Value: 0.001% MeJA vs. No Treatment
  misc_feature: MA Experiment ID: 108573 Result: Up-regulated in Transcription
  misc_feature: MA Experiment 108573 PARAMETER Experiment Name: At_Drought_cDNA_P Parameter: Timepoint (hr) Value: 6
  misc_feature: MA Experiment 108573 PARAMETER Experiment Name: At_Drought_cDNA_P Parameter: Tissue Value: Aerial
  misc_feature: MA Experiment 108573 PARAMETER Experiment Name: At_Drought_cDNA_P Parameter: Treatment Value: Drought vs. No Drought
  misc_feature: MA Experiment ID: 20000087 Result: Down-regulated in Transcription
  misc_feature: MA Experiment 20000087 PARAMETER Experiment Name: At_100uM_ABA_Mutants_cDNA_P Parameter: Plant Line Value: WS
  misc_feature: MA Experiment 20000087 PARAMETER Experiment Name: At_100uM_ABA_Mutants_cDNA_P Parameter: Timepoint (hr) Value: 6
  misc_feature: MA Experiment 20000087 PARAMETER Experiment Name: At_100uM_ABA_Mutants_cDNA_P Parameter: Tissue Value: Aerial
  misc_feature: MA Experiment 20000087 PARAMETER Experiment Name: At_100uM_ABA_Mutants_cDNA_P Parameter: Treatment Value: 100uM ABA vs. No Treatment
  misc_feature: MA Experiment ID: 20000179 Result: Up-regulated in Transcription
  misc_feature: MA Experiment 20000179 PARAMETER Experiment Name: At_Germinating_Seeds_P Parameter: Age (hr) Value: 6 vs. 0
  misc_feature: MA Experiment 20000179 PARAMETER Experiment Name: At_Germinating_Seeds_P Parameter: Tissue Value: Germinating Seeds
  misc_feature: MA Experiment ID: 20000180 Result: Up-regulated in Transcription
  misc_feature: MA Experiment 20000180 PARAMETER Experiment Name: At_Germinating_Seeds_P Parameter: Age (hr) Value: 24 vs. 0
  misc_feature: MA Experiment 20000180 PARAMETER Experiment Name: At_Germinating_Seeds_P Parameter: Tissue Value: Germinating Seeds
  misc_feature: MA Experiment ID: 20000184 Result: Up-regulated in Transcription
  misc_feature: MA Experiment 20000184 PARAMETER Experiment Name: At_Shoots__P Parameter: Age (day) Value: 7
  misc_feature: MA Experiment 20000184 PARAMETER Experiment Name: At_Shoots__P Parameter: Tissue Value: Shoots vs. Whole Plant
  misc_feature: MA Experiment ID: 20000234 Result: Up-regulated in Transcription
  misc_feature: MA Experiment 20000234 PARAMETER Experiment Name: At_Siliques_P Parameter: Age (day) Value: 21
  misc_feature: MA Experiment 20000234 PARAMETER Experiment Name: At_Siliques_P Parameter: Organism Value: A. thaliana
  misc_feature: MA Experiment 20000234 PARAMETER Experiment Name: At_Siliques_P Parameter: Plant Line Value: WS
  misc_feature: MA Experiment 20000234 PARAMETER Experiment Name: At_Siliques_P Parameter: Tissue Value: Less Than 5mm Siliques vs. Whole Plant
  misc_feature: MA Experiment ID: 20000264 Result: Up-regulated in Transcription
  misc_feature: MA Experiment 20000264 PARAMETER Experiment Name: At_Open_Flower_P Parameter: Age (day) Value: 21
  misc_feature: MA Experiment 20000264 PARAMETER Experiment Name: At_Open_Flower_P Parameter: Plant Line Value: WS
  misc_feature: MA Experiment 20000264 PARAMETER Experiment Name: At_Open_Flower_P Parameter: Tissue Value: Open Flower vs. Whole Plant
  misc_feature: MA Experiment ID: 20000265 Result: Up-regulated in Transcription
  misc_feature: MA Experiment 20000265 PARAMETER Experiment Name: At_Open_Flower_P Parameter: Age (day) Value: 21
  misc_feature: MA Experiment 20000265 PARAMETER Experiment Name: At_Open_Flower_P Parameter: Plant Line Value: WS
  misc_feature: MA Experiment 20000265 PARAMETER Experiment Name: At_Open_Flower_P Parameter: Tissue Value: Closed Flower vs. Whole Plant
  misc_feature: MA Experiment ID: 20000286 Result: Up-regulated in Transcription
  misc_feature: MA Experiment 20000286 PARAMETER Experiment Name: At_Open_Flower_P Parameter: Age (day) Value: 21
  misc_feature: MA Experiment 20000286 PARAMETER Experiment Name: At_Open_Flower_P Parameter: Plant Line Value: WS
  misc_feature: MA Experiment 20000286 PARAMETER Experiment Name: At_Open_Flower_P Parameter: Tissue Value: Half Open vs. Whole Plant
gtcgaagcctttggacccgtttttatatttactcctcccattcccttctccttcaatccttccttcctcctcctcccttcttcttcttcccctctttcattttccagccactacaaacttttctatctctactttttttcctctcgatttcaggtagaagaaaatggctgatggtgaagacattcaacctcttgtttgcgacaatggaactggaatggttaaggctggttttgctggggatgatgcacctagagctgtgtttcctagtattgtgggtcgtcctcgtcacaccggtgtgatggttgggatggggcaaaaggatgcttatgttggcgatgaagctcaatccaaacgaggtattttaactctcaagtaccctattgagcatggaattgtcaacaattgggatgacatggagaagatttggcatcacactttctacaatgagctccgtgttgctcctgaggaacatcctattctacttaccgaggcaccgcttaacccgaaagctaatcgtgagaagatgactcaaatcatgtttgagactttcaatgcccctgctatgtatgtggctattcaggctgttctttctctttatgccagtggtcgtactaccggtattgtgctcgactctggagatggtgtgagccacactgttcctatctatgaggggtatgcacttccacatgctatcctacgtcttgatcttgctggtcgtgacctcacggatgcgctgatgaagatcctaaccgagcgtggttactctttcaccaccacagcagagcgtgaaattgtcagagacataaaggagaagctttgctacattgctcttgactacgagcaggaactcgagacagccaaaaccagctcatctgttgagaagaactacgagctacctgatgggcaagtgatcaccattggatcagagcgattccgttgtcctgaggttctttaccagccatctatgattggtatggagaatgctggtatccatgaaaccacctataactccataatgaagtgtgatgtcgacatcaggaaggacttgtacggtaacattgtgctcagtggtggaaccacaatgttccctggaatcgccgacagaatgagcaaagagatcactgctttggctccaagcagcatgaagatcaaagtcgttgcccctccagagaggaaatactctgtctggattggagggtccatcttggcctccctcagtaccttccagcagatgtggatcgcaaaggcagagtatgacgagtcaggtccatcgattgttcacaggaagtgcttctgagttcaaagttgatcatttttcagagaagaagcaccgccagggtttttccgaccatttctcaagccgggtttttaatcttccgttattctgctctttgtttttgttctcttatgttttgaaattcatgccaaatacattttcatggatttatggtaatctgtttgtagtatggtttaaaatctaatgcaactgtgtttttgagt

SEQ ID NO: 77981 - protein, 377 aa, Arabidopsis thaliana; identical to SEQ ID NO: 36003
  peptide (1)..(377): Ceres Seq. ID no. 12581321
  misc_feature (1)..(377): Pfam Name: Actin Pfam Description: Actin
  misc_feature (1)..(377): Homolog of NCBI NO: 18409908 NR Description: actin (ACT3); protein id: At3g53750.1, supported cDNA: 25785., supported by cDNA: gi_15146303 [Arabidopsis >gi|22326216|ref|NP_565867.2| actin 3; protein id: At2g37620.1,
  misc_feature (1)..(377): Homolog of NCBI NO: 71633 NR Description: actin - Arabidopsis thaliana
  misc_feature (1)..(377): Homolog of NCBI NO: 11276975 NR Description: actin [imported] - upland cotton
  misc_feature (1)..(377): Homolog of NCBI NO: 11276977 NR Description: actin [imported] - Striga asiatica
  misc_feature (1)..(377): Homolog of NCBI NO: 231503 NR Description: ACTIN 97 >gi|100417|pir||S20098 actin 97 - potato
  misc_feature (1)..(377): Homolog of NCBI NO: 11276978 NR Description: actin ACT2 [imported] - Striga asiatica
  misc_feature (1)..(377): Homolog of NCBI NO: 23092520 NR Description: actin [Phalaenopsis hybrid cultivar]
  misc_feature (1)..(377): Homolog of NCBI NO: 15231447 NR Description: actin 12; protein id: At3g46520.1 [Arabidopsis
  misc_feature (1)..(377): Homolog of NCBI NO: 11276968 NR Description: actin [imported] - Picea rubens
  misc_feature (1)..(377): Homolog of NCBI NO: 11276980 NR Description: actin (ACT3) - Arabidopsis thaliana

SEQ ID NO: 77982 - protein, 360 aa, Arabidopsis thaliana; identical to SEQ ID NO: 36004
  peptide (1)..(360): Ceres Seq. ID no. 12581322
  misc_feature (1)..(360): Pfam Name: Actin Pfam Description: Actin
  misc_feature (1)..(360): Homolog of NCBI NO: 18409908 NR Description: actin (ACT3); protein id: At3g53750.1, supported cDNA: 25785., supported by cDNA: gi_15146303 [Arabidopsis >gi|22326216|ref|NP_565867.2| actin 3; protein id: At2g37620.1,
  misc_feature (1)..(360): Homolog of NCBI NO: 71633 NR Description: actin - Arabidopsis thaliana
  misc_feature (1)..(360): Homolog of NCBI NO: 11276975 NR Description: actin [imported] - upland cotton
  misc_feature (1)..(360): Homolog of NCBI NO: 11276977 NR Description: actin [imported] - Striga asiatica
  misc_feature (1)..(360): Homolog of NCBI NO: 231503 NR Description: ACTIN 97 >gi|100417|pir||S20098 actin 97 - potato
  misc_feature (1)..(360): Homolog of NCBI NO: 11276978 NR Description: actin ACT2 [imported] - Striga asiatica
  misc_feature (1)..(360): Homolog of NCBI NO: 23092520 NR Description: actin [Phalaenopsis hybrid cultivar]
  misc_feature (1)..(360): Homolog of NCBI NO: 15231447 NR Description: actin 12; protein id: At3g46520.1 [Arabidopsis
  misc_feature (1)..(360): Homolog of NCBI NO: 11276968 NR Description: actin [imported] - Picea rubens
  misc_feature (1)..(360): Homolog of NCBI NO: 11276980 NR Description: actin (ACT3) - Arabidopsis thaliana

SEQ ID NO: 77983 - protein, 332 aa, Arabidopsis thaliana; identical to SEQ ID NO: 36005
  peptide (1)..(332): Ceres Seq. ID no. 12581323
  misc_feature (1)..(332): Pfam Name: Actin Pfam Description: Actin
  misc_feature (1)..(332): Homolog of NCBI NO: 18409908 NR Description: actin (ACT3); protein id: At3g53750.1, supported cDNA: 25785., supported by cDNA: gi_15146303 [Arabidopsis >gi|22326216|ref|NP_565867.2| actin 3; protein id: At2g37620.1,
  misc_feature (1)..(332): Homolog of NCBI NO: 71633 NR Description: actin - Arabidopsis thaliana
  misc_feature (1)..(332): Homolog of NCBI NO: 11276975 NR Description: actin [imported] - upland cotton
  misc_feature (1)..(332): Homolog of NCBI NO: 11276977 NR Description: actin [imported] - Striga asiatica
  misc_feature (1)..(332): Homolog of NCBI NO: 231503 NR Description: ACTIN 97 >gi|100417|pir||S20098 actin 97 - potato
  misc_feature (1)..(332): Homolog of NCBI NO: 11276978 NR Description: actin ACT2 [imported] - Striga asiatica
  misc_feature (1)..(332): Homolog of NCBI NO: 23092520 NR Description: actin [Phalaenopsis hybrid cultivar]
  misc_feature (1)..(332): Homolog of NCBI NO: 15231447 NR Description: actin 12; protein id: At3g46520.1 [Arabidopsis
  misc_feature (1)..(332): Homolog of NCBI NO: 11276968 NR Description: actin [imported] - Picea rubens
  misc_feature (1)..(332): Homolog of NCBI NO: 11276980 NR Description: actin (ACT3) - Arabidopsis thaliana

SEQ ID NO: 77984 - DNA, 1788 bp, Arabidopsis thaliana
  misc_feature (1)..(1788): Ceres Seq. ID no. 12581335
  misc_feature: MA Experiment ID: 108434 Result: Down-regulated in Transcription
  misc_feature: MA Experiment 108434 PARAMETER Experiment Name: At_Root_Tips_cDNA_P Parameter: Tissue Value: Root Tips
  misc_feature: MA Experiment ID: 108461 Result: Down-regulated in Transcription
  misc_feature: MA Experiment 108461 PARAMETER Experiment Name: At_Germinating_Seeds_cDNA_P Parameter: Age (day) Value: 1 vs. 0
  misc_feature: MA Experiment 108461 PARAMETER Experiment Name: At_Germinating_Seeds_cDNA_P Parameter: Tissue Value: Germinating Seeds
  misc_feature: MA Experiment ID: 108464 Result: Up-regulated in Transcription
  misc_feature: MA Experiment 108464 PARAMETER Experiment Name: At_Germinating_Seeds_cDNA_P Parameter: Age (day) Value: 4 vs. 0
  misc_feature: MA Experiment 108464 PARAMETER Experiment Name: At_Germinating_Seeds_cDNA_P Parameter: Tissue Value: Germinating Seeds
  misc_feature: MA Experiment ID: 108572 Result: Down-regulated in Transcription
  misc_feature: MA Experiment 108572 PARAMETER Experiment Name: At_Drought_cDNA_P Parameter: Timepoint (hr) Value: 1
  misc_feature: MA Experiment 108572 PARAMETER Experiment Name: At_Drought_cDNA_P Parameter: Tissue Value: Aerial
  misc_feature: MA Experiment 108572 PARAMETER Experiment Name: At_Drought_cDNA_P Parameter: Treatment Value: Drought vs. No Drought
  misc_feature: MA Experiment ID: 108573 Result: Down-regulated in Transcription
  misc_feature: MA Experiment 108573 PARAMETER Experiment Name: At_Drought_cDNA_P Parameter: Timepoint (hr) Value: 6
  misc_feature: MA Experiment 108573 PARAMETER Experiment Name: At_Drought_cDNA_P Parameter: Tissue Value: Aerial
  misc_feature: MA Experiment 108573 PARAMETER Experiment Name: At_Drought_cDNA_P Parameter: Treatment Value: Drought vs. No Drought
  misc_feature: MA Experiment ID: 108576 Result: Down-regulated in Transcription
  misc_feature: MA Experiment 108576 PARAMETER Experiment Name: At_42deg_Heat_cDNA_P Parameter: Temperature (deg C) Value: 42 vs. 22
  misc_feature: MA Experiment 108576 PARAMETER Experiment Name: At_42deg_Heat_cDNA_P Parameter: Timepoint (hr) Value: 1
  misc_feature: MA Experiment 108576 PARAMETER Experiment Name: At_42deg_Heat_cDNA_P Parameter: Tissue Value: Aerial
  misc_feature: MA Experiment ID: 108577 Result: Down-regulated in Transcription
  misc_feature: MA Experiment 108577 PARAMETER Experiment Name: At_42deg_Heat_cDNA_P Parameter: Temperature (deg C) Value: 42 vs. 22
  misc_feature: MA Experiment 108577 PARAMETER Experiment Name: At_42deg_Heat_cDNA_P Parameter: Timepoint (hr) Value: 6
  misc_feature: MA Experiment 108577 PARAMETER Experiment Name: At_42deg_Heat_cDNA_P Parameter: Tissue Value: Aerial
  misc_feature: MA Experiment ID: 108585 Result: Up-regulated in Transcription
  misc_feature: MA Experiment 108585 PARAMETER Experiment Name: At_5mM_NaNP_cDNA_P Parameter: Timepoint (hr) Value: 6
  misc_feature: MA Experiment 108585 PARAMETER Experiment Name: At_5mM_NaNP_cDNA_P Parameter: Tissue Value: Aerial
  misc_feature: MA Experiment 108585 PARAMETER Experiment Name: At_5mM_NaNP_cDNA_P Parameter: Treatment Value: null
  misc_feature: MA Experiment ID: 108595 Result: Down-regulated in Transcription
  misc_feature: MA Experiment 108595 PARAMETER Experiment Name: At_Ler-pi_Ovule_cDNA_P Parameter: Plant Line Value: null
  misc_feature: MA Experiment ID: 108607 Result: Down-regulated in Transcription
  misc_feature: MA Experiment 108607 PARAMETER Experiment Name: At_100uM_ABA_cDNA_P Parameter: Timepoint (hr) Value: 4
  misc_feature: MA Experiment 108607 PARAMETER Experiment Name: At_100uM_ABA_cDNA_P Parameter: Tissue Value: Aerial
  misc_feature: MA Experiment 108607 PARAMETER Experiment Name: At_100uM_ABA_cDNA_P Parameter: Treatment Value: 100uM ABA vs. No Treatment
  misc_feature: MA Experiment ID: 108608 Result: Down-regulated in Transcription
  misc_feature: MA Experiment 108608 PARAMETER Experiment Name: At_100uM_ABA_cDNA_P Parameter: Timepoint (hr) Value: 1
  misc_feature: MA Experiment 108608 PARAMETER Experiment Name: At_100uM_ABA_cDNA_P Parameter: Tissue Value: Aerial
  misc_feature: MA Experiment 108608 PARAMETER Experiment Name: At_100uM_ABA_cDNA_P Parameter: Treatment Value: 100uM ABA vs. No Treatment
  misc_feature: MA Experiment ID: 108668 Result: Down-regulated in Transcription
  misc_feature: MA Experiment 108668 PARAMETER Experiment Name: At_2mM_SA_cDNA_P Parameter: Plant Line Value: WS
  misc_feature: MA Experiment 108668 PARAMETER Experiment Name: At_2mM_SA_cDNA_P Parameter: Timepoint (hr) Value: 6
  misc_feature: MA Experiment 108668 PARAMETER Experiment Name: At_2mM_SA_cDNA_P Parameter: Treatment Value: 2mM SA vs. No Treatment
  misc_feature: MA Experiment ID: 20000112 Result: Down-regulated in Transcription
  misc_feature: MA Experiment 20000112 PARAMETER Experiment Name: At_42deg_Heat_cDNA_P Parameter: Temperature (deg C) Value: 42 vs. 22
  misc_feature: MA Experiment 20000112 PARAMETER Experiment Name: At_42deg_Heat_cDNA_P Parameter: Timepoint (hr) Value: 2
  misc_feature: MA Experiment 20000112 PARAMETER Experiment Name: At_42deg_Heat_cDNA_P Parameter: Tissue Value: Aerial
  misc_feature: MA Experiment ID: 20000113 Result: Down-regulated in Transcription
  misc_feature: MA Experiment 20000113 PARAMETER Experiment Name: At_42deg_Heat_cDNA_P Parameter: Temperature (deg C) Value: 42 vs. 22
  misc_feature: MA Experiment 20000113 PARAMETER Experiment Name: At_42deg_Heat_cDNA_P Parameter: Timepoint (hr) Value: 8
  misc_feature: MA Experiment 20000113 PARAMETER Experiment Name: At_42deg_Heat_cDNA_P Parameter: Tissue Value: Aerial
  misc_feature: MA Experiment ID: 20000144 Result: Down-regulated in Transcription
  misc_feature: MA Experiment 20000144 PARAMETER Experiment Name: At_42deg_Heat_cDNA_P Parameter: Temperature (deg C) Value: 42 vs. 22
  misc_feature: MA Experiment 20000144 PARAMETER Experiment Name: At_42deg_Heat_cDNA_P Parameter: Timepoint (hr) Value: 1
  misc_feature: MA Experiment 20000144 PARAMETER Experiment Name: At_42deg_Heat_cDNA_P Parameter: Tissue Value: Aerial
  misc_feature: MA Experiment ID: 20000166 Result: Down-regulated in Transcription
  misc_feature: MA Experiment 20000166 PARAMETER Experiment Name: At_100uM_ABA_P Parameter: Age (day) Value: 14
  misc_feature: MA Experiment 20000166 PARAMETER Experiment Name: At_100uM_ABA_P Parameter: Organism Value: A. thaliana
  misc_feature: MA Experiment 20000166 PARAMETER Experiment Name: At_100uM_ABA_P Parameter: Plant Line Value: WS
  misc_feature: MA Experiment 20000166 PARAMETER Experiment Name: At_100uM_ABA_P Parameter: Timepoint (hr) Value: 1
  misc_feature: MA Experiment 20000166 PARAMETER Experiment Name: At_100uM_ABA_P Parameter: Tissue Value: Aerial
  misc_feature: MA Experiment 20000166 PARAMETER Experiment Name: At_100uM_ABA_P Parameter: Treatment Value: 100uM ABA vs. No Treatment
  misc_feature: MA Experiment ID: 20000171 Result: Down-regulated in Transcription
  misc_feature: MA Experiment 20000171 PARAMETER Experiment Name: At_42deg_Heat_P Parameter: Age (day) Value: 14
  misc_feature: MA Experiment 20000171 PARAMETER Experiment Name: At_42deg_Heat_P Parameter: Organism Value: A. thaliana
  misc_feature: MA Experiment 20000171 PARAMETER Experiment Name: At_42deg_Heat_P Parameter: Plant Line Value: WS
  misc_feature: MA Experiment 20000171 PARAMETER Experiment Name: At_42deg_Heat_P Parameter: Temperature (deg C) Value: 42 vs. 22
  misc_feature: MA Experiment 20000171 PARAMETER Experiment Name: At_42deg_Heat_P Parameter: Timepoint (hr) Value: 1
  misc_feature: MA Experiment 20000171 PARAMETER Experiment Name: At_42deg_Heat_P Parameter: Tissue Value: Aerial
  misc_feature: MA Experiment ID: 20000173 Result: Down-regulated in Transcription
  misc_feature: MA Experiment 20000173 PARAMETER Experiment Name: At_42deg_Heat_P Parameter: Age (day) Value: 14
  misc_feature: MA Experiment 20000173 PARAMETER Experiment Name: At_42deg_Heat_P Parameter: Organism Value: A. thaliana
  misc_feature: MA Experiment 20000173 PARAMETER Experiment Name: At_42deg_Heat_P Parameter: Plant Line Value: WS
  misc_feature: MA Experiment 20000173 PARAMETER Experiment Name: At_42deg_Heat_P Parameter: Temperature (deg C) Value: 42 vs. 22
  misc_feature: MA Experiment 20000173 PARAMETER Experiment Name: At_42deg_Heat_P Parameter: Timepoint (hr) Value: 6
  misc_feature: MA Experiment 20000173 PARAMETER Experiment Name: At_42deg_Heat_P Parameter: Tissue Value: Aerial
  misc_feature: MA Experiment ID: 20000179 Result: Down-regulated in Transcription
  misc_feature: MA Experiment 20000179 PARAMETER Experiment Name: At_Germinating_Seeds_P Parameter: Age (hr) Value: 6 vs. 0
  misc_feature: MA Experiment 20000179 PARAMETER Experiment Name: At_Germinating_Seeds_P Parameter: Tissue Value: Germinating Seeds
  misc_feature: MA Experiment ID: 20000180 Result: Down-regulated in Transcription
  misc_feature: MA Experiment 20000180 PARAMETER Experiment Name: At_Germinating_Seeds_P Parameter: Age (hr) Value: 24 vs. 0
  misc_feature: MA Experiment 20000180 PARAMETER Experiment Name: At_Germinating_Seeds_P Parameter: Tissue Value: Germinating Seeds
  misc_feature: MA Experiment ID: 20000185 Result: Down-regulated in Transcription
  misc_feature: MA Experiment 20000185 PARAMETER Experiment Name: At_Roots__P Parameter: Age (day) Value: 7 vs. 21
  misc_feature: MA Experiment 20000185 PARAMETER Experiment Name: At_Roots__P Parameter: Organism Value: A. thaliana
  misc_feature: MA Experiment 20000185 PARAMETER Experiment Name: At_Roots__P Parameter: Tissue Value: Roots vs. Whole Plant
  misc_feature: MA Experiment ID: 20000234 Result: Down-regulated in Transcription
  misc_feature: MA Experiment 20000234 PARAMETER Experiment Name: At_Siliques_P Parameter: Age (day) Value: 21
  misc_feature: MA Experiment 20000234 PARAMETER Experiment Name: At_Siliques_P Parameter: Organism Value: A. thaliana
  misc_feature: MA Experiment 20000234 PARAMETER Experiment Name: At_Siliques_P Parameter: Plant Line Value: WS
  misc_feature: MA Experiment 20000234 PARAMETER Experiment Name: At_Siliques_P Parameter: Tissue Value: Less Than 5mm Siliques vs. Whole Plant
  misc_feature: MA Experiment ID: 20000264 Result: Down-regulated in Transcription
  misc_feature: MA Experiment 20000264 PARAMETER Experiment Name: At_Open_Flower_P Parameter: Age (day) Value: 21
  misc_feature: MA Experiment 20000264 PARAMETER Experiment Name: At_Open_Flower_P Parameter: Plant Line Value: WS
  misc_feature: MA Experiment 20000264 PARAMETER Experiment Name: At_Open_Flower_P Parameter: Tissue Value: Open Flower vs. Whole Plant
  misc_feature: MA Experiment ID: 20000265 Result: Down-regulated in Transcription
  misc_feature: MA Experiment 20000265 PARAMETER Experiment Name: At_Open_Flower_P Parameter: Age (day) Value: 21
  misc_feature: MA Experiment 20000265 PARAMETER Experiment Name: At_Open_Flower_P Parameter: Plant Line Value: WS
  misc_feature: MA Experiment 20000265 PARAMETER Experiment Name: At_Open_Flower_P Parameter: Tissue Value: Closed Flower vs. Whole Plant
  misc_feature: MA Experiment ID: 20000268 Result: Down-regulated in Transcription
  misc_feature: MA Experiment 20000268 PARAMETER Experiment Name: At_100mM_NaCl__P Parameter: Age (day) Value: 14
  misc_feature: MA Experiment 20000268 PARAMETER Experiment Name: At_100mM_NaCl__P Parameter: Organism Value: A. thaliana
  misc_feature: MA Experiment 20000268 PARAMETER Experiment Name: At_100mM_NaCl__P Parameter: Plant Line Value: WS
  misc_feature: MA Experiment 20000268 PARAMETER Experiment Name: At_100mM_NaCl__P Parameter: Timepoint (hr) Value: 6
  misc_feature: MA Experiment 20000268 PARAMETER Experiment Name: At_100mM_NaCl__P Parameter: Tissue Value: Whole Plant
  misc_feature: MA Experiment 20000268 PARAMETER Experiment Name: At_100mM_NaCl__P Parameter: Treatment Value: 100mM NaCl vs. No Treatment
  misc_feature: MA Experiment ID: 20000286 Result: Down-regulated in Transcription
  misc_feature: MA Experiment 20000286 PARAMETER Experiment Name: At_Open_Flower_P Parameter: Age (day) Value: 21
  misc_feature: MA Experiment 20000286 PARAMETER Experiment Name: At_Open_Flower_P Parameter: Plant Line Value: WS
  misc_feature: MA Experiment 20000286 PARAMETER Experiment Name: At_Open_Flower_P Parameter: Tissue Value: Half Open vs. Whole Plant
  misc_feature: MA Experiment ID: 20000437 Result: Down-regulated in Transcription
  misc_feature: MA Experiment 20000437 PARAMETER Experiment Name: At_Drought_P Parameter: Age (day) Value: 8
  misc_feature: MA Experiment 20000437 PARAMETER Experiment Name: At_Drought_P Parameter: Organism Value: A. thaliana
  misc_feature: MA Experiment 20000437 PARAMETER Experiment Name: At_Drought_P Parameter: Plant Line Value: WS
  misc_feature: MA Experiment 20000437 PARAMETER Experiment Name: At_Drought_P Parameter: Timepoint (hr) Value: 24
  misc_feature: MA Experiment 20000437 PARAMETER Experiment Name: At_Drought_P Parameter: Tissue Value: Whole Plant
  misc_feature: MA Experiment 20000437 PARAMETER Experiment Name: At_Drought_P Parameter: Treatment Value: Drought vs. No Drought
  misc_feature: MA Experiment ID: 20000439 Result: Down-regulated in Transcription
  misc_feature: MA Experiment 20000439 PARAMETER Experiment Name: At_Roots__P Parameter: Age (day) Value: 14 vs. 21
  misc_feature: MA Experiment 20000439 PARAMETER Experiment Name: At_Roots__P Parameter: Organism Value: A. thaliana
  misc_feature: MA Experiment 20000439 PARAMETER Experiment Name: At_Roots__P Parameter: Tissue Value: Roots vs. Whole Plant
  misc_feature: MA Experiment ID: 20000441 Result: Up-regulated in Transcription
  misc_feature: MA Experiment 20000441 PARAMETER Experiment Name: At_1uM_BR-BRZ__P Parameter: Tissue Value: Shoot Apices
  misc_feature: MA Experiment 20000441 PARAMETER Experiment Name: At_1uM_BR-BRZ__P Parameter: Treatment Value: 1uM BR vs. No Treatment
  misc_feature: MA Experiment ID: 20000443 Result: Up-regulated in Transcription
  misc_feature: MA Experiment 20000443 PARAMETER Experiment Name: At_1uM_BR-BRZ__P Parameter: Tissue Value: Shoot Apices
  misc_feature: MA Experiment 20000443 PARAMETER Experiment Name: At_1uM_BR-BRZ__P Parameter: Treatment Value: 1uM BRZ vs. No Treatment
  misc_feature: MA Experiment ID: 20000573 Result: Down-regulated in Transcription
  misc_feature: MA Experiment 20000573 PARAMETER Experiment Name: At_100uM_ABA_Mutants__P Parameter: Organism Value: A. thaliana
  misc_feature: MA Experiment 20000573 PARAMETER Experiment Name: At_100uM_ABA_Mutants__P Parameter: Plant Line Value: CS22 vs. Ler wt
  misc_feature: MA Experiment 20000573 PARAMETER Experiment Name: At_100uM_ABA_Mutants__P Parameter: Timepoint (hr) Value: N/A
  misc_feature: MA Experiment 20000573 PARAMETER Experiment Name: At_100uM_ABA_Mutants__P Parameter: Tissue Value: Whole Plant
  misc_feature: MA Experiment 20000573 PARAMETER Experiment Name: At_100uM_ABA_Mutants__P Parameter: Treatment Value: None
  misc_feature: MA Experiment ID: 20000794 Result: Down-regulated in Transcription
  misc_feature: MA Experiment 20000794 PARAMETER Experiment Name: At_Petals_P Parameter: Age (day) Value: 23-25 days
  misc_feature: MA Experiment 20000794 PARAMETER Experiment Name: At_Petals_P Parameter: Plant Line Value: WS
  misc_feature: MA Experiment 20000794 PARAMETER Experiment Name: At_Petals_P Parameter: Tissue Value: Petals vs. Whole plant
  misc_feature: MA Experiment ID: 20001248 Result: Down-regulated in Transcription
  misc_feature: MA Experiment 20001248 PARAMETER Experiment Name: At_Far-red-induction_P Parameter: Age (day) Value: 7
  misc_feature: MA Experiment 20001248 PARAMETER Experiment Name: At_Far-red-induction_P Parameter: Light Value: Far-red vs. White
  misc_feature: MA Experiment 20001248 PARAMETER Experiment Name: At_Far-red-induction_P Parameter: Organism Value: A. thaliana
  misc_feature: MA Experiment 20001248 PARAMETER Experiment Name: At_Far-red-induction_P Parameter: Plant Line Value: Columbia
  misc_feature: MA Experiment 20001248 PARAMETER Experiment Name: At_Far-red-induction_P Parameter: Timepoint (hr) Value: 4
  misc_feature: MA Experiment 20001248 PARAMETER Experiment Name: At_Far-red-induction_P Parameter: Tissue Value: Whole Plant
  misc_feature: MA Experiment ID: 20001450 Result: Down-regulated in Transcription
  misc_feature: MA Experiment 20001450 PARAMETER Experiment Name: At_Far-red-induction_P Parameter: Age (day) Value: 7
  misc_feature: MA Experiment 20001450 PARAMETER Experiment Name: At_Far-red-induction_P Parameter: Light Value: Far-red vs. White
  misc_feature: MA Experiment 20001450 PARAMETER Experiment Name: At_Far-red-induction_P Parameter: Organism Value: A. thaliana
  misc_feature: MA Experiment 20001450 PARAMETER Experiment Name: At_Far-red-induction_P Parameter: Plant Line Value: Columbia
  misc_feature: MA Experiment 20001450 PARAMETER Experiment Name: At_Far-red-induction_P Parameter: Timepoint (hr) Value: 8
  misc_feature: MA Experiment 20001450 PARAMETER Experiment Name: At_Far-red-induction_P Parameter: Tissue Value: Whole Plant
  misc_feature: MA Experiment ID: 20001451 Result: Down-regulated in Transcription
  misc_feature: MA Experiment 20001451 PARAMETER Experiment Name: At_Far-red-induction_P Parameter: Age (day) Value: 7
  misc_feature: MA Experiment 20001451 PARAMETER Experiment Name: At_Far-red-induction_P Parameter: Light Value: Far-red vs. White
  misc_feature: MA Experiment 20001451 PARAMETER Experiment Name: At_Far-red-induction_P Parameter: Organism Value: A. thaliana
  misc_feature: MA Experiment 20001451 PARAMETER Experiment Name: At_Far-red-induction_P Parameter: Plant Line Value: Columbia
  misc_feature: MA Experiment 20001451 PARAMETER Experiment Name: At_Far-red-induction_P Parameter: Timepoint (hr) Value: 24
  misc_feature: MA Experiment 20001451 PARAMETER Experiment Name: At_Far-red-induction_P Parameter: Tissue Value: Whole Plant
  misc_feature: MA Experiment ID: 20001560 Result: Down-regulated in Transcription
  misc_feature: MA Experiment 20001560 PARAMETER Experiment Name: At_Drought_Soil_Dry_P Parameter: Age (day) Value: 28
  misc_feature: MA Experiment 20001560 PARAMETER Experiment Name: At_Drought_Soil_Dry_P Parameter: Organism Value: A. thaliana
  misc_feature: MA Experiment 20001560 PARAMETER Experiment Name: At_Drought_Soil_Dry_P Parameter: Plant Line Value: WS
  misc_feature: MA Experiment 20001560 PARAMETER Experiment Name: At_Drought_Soil_Dry_P Parameter: Post Timepoint (hr) Value: None
  misc_feature: MA Experiment 20001560 PARAMETER Experiment Name: At_Drought_Soil_Dry_P Parameter: Post-Treatment Value: None
  misc_feature: MA Experiment 20001560 PARAMETER Experiment Name: At_Drought_Soil_Dry_P Parameter: Timepoint (day) Value: 14
  misc_feature: MA Experiment 20001560 PARAMETER Experiment Name: At_Drought_Soil_Dry_P Parameter: Treatment Value: Drought vs. No Drought
accacacaacacaaaacctccaaaccaataatcagaacacagtgagatatttctctctgaagccaaagatggaaacggcgtcttctaatttctctctctcgcagatcctcaatattgaggaaccctacagctccgtaatgctcggtgtcgccgctctcttggccgttgtttgctatttctggatacaggggaagtccaaatccaagaacggaccaccgttgcctccgggaccttggccacttccgatcgtcggcaacctcccgttcctaaactctgacgtcctccacacgcaattccaagccctaaccctaaaacatggccctctcatgaagatccacctcggttccaaacttgcgatcgtcgtctcttcccctgacatggctcgcgaggttctcaaaacccacgacatcactttcgccaaccacgatctccctgaagtcggaaagatcaacacttacggtggtgaagacatcctctggtctccttacggtacccattggaggagacttcgtaagctctgcgtcatgaagatgttcactaccccaactctcgaagcttcctactccactcgccgggaagaaacccgacaaaccattgtccacatgtcggaaatggctcgtgaaggatcaccagtcaacctcggagagcaaatatttctttccattttcaacgtcgtgacaagaatgatgtggggcgccactgttgaaggagacgagagaacgagcttaggaaacgagctcaaaaccctaatatctgatatctccgacatagaagggattcaaaactactcagatttctttccgttgttctcaagattcgatttccaaggattggttaagcagatgaaaggccatgtgaagaagcttgatctcttgttcgatagagttatggagagtcacgtcaaaatggtgggaaagaagagcgaagaagaagaagatttcttgcaatacttacttagagttaaagatgatgatgagaaagctcctctgtccatgactcatgtcaagtctctcctcatggatatggttcttggtggtgtcgacacatcggttaacgcatccgaattcgccatggcagagattgtgagcagaccggaagtgttaaacaagatccgactagaacttgaccaagttgttggcaaagacaacatcgttgaggaatcacatttacctaagcttccttacctacaagcggttatgaaagagactcttaggcttcaccctacgcttcctcttcttgttcctcacagaaacagcgaaacctcggtggttgcgggatacactgtgcctaaagactccaagattttcatcaacgtttgggcgattcatagagatcctaagaattgggatgaaccaaacgagttcaaacctgagaggtttttggagaattcgcttgatttcaatggaggtgattttaagtacttgccttttgggtcaggaaggaggatttgtgcggcgattaacatggctgagagacttgttctgttcaacattgcttcacttcttcactcttttgattggaaagcacctcaaggacagaagtttgaggttgaagagaagtttggtcttgttcttaagttgaagtctccacttgtggctattcctgttccaaggttgtccgatccaaaactctatacagcttaagtaagtaagaaggaaatttggtttgagcttatgagaggaagttgaattgagttttcttgtttaaagtttatttttctttattcgtgtttggagtttgatgctttgtaaaaaaagatgtgtcaagttaaatttaattttcttatat

SEQ ID NO: 77985 - protein, 546 aa, Arabidopsis thaliana
  peptide (1)..(546): Ceres Seq. ID no. 12581336
  misc_feature (1)..(546): Homolog of NCBI NO: 30685891 NR Description: cytochrome P450 family [Arabidopsis thaliana]
  misc_feature (23)..(546): Homolog of NCBI NO: 7430667 NR Description: cytochrome P450 homolog T12H17.80 - Arabidopsis >gi|2827546|emb|CAA16554.1| cytochrome P450 like protein thaliana] >gi|7269115|emb|CAB79224.1| cytochrome P450 like
  misc_feature (23)..(546): Homolog of NCBI NO: 15810341 NR Description: putative cytochrome P450 protein [Arabidopsis
  misc_feature (23)..(546): Homolog of NCBI NO: 15235775 NR Description: cytochrome p450 family; protein id: At4g22710.1
  misc_feature (52)..(544): Homolog of NCBI NO: 15241541 NR Description: cytochrome p450 family; protein id: At5g44620.1, by cDNA: gi_16226349 [Arabidopsis thaliana]
  misc_feature (49)..(544): Homolog of NCBI NO: 11345411 NR Description: putative cytochrome P450 [Matthiola incana]
  misc_feature (28)..(544): Homolog of NCBI NO: 15234514 NR Description: cytochrome p450 family; protein id: At4g12300.1
  misc_feature (30)..(544): Homolog of NCBI NO: 15234521 NR Description: cytochrome p450 family; protein id: At4g12330.1, by cDNA: gi_20260371 [Arabidopsis thaliana]
  misc_feature (41)..(544): Homolog of NCBI NO: 15234517 NR Description: cytochrome p450, putative; protein id: At4g12310.1
  misc_feature (52)..(505): Homolog of NCBI NO: 16226350 NR Description: AT5g44620/K15C23_6 [Arabidopsis thaliana]
HTTQNLQTNNQNTVRYFSLKPKMETASSNFSLSQILNIEEPYSSVMLGVAALLAVVCYFWIQGKSKSKNGPPLPPGPWPLPIVGNLPFLNSDVLHTQFQALTLKHGPLMKIHLGSKLAIVVSSPDMAREVLKTHDITFANHDLPEVGKINTYGGEDILWSPYGTHWRRLRKLCVMKMFTTPTLEASYSTRREETRQTIVHMSEMAREGSPVNLGEQIFLSIFNVVTRMMWGATVEGDERTSLGNELKTLISDISDIEGIQNYSDFFPLFSRFDFQGLVKQMKGHVKKLDLLFDRVMESHVKMVGKKSEEEEDFLQYLLRVKDDDEKAPLSMTHVKSLLMDMVLGGVDTSVNASEFAMAEIVSRPEVLNKIRLELDQVVGKDNIVEESHLPKLPYLQAVMKETLRLHPTLPLLVPHRNSETSVVAGYTVPKDSKIFINVWAIHRDPKNWDEPNEFKPERFLENSLDFNGGDFKYLPFGSGRRICAAINMAERLVLFNIASLLHSFDWKAPQGQKFEVEEKFGLVLKLKSPLVAIPVPRLSDPKLYTA

SEQ ID NO: 77986 - protein, 524 aa, Arabidopsis thaliana
  peptide (1)..(524): Ceres Seq. ID no. 12581337
  misc_feature (1)..(524): Homolog of NCBI NO: 30685891 NR Description: cytochrome P450 family [Arabidopsis thaliana]
  misc_feature (1)..(524): Homolog of NCBI NO: 7430667 NR Description: cytochrome P450 homolog T12H17.80 - Arabidopsis >gi|2827546|emb|CAA16554.1| cytochrome P450 like protein thaliana] >gi|7269115|emb|CAB79224.1| cytochrome P450 like
  misc_feature (1)..(524): Homolog of NCBI NO: 15810341 NR Description: putative cytochrome P450 protein [Arabidopsis
  misc_feature (1)..(524): Homolog of NCBI NO: 15235775 NR Description: cytochrome p450 family; protein id: At4g22710.1
  misc_feature (30)..(522): Homolog of NCBI NO: 15241541 NR Description: cytochrome p450 family; protein id: At5g44620.1, by cDNA: gi_16226349 [Arabidopsis thaliana]
  misc_feature (27)..(522): Homolog of NCBI NO: 11345411 NR Description: putative cytochrome P450 [Matthiola incana]
  misc_feature (6)..(522): Homolog of NCBI NO: 15234514 NR Description: cytochrome p450 family; protein id: At4g12300.1
  misc_feature (8)..(522): Homolog of NCBI NO: 15234521 NR Description: cytochrome p450 family; protein id: At4g12330.1, by cDNA: gi_20260371 [Arabidopsis thaliana]
  misc_feature (19)..(522): Homolog of NCBI NO: 15234517 NR Description: cytochrome p450, putative; protein id: At4g12310.1
  misc_feature (30)..(483): Homolog of NCBI NO: 16226350 NR Description: AT5g44620/K15C23_6 [Arabidopsis thaliana]
METASSNFSLSQILNIEEPYSSVMLGVAALLAVVCYFWIQGKSKSKNGPPLPPGPWPLPIVGNLPFLNSDVLHTQFQALTLKHGPLMKIHLGSKLAIVVSSPDMAREVLKTHDITFANHDLPEVGKINTYGGEDILWSPYGTHWRRLRKLCVMKMFTTPTLEASYSTRREETRQTIVHMSEMAREGSPVNLGEQIFLSIFNVVTRMMWGATVEGDERTSLGNELKTLISDISDIEGIQNYSDFFPLFSRFDFQGLVKQMKGHVKKLDLLFDRVMESHVKMVGKKSEEEEDFLQYLLRVKDDDEKAPLSMTHVKSLLMDMVLGGVDTSVNASEFAMAEIVSRPEVLNKIRLELDQVVGKDNIVEESHLPKLPYLQAVMKETLRLHPTLPLLVPHRNSETSVVAGYTVPKDSKIFINVWAIHRDPKNWDEPNEFKPERFLENSLDFNGGDFKYLPFGSGRRICAAINMAERLVLFNIASLLHSFDWKAPQGQKFEVEEKFGLVLKLKSPLVAIPVPRLSDPKLYTA

SEQ ID NO: 77987 - protein, 501 aa, Arabidopsis thaliana
  peptide (1)..(501): Ceres Seq. ID no. 12581338
  misc_feature (1)..(501): Homolog of NCBI NO: 30685891 NR Description: cytochrome P450 family [Arabidopsis thaliana]
  misc_feature (1)..(501): Homolog of NCBI NO: 7430667 NR Description: cytochrome P450 homolog T12H17.80 - Arabidopsis >gi|2827546|emb|CAA16554.1| cytochrome P450 like protein thaliana] >gi|7269115|emb|CAB79224.1| cytochrome P450 like
  misc_feature (1)..(501): Homolog of NCBI NO: 15810341 NR Description: putative cytochrome P450 protein [Arabidopsis
  misc_feature (1)..(501): Homolog of NCBI NO: 15235775 NR Description: cytochrome p450 family; protein id: At4g22710.1
  misc_feature (7)..(499): Homolog of NCBI NO: 15241541 NR Description: cytochrome p450 family; protein id: At5g44620.1, by cDNA: gi_16226349 [Arabidopsis thaliana]
  misc_feature (4)..(499): Homolog of NCBI NO: 11345411 NR Description: putative cytochrome P450 [Matthiola incana]
  misc_feature (1)..(499): Homolog of NCBI NO: 15234514 NR Description: cytochrome p450 family; protein id: At4g12300.1
  misc_feature (1)..(499): Homolog of NCBI NO: 15234521 NR Description: cytochrome p450 family; protein id: At4g12330.1, by cDNA: gi_20260371 [Arabidopsis thaliana]
  misc_feature (1)..(499): Homolog of NCBI NO: 15234517 NR Description: cytochrome p450, putative; protein id: At4g12310.1
  misc_feature (7)..(460): Homolog of NCBI NO: 16226350 NR Description: AT5g44620/K15C23_6 [Arabidopsis thaliana]
MLGVAALLAVVCYFWIQGKSKSKNGPPLPPGPWPLPIVGNLPFLNSDVLHTQFQALTLKHGPLMKIHLGSKLAIVVSSPDMAREVLKTHDITFANHDLPEVGKINTYGGEDILWSPYGTHWRRLRKLCVMKMFTTPTLEASYSTRREETRQTIVHMSEMAREGSPVNLGEQIFLSIFNVVTRMMWGATVEGDERTSLGNELKTLISDISDIEGIQNYSDFFPLFSRFDFQGLVKQMKGHVKKLDLLFDRVMESHVKMVGKKSEEEEDFLQYLLRVKDDDEKAPLSMTHVKSLLMDMVLGGVDTSVNASEFAMAEIVSRPEVLNKIRLELDQVVGKDNIVEESHLPKLPYLQAVMKETLRLHPTLPLLVPHRNSETSVVAGYTVPKDSKIFINVWAIHRDPKNWDEPNEFKPERFLENSLDFNGGDFKYLPFGSGRRICAAINMAERLVLFNIASLLHSFDWKAPQGQKFEVEEKFGLVLKLKSPLVAIPVPRLSDPKLYTA

SEQ ID NO: 77988 - DNA, 1030 bp, Arabidopsis thaliana
  misc_feature (1)..(1030): Ceres Seq. ID no. 12581347
  misc_feature: MA Experiment ID: 20000185 Result: Up-regulated in Transcription
  misc_feature: MA Experiment 20000185 PARAMETER Experiment Name: At_Roots__P Parameter: Age (day) Value: 7 vs. 21
  misc_feature: MA Experiment 20000185 PARAMETER Experiment Name: At_Roots__P Parameter: Organism Value: A. thaliana
  misc_feature: MA Experiment 20000185 PARAMETER Experiment Name: At_Roots__P Parameter: Tissue Value: Roots vs. Whole Plant
  misc_feature: MA Experiment ID: 20000227 Result: Down-regulated in Transcription
  misc_feature: MA Experiment 20000227 PARAMETER Experiment Name: At_Root-Tips-vs-Tops_P Parameter: Tissue Value: Root Tips vs. Root Tops
  misc_feature: MA Experiment ID: 20000234 Result: Down-regulated in Transcription
  misc_feature: MA Experiment 20000234 PARAMETER Experiment Name: At_Siliques_P Parameter: Age (day) Value: 21
  misc_feature: MA Experiment 20000234 PARAMETER Experiment Name: At_Siliques_P Parameter: Organism Value: A. thaliana
  misc_feature: MA Experiment 20000234 PARAMETER Experiment Name: At_Siliques_P Parameter: Plant Line Value: WS
  misc_feature: MA Experiment 20000234 PARAMETER Experiment Name: At_Siliques_P Parameter: Tissue Value: Less Than 5mm Siliques vs. Whole Plant
  misc_feature: MA Experiment ID: 20000235 Result: Down-regulated in Transcription
  misc_feature: MA Experiment 20000235 PARAMETER Experiment Name: At_Siliques_P Parameter: Age (day) Value: 21
  misc_feature: MA Experiment 20000235 PARAMETER Experiment Name: At_Siliques_P Parameter: Organism Value: A. thaliana
  misc_feature: MA Experiment 20000235 PARAMETER Experiment Name: At_Siliques_P Parameter: Plant Line Value: WS
  misc_feature: MA Experiment 20000235 PARAMETER Experiment Name: At_Siliques_P Parameter: Tissue Value: 5-10mm Siliques vs. Whole Plant
  misc_feature: MA Experiment ID: 20000265 Result: Down-regulated in Transcription
  misc_feature: MA Experiment 20000265 PARAMETER Experiment Name: At_Open_Flower_P Parameter: Age (day) Value: 21
  misc_feature: MA Experiment 20000265 PARAMETER Experiment Name: At_Open_Flower_P Parameter: Plant Line Value: WS
  misc_feature: MA Experiment 20000265 PARAMETER Experiment Name: At_Open_Flower_P Parameter: Tissue Value: Closed Flower vs. Whole Plant
  misc_feature: MA Experiment ID: 20000286 Result: Down-regulated in Transcription
  misc_feature: MA Experiment 20000286 PARAMETER Experiment Name: At_Open_Flower_P Parameter: Age (day) Value: 21
  misc_feature: MA Experiment 20000286 PARAMETER Experiment Name: At_Open_Flower_P Parameter: Plant Line Value: WS
  misc_feature: MA Experiment 20000286 PARAMETER Experiment Name: At_Open_Flower_P Parameter: Tissue Value: Half Open vs. Whole Plant
  misc_feature: MA Experiment ID: 20001557 Result: Down-regulated in Transcription
  misc_feature: MA Experiment 20001557 PARAMETER Experiment Name: At_Drought_Soil_Dry_P Parameter: Age (day) Value: 27
  misc_feature: MA Experiment 20001557 PARAMETER Experiment Name: At_Drought_Soil_Dry_P Parameter: Organism Value: A. thaliana
  misc_feature: MA Experiment 20001557 PARAMETER Experiment Name: At_Drought_Soil_Dry_P Parameter: Plant Line Value: WS
  misc_feature: MA Experiment 20001557 PARAMETER Experiment Name: At_Drought_Soil_Dry_P Parameter: Post Timepoint (hr) Value: 3
  misc_feature: MA Experiment 20001557 PARAMETER Experiment Name: At_Drought_Soil_Dry_P Parameter: Post-Treatment Value: Re-Water vs. No Drought
  misc_feature: MA Experiment 20001557 PARAMETER Experiment Name: At_Drought_Soil_Dry_P Parameter: Timepoint (day) Value: 13
  misc_feature: MA Experiment 20001557 PARAMETER Experiment Name: At_Drought_Soil_Dry_P Parameter: Treatment Value: Drought vs. No Drought
  misc_feature: MA Experiment ID: 20001905 Result: Down-regulated in Transcription
  misc_feature: MA Experiment 20001905 PARAMETER Experiment Name: At_Drought_Reproduction_P Parameter: Age (day) Value: 40
  misc_feature: MA Experiment 20001905 PARAMETER Experiment Name: At_Drought_Reproduction_P Parameter: Organism Value: A. thaliana
  misc_feature: MA Experiment 20001905 PARAMETER Experiment Name: At_Drought_Reproduction_P Parameter: Plant Line Value: WS
  misc_feature: MA Experiment 20001905 PARAMETER Experiment Name: At_Drought_Reproduction_P Parameter: Timepoint (day) Value: 10
  misc_feature: MA Experiment 20001905 PARAMETER Experiment Name: At_Drought_Reproduction_P Parameter: Tissue Value: Rosettes
  misc_feature: MA Experiment 20001905 PARAMETER Experiment Name: At_Drought_Reproduction_P Parameter: Treatment Value: Drought vs. No Drought
aaatctatcttttaagcttcctccacacatagagcaagaaaatggacttttttgagctgtgtttgtagttgaaacttattcttccctttttttgtttttaggtatggagactctgcatccattctctcacctacctatctctgaccaccggttcgttgttcaagagatggtgagcttacacagctcgagtagcggtagctggactaaagaagagaacaagatgttcgaacgagctcttgcgatatacgctgaagactcgcctgatcgctggtttaaagttgcttccatgatccctggaaagactgtttttgatgttatgaagcaatatagtaagcttgaagaagacgttttcgatattgaagcaggacgtgttcccattcctggttatcctgcagcttcttctcccttggggtttgacacggacatgtgtcgtaaacggcctagtggagctagaggatctgatcaagatcgaaagaaaggagtcccttggacagaggaagaacacaggagattcttgttaggccttctcaagtacggtaaaggagattggagaaacatatcgagaaacttcgtggtgtcaaagacgccaacgcaagtggcgagccacgcccaaaagtattaccagagacagctctccggagccaaggacaaacgcaggccaagtatccatgacatcacaaccggcaatcttctcaatgccaatctcaaccgttccttttccgatcatagagatattctccctgatttagggtttatcgataaggatgatacggaggagggagtaatatttatgggtcagaatctctcttcagaaaatctgttttctccatcaccaacttcattcgaagctgccattaacttcgccggagaaaatgtcttcagtgccggagcttaaggcaacatagaatccccaaactcagcgttcttaagaatctgagttttgaaactgtaattagagaaatataagcaaaaccaagtttattatatatgtattgtgtggtttaaaagtaagaacttgtttttactctgt

SEQ ID NO: 77989 - protein, 263 aa, Arabidopsis thaliana; identical to SEQ ID NO: 74481
  peptide (1)..(263): Ceres Seq. ID no. 12581348
  misc_feature (126)..(173): Pfam Name: Myb-like DNA-binding domain Pfam Description: Myb-like DNA-binding domain
  misc_feature (1)..(263): Homolog of NCBI NO: 15229712 NR Description: MYB-family transcription factor, putative; id: At3g11280.1, supported by cDNA: 109398., supported by cDNA: supported by cDNA: gi_20258976 [Arabidopsis thaliana]
  misc_feature (1)..(263): Homolog of NCBI NO: 21618234 NR Description: MYB-family transcription factor, putative
  misc_feature (1)..(262): Homolog of NCBI NO: 15239231 NR Description: putative protein; protein id: At5g05790.1
  misc_feature (94)..(251): Homolog of NCBI NO: 30687381 NR Description: MYB family transcription factor -related thaliana] >gi|26451319|dbj|BAC42760.1| putative MYB family factor [Arabidopsis thaliana] >gi|29824293|gb|AAP04107.1|
  misc_feature (1)..(105): Homolog of NCBI NO: 30687381 NR Description: MYB family transcription factor -related thaliana] >gi|26451319|dbj|BAC42760.1| putative MYB family factor [Arabidopsis thaliana] >gi|29824293|gb|AAP04107.1|
  misc_feature (94)..(251): Homolog of NCBI NO: 7446171 NR Description: probable MYB family transcription factor - Arabidopsis thaliana >gi|3335378|gb|AAC27179.1| putative MYB
  misc_feature (25)..(105): Homolog of NCBI NO: 7446171 NR Description: probable MYB family transcription factor - Arabidopsis thaliana >gi|3335378|gb|AAC27179.1| putative MYB
  misc_feature (1)..(196): Homolog of NCBI NO: 12005328 NR Description: unknown [Hevea brasiliensis]
  misc_feature (1)..(196): Homolog of NCBI NO: 15237776 NR Description: I-box binding factor - like protein; protein id:
  misc_feature (1)..(196): Homolog of NCBI NO: 18874263 NR Description: MYB-like transcription factor DIVARICATA

SEQ ID NO: 77990 - protein, 242 aa, Arabidopsis thaliana; identical to SEQ ID NO: 74482
  peptide (1)..(242): Ceres Seq. ID no. 12581349
  misc_feature (105)..(152): Pfam Name: Myb-like DNA-binding domain Pfam Description: Myb-like DNA-binding domain
  misc_feature (1)..(242): Homolog of NCBI NO: 15229712 NR Description: MYB-family transcription factor, putative; id: At3g11280.1, supported by cDNA: 109398., supported by cDNA: supported by cDNA: gi_20258976 [Arabidopsis thaliana]
  misc_feature (1)..(242): Homolog of NCBI NO: 21618234 NR Description: MYB-family transcription factor, putative
  misc_feature (1)..(241): Homolog of NCBI NO: 15239231 NR Description: putative protein; protein id: At5g05790.1
  misc_feature (73)..(230): Homolog of NCBI NO: 30687381 NR Description: MYB family transcription factor -related thaliana] >gi|26451319|dbj|BAC42760.1| putative MYB family factor [Arabidopsis thaliana] >gi|29824293|gb|AAP04107.1|
  misc_feature (1)..(84): Homolog of NCBI NO: 30687381 NR Description: MYB family transcription factor -related thaliana] >gi|26451319|dbj|BAC42760.1| putative MYB family factor [Arabidopsis thaliana] >gi|29824293|gb|AAP04107.1|
  misc_feature (73)..(230): Homolog of NCBI NO: 7446171 NR Description: probable MYB family transcription factor - Arabidopsis thaliana >gi|3335378|gb|AAC27179.1| putative MYB
  misc_feature (4)..(84): Homolog of NCBI NO: 7446171 NR Description: probable MYB family transcription factor - Arabidopsis thaliana >gi|3335378|gb|AAC27179.1| putative MYB
  misc_feature (1)..(175): Homolog of NCBI NO: 12005328 NR Description: unknown [Hevea brasiliensis]
  misc_feature (1)..(175): Homolog of NCBI NO: 15237776 NR Description: I-box binding factor - like protein; protein id:
  misc_feature (1)..(175): Homolog of NCBI NO: 18874263 NR Description: MYB-like transcription factor DIVARICATA

SEQ ID NO: 77991 - protein, 224 aa, Arabidopsis thaliana
  peptide (1)..(224): Ceres Seq. ID no. 12581350
  misc_feature (87)..(134): Pfam Name: Myb-like DNA-binding domain Pfam Description: Myb-like DNA-binding domain
  misc_feature (1)..(224): Homolog of NCBI NO: 15229712 NR Description: MYB-family transcription factor, putative; id: At3g11280.1, supported by cDNA: 109398., supported by cDNA: supported by cDNA: gi_20258976 [Arabidopsis thaliana]
  misc_feature (1)..(224): Homolog of NCBI NO: 21618234 NR Description: MYB-family transcription factor, putative
  misc_feature (1)..(223): Homolog of NCBI NO: 15239231 NR Description: putative protein; protein id: At5g05790.1
  misc_feature (55)..(212): Homolog of NCBI NO: 30687381 NR Description: MYB family transcription factor -related thaliana] >gi|26451319|dbj|BAC42760.1| putative MYB family factor [Arabidopsis thaliana] >gi|29824293|gb|AAP04107.1|
  misc_feature (1)..(66): Homolog of NCBI NO: 30687381 NR Description: MYB family transcription factor -related thaliana] >gi|26451319|dbj|BAC42760.1| putative MYB family factor [Arabidopsis thaliana] >gi|29824293|gb|AAP04107.1|
  misc_feature (55)..(212): Homolog of NCBI NO: 7446171 NR Description: probable MYB family transcription factor - Arabidopsis thaliana >gi|3335378|gb|AAC27179.1| putative MYB
  misc_feature (1)..(66): Homolog of NCBI NO: 7446171 NR Description: probable MYB family transcription factor - Arabidopsis thaliana >gi|3335378|gb|AAC27179.1| putative MYB
  misc_feature (1)..(157): Homolog of NCBI NO: 12005328 NR Description: unknown [Hevea brasiliensis]
  misc_feature (1)..(157): Homolog of NCBI NO: 15237776 NR Description: I-box binding factor - like protein; protein id:
  misc_feature (1)..(157): Homolog of NCBI NO: 18874263 NR Description: MYB-like transcription factor DIVARICATA
MFERALAIYAEDSPDRWFKVASMIPGKTVFDVMKQYSKLEEDVFDIEAGRVPIPGYPAASSPLGFDTDMCRKRPSGARGSDQDRKKGVPWTEEEHRRFLLGLLKYGKGDWRNISRNFVVSKTPTQVASHAQKYYQRQLSGAKDKRRPSIHDITTGNLLNANLNRSFSDHRDILPDLGFIDKDDTEEGVIFMGQNLSSENLFSPSPTSFEAAINFAGENVFSAGA

SEQ ID NO: 77992 - DNA, 745 bp, Arabidopsis thaliana
  misc_feature (1)..(745): Ceres Seq. ID no. 12581394
  misc_feature: MA Experiment ID: 108434 Result: Down-regulated in Transcription
  misc_feature: MA Experiment 108434 PARAMETER Experiment Name: At_Root_Tips_cDNA_P Parameter: Tissue Value: Root Tips
  misc_feature: MA Experiment ID: 108488 Result: Down-regulated in Transcription
  misc_feature: MA Experiment ID: 108573 Result: Up-regulated in Transcription
  misc_feature: MA Experiment 108573 PARAMETER Experiment Name: At_Drought_cDNA_P Parameter: Timepoint (hr) Value: 6
  misc_feature: MA Experiment 108573 PARAMETER Experiment Name: At_Drought_cDNA_P Parameter: Tissue Value: Aerial
  misc_feature: MA Experiment 108573 PARAMETER Experiment Name: At_Drought_cDNA_P Parameter: Treatment Value: Drought vs. No Drought
  misc_feature: MA Experiment ID: 108585 Result: Up-regulated in Transcription
  misc_feature: MA Experiment 108585 PARAMETER Experiment Name: At_5mM_NaNP_cDNA_P Parameter: Timepoint (hr) Value: 6
  misc_feature: MA Experiment 108585 PARAMETER Experiment Name: At_5mM_NaNP_cDNA_P Parameter: Tissue Value: Aerial
  misc_feature: MA Experiment 108585 PARAMETER Experiment Name: At_5mM_NaNP_cDNA_P Parameter: Treatment Value: null
  misc_feature: MA Experiment ID: 108605 Result: Up-regulated in Transcription
  misc_feature: MA Experiment 108605 PARAMETER Experiment Name: At_100uM_ABA_cDNA_P Parameter: Timepoint (hr) Value: 6
  misc_feature: MA Experiment 108605 PARAMETER Experiment Name: At_100uM_ABA_cDNA_P Parameter: Tissue Value: Aerial
  misc_feature: MA Experiment 108605 PARAMETER Experiment Name: At_100uM_ABA_cDNA_P Parameter: Treatment Value: 100uM ABA vs. No Treatment
  misc_feature: MA Experiment ID: 108607 Result: Up-regulated in Transcription
  misc_feature: MA Experiment 108607 PARAMETER Experiment Name: At_100uM_ABA_cDNA_P Parameter: Timepoint (hr) Value: 4
  misc_feature: MA Experiment 108607 PARAMETER Experiment Name: At_100uM_ABA_cDNA_P Parameter: Tissue Value: Aerial
  misc_feature: MA Experiment 108607 PARAMETER Experiment Name: At_100uM_ABA_cDNA_P Parameter: Treatment Value: 100uM ABA vs. No Treatment
  misc_feature: MA Experiment ID: 20000069 Result: Up-regulated in Transcription
  misc_feature: MA Experiment 20000069 PARAMETER Experiment Name: At_100uM_ABA_Mutants_cDNA_P Parameter: Plant Line Value: CS23
  misc_feature: MA Experiment 20000069 PARAMETER Experiment Name: At_100uM_ABA_Mutants_cDNA_P Parameter: Timepoint (hr) Value: 6
  misc_feature: MA Experiment 20000069 PARAMETER Experiment Name: At_100uM_ABA_Mutants_cDNA_P Parameter: Tissue Value: Aerial
  misc_feature: MA Experiment 20000069 PARAMETER Experiment Name: At_100uM_ABA_Mutants_cDNA_P Parameter: Treatment Value: 100uM ABA vs. No Treatment
  misc_feature: MA Experiment ID: 20000070 Result: Up-regulated in Transcription
  misc_feature: MA Experiment 20000070 PARAMETER Experiment Name: At_100uM_ABA_Mutants_cDNA_P Parameter: Plant Line Value: CS24
  misc_feature: MA Experiment 20000070 PARAMETER Experiment Name: At_100uM_ABA_Mutants_cDNA_P Parameter: Timepoint (hr) Value: 6
  misc_feature: MA Experiment 20000070 PARAMETER Experiment Name: At_100uM_ABA_Mutants_cDNA_P Parameter: Tissue Value: Aerial
  misc_feature: MA Experiment 20000070 PARAMETER Experiment Name: At_100uM_ABA_Mutants_cDNA_P Parameter: Treatment Value: 100uM ABA vs. No Treatment
  misc_feature: MA Experiment ID: 20000071 Result: Up-regulated in Transcription
  misc_feature: MA Experiment 20000071 PARAMETER Experiment Name: At_100uM_ABA_Mutants_cDNA_P Parameter: Plant Line Value: CS8104
  misc_feature: MA Experiment 20000071 PARAMETER Experiment Name: At_100uM_ABA_Mutants_cDNA_P Parameter: Timepoint (hr) Value: 6
  misc_feature: MA Experiment 20000071 PARAMETER Experiment Name: At_100uM_ABA_Mutants_cDNA_P Parameter: Tissue Value: Aerial
  misc_feature: MA Experiment 20000071 PARAMETER Experiment Name: At_100uM_ABA_Mutants_cDNA_P Parameter: Treatment Value: 100uM ABA vs. No Treatment
  misc_feature: MA Experiment ID: 20000087 Result: Up-regulated in Transcription
  misc_feature: MA Experiment 20000087 PARAMETER Experiment Name: At_100uM_ABA_Mutants_cDNA_P Parameter: Plant Line Value: WS
  misc_feature: MA Experiment 20000087 PARAMETER Experiment Name: At_100uM_ABA_Mutants_cDNA_P Parameter: Timepoint (hr) Value: 6
  misc_feature: MA Experiment 20000087 PARAMETER Experiment Name: At_100uM_ABA_Mutants_cDNA_P Parameter: Tissue Value: Aerial
  misc_feature: MA Experiment 20000087 PARAMETER Experiment Name: At_100uM_ABA_Mutants_cDNA_P Parameter: Treatment Value: 100uM ABA vs. No Treatment
  misc_feature: MA Experiment ID: 20000088 Result: Up-regulated in Transcription
  misc_feature: MA Experiment 20000088 PARAMETER Experiment Name: At_100uM_ABA_Mutants_cDNA_P Parameter: Plant Line Value: Landsberg
  misc_feature: MA Experiment 20000088 PARAMETER Experiment Name: At_100uM_ABA_Mutants_cDNA_P Parameter: Timepoint (hr) Value: 6
  misc_feature: MA Experiment 20000088 PARAMETER Experiment Name: At_100uM_ABA_Mutants_cDNA_P Parameter: Tissue Value: Aerial
  misc_feature: MA Experiment 20000088 PARAMETER Experiment Name: At_100uM_ABA_Mutants_cDNA_P Parameter: Treatment Value: 100uM ABA vs. No Treatment
  misc_feature: MA Experiment ID: 20000117 Result: Up-regulated in Transcription
  misc_feature: MA Experiment 20000117 PARAMETER Experiment Name: At_100uM_ABA_Mutants_cDNA_P Parameter: Plant Line Value: Columbia
  misc_feature: MA Experiment 20000117 PARAMETER Experiment Name: At_100uM_ABA_Mutants_cDNA_P Parameter: Timepoint (hr) Value: 6
  misc_feature: MA Experiment 20000117 PARAMETER Experiment Name: At_100uM_ABA_Mutants_cDNA_P Parameter: Tissue Value: Aerial
  misc_feature: MA Experiment 20000117 PARAMETER Experiment Name: At_100uM_ABA_Mutants_cDNA_P Parameter: Treatment Value: 100uM ABA vs. No Treatment
  misc_feature: MA Experiment ID: 20000437 Result: Up-regulated in Transcription
  misc_feature: MA Experiment 20000437 PARAMETER Experiment Name: At_Drought_P Parameter: Age (day) Value: 8
  misc_feature: MA Experiment 20000437 PARAMETER Experiment Name: At_Drought_P Parameter: Organism Value: A. thaliana
  misc_feature: MA Experiment 20000437 PARAMETER Experiment Name: At_Drought_P Parameter: Plant Line Value: WS
  misc_feature: MA Experiment 20000437 PARAMETER Experiment Name: At_Drought_P Parameter: Timepoint (hr) Value: 24
  misc_feature: MA Experiment 20000437 PARAMETER Experiment Name: At_Drought_P Parameter: Tissue Value: Whole Plant
  misc_feature: MA Experiment 20000437 PARAMETER Experiment Name: At_Drought_P Parameter: Treatment Value: Drought vs. No Drought
  misc_feature: MA Experiment ID: 20000496 Result: Up-regulated in Transcription
  misc_feature: MA Experiment 20000496 PARAMETER Experiment Name: At_Guard_Cells_P Parameter: Harvest Date Value: 7/19/2002
  misc_feature: MA Experiment 20000496 PARAMETER Experiment Name: At_Guard_Cells_P Parameter: Organism Value: Canola
  misc_feature: MA Experiment 20000496 PARAMETER Experiment Name: At_Guard_Cells_P Parameter: Tissue Value: Guard Cells vs. Leaves
  misc_feature: MA Experiment ID: 20001906 Result: Up-regulated in Transcription
  misc_feature: MA Experiment 20001906 PARAMETER Experiment Name: At_Drought_Reproduction_P Parameter: Age (day) Value: 35
  misc_feature: MA Experiment 20001906 PARAMETER Experiment Name: At_Drought_Reproduction_P Parameter: Organism Value: A. thaliana
  misc_feature: MA Experiment 20001906 PARAMETER Experiment Name: At_Drought_Reproduction_P Parameter: Plant Line Value: WS
  misc_feature: MA Experiment 20001906 PARAMETER Experiment Name: At_Drought_Reproduction_P Parameter: Timepoint (day) Value: 5
  misc_feature: MA Experiment 20001906 PARAMETER Experiment Name: At_Drought_Reproduction_P Parameter: Tissue Value: Siliques
  misc_feature: MA Experiment 20001906 PARAMETER Experiment Name: At_Drought_Reproduction_P Parameter: Treatment Value: Drought vs. No Drought
aaaacaaccccttgagatttccgaagatcatcaaatccaaaaccctagaaaccgaacaaaagaagctaggactattcaatggcgtcgaaaagaattaacaaagagcttagggacttgcaaagagatcctcctgtgtcctgcagtgcaggtcctacgggagatgatatgttccaatggcaagcaactatcatgggtccagcagatagcccgtttgccggaggtgtgtttcttgttaccattcacttcccaccagattaccctttcaagccaccaaaggttgccttccggaccaaggtttatcacccaaacatcaacagtaatggaagtatctgtcttgacattctgaaagagcagtggagccctgcacttaccgtatccaaggttcttctgtcgatatgctcattgctgacggatccaaaccctgacgatcctttggttcctgaaatagcgcacatctacaagacagaccgagtcaagtacgagtccacagctcaatcctggactcagaagtatgcaatgggatgataacaagcaataatacccaccaccagtacattgcgtattaaacaggagaaataagaaagaaagaaaaaaactcagtttggcttttactttggctacttttgcttattagttttttttttttaattatatcttgaagctgtgtgttgggtgtgtacatgagctttatgccttatttgaaacattgagatcttgcaaatgcttttaagccaataatccgcta

SEQ ID NO: 77993 - protein, 148 aa, Arabidopsis thaliana; identical to SEQ ID NO: 28390
  peptide (1)..(148): Ceres Seq. ID no. 12581395
  misc_feature (1)..(148): Homolog of NCBI NO: 18423829 NR Description: E2, ubiquitin-conjugating enzyme, putative; id: At5g56150.1, supported by cDNA: 10022., supported by cDNA:
  misc_feature (1)..(148): Homolog of NCBI NO: 32488376 NR Description: OSJNBa0043A12.6 [Oryza sativa (japonica
  misc_feature (1)..(148): Homolog of NCBI NO: 5762457 NR Description: ubiquitin-conjugating enzyme UBC2
  misc_feature (1)..(148): Homolog of NCBI NO: 456568 NR Description: ubiquitin conjugating enzyme
  misc_feature (1)..(148): Homolog of NCBI NO: 18408001 NR Description: E2, ubiquitin-conjugating enzyme, putative; id: At1g64230.1, supported by cDNA: gi_14326528 [Arabidopsis >gi|14326529|gb|AAK60309.1|AF385718_1 At1g64230/F22C12_17

SEQ ID NO: 77994 - protein, 119 aa, Arabidopsis thaliana; identical to SEQ ID NO: 28391
  peptide (1)..(119): Ceres Seq. ID no. 12581396
  misc_feature (1)..(119): Homolog of NCBI NO: 18423829 NR Description: E2, ubiquitin-conjugating enzyme, putative; id: At5g56150.1, supported by cDNA: 10022., supported by cDNA:
  misc_feature (1)..(119): Homolog of NCBI NO: 32488376 NR Description: OSJNBa0043A12.6 [Oryza sativa (japonica
  misc_feature (1)..(119): Homolog of NCBI NO: 5762457 NR Description: ubiquitin-conjugating enzyme UBC2
  misc_feature (1)..(119): Homolog of NCBI NO: 456568 NR Description: ubiquitin conjugating enzyme
  misc_feature (1)..(119): Homolog of NCBI NO: 18408001 NR Description: E2, ubiquitin-conjugating enzyme, putative; id: At1g64230.1, supported by cDNA: gi_14326528 [Arabidopsis >gi|14326529|gb|AAK60309.1|AF385718_1 At1g64230/F22C12_17

SEQ ID NO: 77995 - protein, 114 aa, Arabidopsis thaliana; identical to SEQ ID NO: 28964
  peptide (1)..(114): Ceres Seq. ID no. 12581397

SEQ ID NO: 77996 - DNA, 717 bp, Arabidopsis thaliana
  misc_feature (1)..(717): Ceres Seq. ID no. 12591562
  misc_feature: MA Experiment ID: 20000169 Result: Down-regulated in Transcription
  misc_feature: MA Experiment 20000169 PARAMETER Experiment Name: At_100uM_ABA_P Parameter: Age (day) Value: 14
  misc_feature: MA Experiment 20000169 PARAMETER Experiment Name: At_100uM_ABA_P Parameter: Organism Value: A. thaliana
  misc_feature: MA Experiment 20000169 PARAMETER Experiment Name: At_100uM_ABA_P Parameter: Plant Line Value: WS
  misc_feature: MA Experiment 20000169 PARAMETER Experiment Name: At_100uM_ABA_P Parameter: Timepoint (hr) Value: 6
  misc_feature: MA Experiment 20000169 PARAMETER Experiment Name: At_100uM_ABA_P Parameter: Tissue Value: Aerial
  misc_feature: MA Experiment 20000169 PARAMETER Experiment Name: At_100uM_ABA_P Parameter: Treatment Value: 100uM ABA vs. No Treatment
  misc_feature: MA Experiment ID: 20000180 Result: Up-regulated in Transcription
  misc_feature: MA Experiment 20000180 PARAMETER Experiment Name: At_Germinating_Seeds_P Parameter: Age (hr) Value: 24 vs. 0
  misc_feature: MA Experiment 20000180 PARAMETER Experiment Name: At_Germinating_Seeds_P Parameter: Tissue Value: Germinating Seeds
  misc_feature: MA Experiment ID: 20000214 Result: Up-regulated in Transcription
  misc_feature: MA Experiment 20000214 PARAMETER Experiment Name: At_4deg_Cold_P Parameter: Timepoint (hr) Value: 6
  misc_feature: MA Experiment ID: 20000234 Result: Up-regulated in Transcription
  misc_feature: MA Experiment 20000234 PARAMETER Experiment Name: At_Siliques_P Parameter: Age (day) Value: 21
  misc_feature: MA Experiment 20000234 PARAMETER Experiment Name: At_Siliques_P Parameter: Organism Value: A. thaliana
  misc_feature: MA Experiment 20000234 PARAMETER Experiment Name: At_Siliques_P Parameter: Plant Line Value: WS
  misc_feature: MA Experiment 20000234 PARAMETER Experiment Name: At_Siliques_P Parameter: Tissue Value: Less Than 5mm Siliques vs. Whole Plant
  misc_feature: MA Experiment ID: 20000436 Result: Down-regulated in Transcription
  misc_feature: MA Experiment 20000436 PARAMETER Experiment Name: At_Drought_P Parameter: Age (day) Value: 7
  misc_feature: MA Experiment 20000436 PARAMETER Experiment Name: At_Drought_P Parameter: Organism Value: A. thaliana
  misc_feature: MA Experiment 20000436 PARAMETER Experiment Name: At_Drought_P Parameter: Plant Line Value: WS
  misc_feature: MA Experiment 20000436 PARAMETER Experiment Name: At_Drought_P Parameter: Timepoint (hr) Value: 12
  misc_feature: MA Experiment 20000436 PARAMETER Experiment Name: At_Drought_P Parameter: Tissue Value: Whole Plant
  misc_feature: MA Experiment 20000436 PARAMETER Experiment Name: At_Drought_P Parameter: Treatment Value: Drought vs. No Drought
  misc_feature: MA Experiment ID: 20000437 Result: Down-regulated in Transcription
  misc_feature: MA Experiment 20000437 PARAMETER Experiment Name: At_Drought_P Parameter: Age (day) Value: 8
  misc_feature: MA Experiment 20000437 PARAMETER Experiment Name: At_Drought_P Parameter: Organism Value: A. thaliana
  misc_feature: MA Experiment 20000437 PARAMETER Experiment Name: At_Drought_P Parameter: Plant Line Value: WS
  misc_feature: MA Experiment 20000437 PARAMETER Experiment Name: At_Drought_P Parameter: Timepoint (hr) Value: 24
  misc_feature: MA Experiment 20000437 PARAMETER Experiment Name: At_Drought_P Parameter: Tissue Value: Whole Plant
  misc_feature: MA Experiment 20000437 PARAMETER Experiment Name: At_Drought_P Parameter: Treatment Value: Drought vs. No Drought
  misc_feature: MA Experiment ID: 20000438 Result: Up-regulated in Transcription
  misc_feature: MA Experiment 20000438 PARAMETER Experiment Name: At_Shoots__P Parameter: Age (day) Value: 14
  misc_feature: MA Experiment 20000438 PARAMETER Experiment Name: At_Shoots__P Parameter: Tissue Value: Shoots vs. Whole Plant
  misc_feature: MA Experiment ID: 20000439 Result: Down-regulated in Transcription
  misc_feature: MA Experiment 20000439 PARAMETER Experiment Name: At_Roots__P Parameter: Age (day) Value: 14 vs. 21
  misc_feature: MA Experiment 20000439 PARAMETER Experiment Name: At_Roots__P Parameter: Organism Value: A. thaliana
  misc_feature: MA Experiment 20000439 PARAMETER Experiment Name: At_Roots__P Parameter: Tissue Value: Roots vs. Whole Plant
  misc_feature: MA Experiment ID: 20000451 Result: Up-regulated in Transcription
  misc_feature: MA Experiment 20000451 PARAMETER Experiment Name: At_CS6879_Shoots-Roots_P Parameter: Age (day) Value: 14
  misc_feature: MA Experiment 20000451 PARAMETER Experiment Name: At_CS6879_Shoots-Roots_P Parameter: Organism Value: A. thaliana
  misc_feature: MA Experiment 20000451 PARAMETER Experiment Name: At_CS6879_Shoots-Roots_P Parameter: Plant Line Value: CS6879 vs. WS
  misc_feature: MA Experiment 20000451 PARAMETER Experiment Name: At_CS6879_Shoots-Roots_P Parameter: Tissue Value: Roots
  misc_feature: MA Experiment ID: 20000794 Result: Down-regulated in Transcription
  misc_feature: MA Experiment 20000794 PARAMETER Experiment Name: At_Petals_P Parameter: Age (day) Value: 23-25 days
  misc_feature: MA Experiment 20000794 PARAMETER Experiment Name: At_Petals_P Parameter: Plant Line Value: WS
  misc_feature: MA Experiment 20000794 PARAMETER Experiment Name: At_Petals_P Parameter: Tissue Value: Petals vs. Whole plant
  misc_feature: MA Experiment ID: 20001248 Result: Down-regulated in Transcription
  misc_feature: MA Experiment 20001248 PARAMETER Experiment Name: At_Far-red-induction_P Parameter: Age (day) Value: 7
  misc_feature: MA Experiment 20001248 PARAMETER Experiment Name: At_Far-red-induction_P Parameter: Light Value: Far-red vs. White
  misc_feature: MA Experiment 20001248 PARAMETER Experiment Name: At_Far-red-induction_P Parameter: Organism Value: A. thaliana
  misc_feature: MA Experiment 20001248 PARAMETER Experiment Name: At_Far-red-induction_P Parameter: Plant Line Value: Columbia
  misc_feature: MA Experiment 20001248 PARAMETER Experiment Name: At_Far-red-induction_P Parameter: Timepoint (hr) Value: 4
  misc_feature: MA Experiment 20001248 PARAMETER Experiment Name: At_Far-red-induction_P Parameter: Tissue Value: Whole Plant
  misc_feature: MA Experiment ID: 20001450 Result: Down-regulated in Transcription
  misc_feature: MA Experiment 20001450 PARAMETER Experiment Name: At_Far-red-induction_P Parameter: Age (day) Value: 7
  misc_feature: MA Experiment 20001450 PARAMETER Experiment Name: At_Far-red-induction_P Parameter: Light Value: Far-red vs. White
  misc_feature: MA Experiment 20001450 PARAMETER Experiment Name: At_Far-red-induction_P Parameter: Organism Value: A. thaliana
  misc_feature: MA Experiment 20001450 PARAMETER Experiment Name: At_Far-red-induction_P Parameter: Plant Line Value: Columbia
  misc_feature: MA Experiment 20001450 PARAMETER Experiment Name: At_Far-red-induction_P Parameter: Timepoint (hr) Value: 8
  misc_feature: MA Experiment 20001450 PARAMETER Experiment Name: At_Far-red-induction_P Parameter: Tissue Value: Whole Plant
  misc_feature: MA Experiment ID: 20001451 Result: Down-regulated in Transcription
  misc_feature: MA Experiment 20001451 PARAMETER Experiment Name: At_Far-red-induction_P Parameter: Age (day) Value: 7
  misc_feature: MA Experiment 20001451 PARAMETER Experiment Name: At_Far-red-induction_P Parameter: Light Value: Far-red vs. White
  misc_feature: MA Experiment 20001451 PARAMETER Experiment Name: At_Far-red-induction_P Parameter: Organism Value: A. thaliana
  misc_feature: MA Experiment 20001451 PARAMETER Experiment Name: At_Far-red-induction_P Parameter: Plant Line Value: Columbia
  misc_feature: MA Experiment 20001451 PARAMETER Experiment Name: At_Far-red-induction_P Parameter: Timepoint (hr) Value: 24
  misc_feature: MA Experiment 20001451 PARAMETER Experiment Name: At_Far-red-induction_P Parameter: Tissue Value: Whole Plant
  misc_feature: MA Experiment ID: 20001757 Result: Up-regulated in Transcription
  misc_feature: MA Experiment 20001757 PARAMETER Experiment Name: At_50mM_NH4NO3_L-to-H_P Parameter: Timepoint (hr) Value: 6
  misc_feature: MA Experiment 20001757 PARAMETER Experiment Name: At_50mM_NH4NO3_L-to-H_P Parameter: Tissue Value: Leaf
  misc_feature: MA Experiment 20001757 PARAMETER Experiment Name: At_50mM_NH4NO3_L-to-H_P Parameter: Treatment Value: 50mM NH4NO3 vs 100mM Mannitol
  misc_feature: MA Experiment ID: 20001904 Result: Down-regulated in Transcription
  misc_feature: MA Experiment 20001904 PARAMETER Experiment Name: At_Drought_Reproduction_P Parameter: Age (day) Value: 37
  misc_feature: MA Experiment 20001904 PARAMETER Experiment Name: At_Drought_Reproduction_P Parameter: Organism Value: A. thaliana
  misc_feature: MA Experiment 20001904 PARAMETER Experiment Name: At_Drought_Reproduction_P Parameter: Plant Line Value: WS
  misc_feature: MA Experiment 20001904 PARAMETER Experiment Name: At_Drought_Reproduction_P Parameter: Timepoint (day) Value: 7
  misc_feature: MA Experiment 20001904 PARAMETER Experiment Name: At_Drought_Reproduction_P Parameter: Tissue Value: Rosettes
  misc_feature: MA Experiment 20001904 PARAMETER Experiment Name: At_Drought_Reproduction_P Parameter: Treatment Value: Drought vs. No Drought
  misc_feature: MA Experiment ID: 20001906 Result: Down-regulated in Transcription
  misc_feature: MA Experiment 20001906 PARAMETER Experiment Name: At_Drought_Reproduction_P Parameter: Age (day) Value: 35
  misc_feature: MA Experiment 20001906 PARAMETER Experiment Name: At_Drought_Reproduction_P Parameter: Organism Value: A. thaliana
  misc_feature: MA Experiment 20001906 PARAMETER Experiment Name: At_Drought_Reproduction_P Parameter: Plant Line Value: WS
  misc_feature: MA Experiment 20001906 PARAMETER Experiment Name: At_Drought_Reproduction_P Parameter: Timepoint (day) Value: 5
  misc_feature: MA Experiment 20001906 PARAMETER Experiment Name: At_Drought_Reproduction_P Parameter: Tissue Value: Siliques
  misc_feature: MA Experiment 20001906 PARAMETER Experiment Name: At_Drought_Reproduction_P Parameter: Treatment Value: Drought vs. No Drought
aattaagcaaaagaagaagaagaagaagtaatggcttcctctatgctctcctctgccgctgtggttacctccccggctcaagccaccatggtcgctccattcactggtttgaagtcatccgcttctttcccggtcacccgcaaggccaacaacgacattacttccatcacaagcaatgggggaagagttagctgcatgaaggtgtggccaccaatcggaaagaagaagtttgagactctatcttacctccctgaccttactgacgtcgaattggctaaggaagttgactaccttctccgcaacaaatggattccttgtgttgaattcgagttggagcacggatttgtgtaccgtgagcacggaaacactcccggatactacgatggacggtactggacaatgtggaagcttccattgttcggatgcaccgactccgctcaagtgttgaaggaagttgaagaatgcaagaaggagtacccgggcgccttcattaggatcatcggattcgacaacacccgtcaagtccaatgcatcagtttcattgcctacaagcccccaagcttcactgatgcttaaatccttttctggaatattcaatgttgactatccggaacccaattttgtatggtcaatgtaaatttaagtaattattttgccaaagtgaaaaaactgaaggtttgtttttctatcgtttcctctataaaaatctctattcat

SEQ ID NO: 77997 - protein, 181 aa, Arabidopsis thaliana
  peptide (1)..(181): Ceres Seq. ID no. 12591563
  misc_feature (56)..(175): Pfam Name: Ribulose bisphosphate carboxylase, small chain Pfam Description: Ribulose bisphosphate carboxylase, small chain
  misc_feature (1)..(181): Homolog of NCBI NO: 15240912 NR Description: ribulose bisphosphate carboxylase small chain 1b (RuBisCO small subunit 1b) (sp|P10796); protein id: At5g38430.1, by cDNA: gi_15294183 [Arabidopsis thaliana]
  misc_feature (1)..(181): Homolog of NCBI NO: 68061 NR Description: ribulose-bisphosphate carboxylase (EC 4.1.1.39)
  misc_feature (1)..(181): Homolog of NCBI NO: 15240903 NR Description: ribulose bisphosphate carboxylase small chain 2b (RuBisCO small subunit 2b) (sp|P10797); protein id: At5g38420.1, by cDNA: gi_16649138, supported by cDNA: gi_17064721, supported
  misc_feature (1)..(181): Homolog of NCBI NO: 68060 NR Description: ribulose-bisphosphate carboxylase (EC 4.1.1.39)
  misc_feature (1)..(181): Homolog of NCBI NO: 15240901 NR Description: ribulose bisphosphate carboxylase small chain 3b (RuBisCO small subunit 3b) (sp|P10798); protein id: At5g38410.1, by cDNA: gi_13430423, supported by cDNA: gi_15293182, supported
  misc_feature (1)..(181): Homolog of NCBI NO: 132091 NR Description: Ribulose bisphosphate carboxylase small chain F1,
  misc_feature (1)..(181): Homolog of NCBI NO: 266891 NR Description: Ribulose bisphosphate carboxylase small chain,
  misc_feature (1)..(179): Homolog of NCBI NO: 15219826 NR Description: ribulose-bisphosphate carboxylase small unit, protein id: At1g67090.1, supported by cDNA: gi_11762169, by cDNA: gi_13358196, supported by cDNA: gi_15294199, supported
  misc_feature (1)..(181): Homolog of NCBI NO: 132154 NR Description: Ribulose bisphosphate carboxylase small chain,
  misc_feature (1)..(179): Homolog of NCBI NO: 68063 NR Description: ribulose-bisphosphate carboxylase (EC 4.1.1.39)
MASSMLSSAAVVTSPAQATMVAPFTGLKSSASFPVTRKANNDITSITSNGGRVSCMKVWPPIGKKKFETLSYLPDLTDVELAKEVDYLLRNKWIPCVEFELEHGFVYREHGNTPGYYDGRYWTMWKLPLFGCTDSAQVLKEVEECKKEYPGAFIRIIGFDNTRQVQCISFIAYKPPSFTDA

SEQ ID NO: 77998 - protein, 177 aa, Arabidopsis thaliana
  peptide (1)..(177): Ceres Seq. ID no. 12591564
  misc_feature (52)..(171): Pfam Name: Ribulose bisphosphate carboxylase, small chain Pfam Description: Ribulose bisphosphate carboxylase, small chain
  misc_feature (1)..(177): Homolog of NCBI NO: 15240912 NR Description: ribulose bisphosphate carboxylase small chain 1b (RuBisCO small subunit 1b) (sp|P10796); protein id: At5g38430.1, by cDNA: gi_15294183 [Arabidopsis thaliana]
  misc_feature (1)..(177): Homolog of NCBI NO: 68061 NR Description: ribulose-bisphosphate carboxylase (EC 4.1.1.39)
  misc_feature (1)..(177): Homolog of NCBI NO: 15240903 NR Description: ribulose bisphosphate carboxylase small chain 2b (RuBisCO small subunit 2b) (sp|P10797); protein id: At5g38420.1, by cDNA: gi_16649138, supported by cDNA: gi_17064721, supported
  misc_feature (1)..(177): Homolog of NCBI NO: 68060 NR Description: ribulose-bisphosphate carboxylase (EC 4.1.1.39)
  misc_feature (1)..(177): Homolog of NCBI NO: 15240901 NR Description: ribulose bisphosphate carboxylase small chain 3b (RuBisCO small subunit 3b) (sp|P10798); protein id: At5g38410.1, by cDNA: gi_13430423, supported by cDNA: gi_15293182, supported
  misc_feature (1)..(177): Homolog of NCBI NO: 132091 NR Description: Ribulose bisphosphate carboxylase small chain F1,
  misc_feature (1)..(177): Homolog of NCBI NO: 266891 NR Description: Ribulose bisphosphate carboxylase small chain,
  misc_feature (1)..(175): Homolog of NCBI NO: 15219826 NR Description: ribulose-bisphosphate carboxylase small unit, protein id: At1g67090.1, supported by cDNA: gi_11762169, by cDNA: gi_13358196, supported by cDNA: gi_15294199, supported
  misc_feature (1)..(177): Homolog of NCBI NO: 132154 NR Description: Ribulose bisphosphate carboxylase small chain,
  misc_feature (1)..(175): Homolog of NCBI NO: 68063 NR Description: ribulose-bisphosphate carboxylase (EC 4.1.1.39)
MLSSAAVVTSPAQATMVAPFTGLKSSASFPVTRKANNDITSITSNGGRVSCMKVWPPIGKKKFETLSYLPDLTDVELAKEVDYLLRNKWIPCVEFELEHGFVYREHGNTPGYYDGRYWTMWKLPLFGCTDSAQVLKEVEECKKEYPGAFIRIIGFDNTRQVQCISFIAYKPPSFTDA

SEQ ID NO: 77999 - protein, 162 aa, Arabidopsis thaliana
  peptide (1)..(162): Ceres Seq. ID no. 12591565
  misc_feature (37)..(156): Pfam Name: Ribulose bisphosphate carboxylase, small chain Pfam Description: Ribulose bisphosphate carboxylase, small chain
  misc_feature (1)..(162): Homolog of NCBI NO: 15240912 NR Description: ribulose bisphosphate carboxylase small chain 1b (RuBisCO small subunit 1b) (sp|P10796); protein id: At5g38430.1, by cDNA: gi_15294183 [Arabidopsis thaliana]
  misc_feature (1)..(162): Homolog of NCBI NO: 68061 NR Description: ribulose-bisphosphate carboxylase (EC 4.1.1.39)
  misc_feature (1)..(162): Homolog of NCBI NO: 15240903 NR Description: ribulose bisphosphate carboxylase small chain 2b (RuBisCO small subunit 2b) (sp|P10797); protein id: At5g38420.1, by cDNA: gi_16649138, supported by cDNA: gi_17064721, supported
  misc_feature (1)..(162): Homolog of NCBI NO: 68060 NR Description: ribulose-bisphosphate carboxylase (EC 4.1.1.39)
  misc_feature (1)..(162): Homolog of NCBI NO: 15240901 NR Description: ribulose bisphosphate carboxylase small chain 3b (RuBisCO small subunit 3b) (sp|P10798); protein id: At5g38410.1, by cDNA: gi_13430423, supported by cDNA: gi_15293182, supported
  misc_feature (1)..(162): Homolog of NCBI NO: 132091 NR Description: Ribulose bisphosphate carboxylase small chain F1,
  misc_feature (1)..(162): Homolog of NCBI NO: 266891 NR Description: Ribulose bisphosphate carboxylase small chain,
  misc_feature (1)..(160): Homolog of NCBI NO: 15219826 NR Description: ribulose-bisphosphate carboxylase small unit, protein id: At1g67090.1, supported by cDNA: gi_11762169, by cDNA: gi_13358196, supported by cDNA: gi_15294199, supported
  misc_feature (1)..(162): Homolog of NCBI NO: 132154 NR Description: Ribulose bisphosphate carboxylase small chain,
  misc_feature (1)..(160): Homolog of NCBI NO: 68063 NR Description: ribulose-bisphosphate carboxylase (EC 4.1.1.39)
MVAPFTGLKSSASFPVTRKANNDITSITSNGGRVSCMKVWPPIGKKKFETLSYLPDLTDVELAKEVDYLLRNKWIPCVEFELEHGFVYREHGNTPGYYDGRYWTMWKLPLFGCTDSAQVLKEVEECKKEYPGAFIRIIGFDNTRQVQCISFIAYKPPSFTDA

SEQ ID NO: 78000 - DNA, 1374 bp, Arabidopsis thaliana
  misc_feature (1)..(1374): Ceres Seq. ID no. 12592280
  misc_feature: MA Experiment ID: 20000179 Result: Up-regulated in Transcription
  misc_feature: MA Experiment 20000179 PARAMETER Experiment Name: At_Germinating_Seeds_P Parameter: Age (hr) Value: 6 vs. 0
  misc_feature: MA Experiment 20000179 PARAMETER Experiment Name: At_Germinating_Seeds_P Parameter: Tissue Value: Germinating Seeds
  misc_feature: MA Experiment ID: 20000180 Result: Up-regulated in Transcription
  misc_feature: MA Experiment 20000180 PARAMETER Experiment Name: At_Germinating_Seeds_P Parameter: Age (hr) Value: 24 vs. 0
  misc_feature: MA Experiment 20000180 PARAMETER Experiment Name: At_Germinating_Seeds_P Parameter: Tissue Value: Germinating Seeds
  misc_feature: MA Experiment ID: 20001905 Result: Down-regulated in Transcription
  misc_feature: MA Experiment 20001905 PARAMETER Experiment Name: At_Drought_Reproduction_P Parameter: Age (day) Value: 40
  misc_feature: MA Experiment 20001905 PARAMETER Experiment Name: At_Drought_Reproduction_P Parameter: Organism Value: A. thaliana
  misc_feature: MA Experiment 20001905 PARAMETER Experiment Name: At_Drought_Reproduction_P Parameter: Plant Line Value: WS
  misc_feature: MA Experiment 20001905 PARAMETER Experiment Name: At_Drought_Reproduction_P Parameter: Timepoint (day) Value: 10
  misc_feature: MA Experiment 20001905 PARAMETER Experiment Name: At_Drought_Reproduction_P Parameter: Tissue Value: Rosettes
  misc_feature: MA Experiment 20001905 PARAMETER Experiment Name: At_Drought_Reproduction_P Parameter: Treatment Value: Drought vs. No Drought
cacgcgtccgtcagtgacacatcgagtcgaagaagaacatacatttctactgaatcagatctgatctgctttgtcagtttttaaactgttctgatctaattgagatttctcaattccactcaaaatcctttaaagcttgtctctttttggtatctctgaatcaatttggggaaatcaagaggagaagtgacaatggatgcgtttagaagacaagcgagtaagcttagagaccaagtcgcaaagcagcaactggctgtgataaagcaattcagtgggactggttatgaaagctcagatgtaatggtgattgatgagcttgaaatgcaaaggcatcatcaactcgataaactttaccgctctactcgttctgcaaaggagttccagagagatattgttaaagcagctgaggcatttaccacgatcgggctcagacacattgaagcagggaccaagttgtctgaagactgttgtaggtatgggaacgaaatagtcaggaacattgatgagaatatactggccaaggctgcagctatatacggtgatgcacggaaacatgtagacaaagaacaagaagacttcaacaagcttttggcttctcaggttttggatcctctaagagctatggttgccggttctcctcttgaagatgctcgtcatcttgctcaacgttacagccgcatgagacaagaagcagagacacatgcaacggaagtctctagacggcaagcacgtgtaagagaagctccgattccagaaaacgtagcaaagcttcaactagcggaagcaaaaatgcaagagctaaaagcaaatatggcagtccttggtaaagaagcaactgctgcattagccgctgttgaatcacagcaacatagactcactttccagaggcttgtggctatggttgaaggggagaagaattatcacttaagaatagcagccatcctcagtgacattgaagccgagatggtaaccgagaaacaacacaaagaatctgctcttcctgcgattccaacagagaacggctcagagaaaacgtcatactttcttgctgaagtgattcatccattttccgctgtttcagagaaagagttagacttggacaaaggagattacatcgttgtccgaaaggtgagccaaaccggttgggctgaaggagaatgcaaaggcaaagctggttggtttcctatggcttacattgagaagcgacagagacttcccactaccaactttgctgctgaagtttactgagtctcttcttcaaagatttcattttttcttacatttgtgtctgaaaactttgtttcagttatgtcctgtccccaacaaactactactcttgttcatatttgttgatccaaaatagagtttacctcc

SEQ ID NO: 78001 - protein, 351 aa, Arabidopsis thaliana
  peptide (1)..(351): Ceres Seq. ID no. 12592281
  misc_feature (284)..(338): Pfam Name: SH3 domain Pfam Description: SH3 domain
  misc_feature (1)..(351): Homolog of NCBI NO: 16974680 NR Description: SH3 domain-containing protein 3 [Arabidopsis
  misc_feature (1)..(351): Homolog of NCBI NO: 21928139 NR Description: AT4g18060/F15J5_30 [Arabidopsis thaliana]
  misc_feature (1)..(351): Homolog of NCBI NO: 22328762 NR Description: putative protein; protein id: At4g18060.1,
  misc_feature (1)..(243): Homolog of NCBI NO: 7485521 NR Description: hypothetical protein F15J5.30 - Arabidopsis >gi|5816992|emb|CAB53647.1| putative protein [Arabidopsis >gi|7268558|emb|CAB78808.1| putative protein [Arabidopsis
  misc_feature (1)..(342): Homolog of NCBI NO: 22093679 NR Description: putative SH3(Src homology) domain-containing
  misc_feature (1)..(266): Homolog of NCBI NO: 34902022 NR Description: unknown protein [Oryza sativa (japonica
  misc_feature (273)..(344): Homolog of NCBI NO: 34902022 NR Description: unknown protein [Oryza sativa (japonica
  misc_feature (1)..(273): Homolog of NCBI NO: 15221714 NR Description: unknown protein; protein id: At1g31440.1, by cDNA: gi_16974675, supported by cDNA: gi_19424042, supported
  misc_feature (278)..(344): Homolog of NCBI NO: 15221714 NR Description: unknown protein; protein id: At1g31440.1, by cDNA: gi_16974675, supported by cDNA: gi_19424042, supported
  misc_feature (1)..(278): Homolog of NCBI NO: 18418491 NR Description: putative protein; protein id: At4g34660.1, by cDNA: 32357., supported by cDNA: gi_18175937, supported by
MDAFRRQASKLRDQVAKQQLAVIKQFSGTGYESSDVMVIDELEMQRHHQLDKLYRSTRSAKEFQRDIVKAAEAFTTIGLRHIEAGTKLSEDCCRYGNEIVRNIDENILAKAAAIYGDARKHVDKEQEDFNKLLASQVLDPLRAMVAGSPLEDARHLAQRYSRMRQEAETHATEVSRRQARVREAPIPENVAKLQLAEAKMQELKANMAVLGKEATAALAAVESQQHRLTFQRLVAMVEGEKNYHLRIAAILSDIEAEMVTEKQHKESALPAIPTENGSEKTSYFLAEVIHPFSAVSEKELDLDKGDYIVVRKVSQTGWAEGECKGKAGWFPMAYIEKRQRLPTTNFAAEVY

SEQ ID NO: 78002 - protein, 315 aa, Arabidopsis thaliana
  peptide (1)..(315): Ceres Seq. ID no. 12592282
  misc_feature (248)..(302): Pfam Name: SH3 domain Pfam Description: SH3 domain
  misc_feature (1)..(315): Homolog of NCBI NO: 16974680 NR Description: SH3 domain-containing protein 3 [Arabidopsis
  misc_feature (1)..(315): Homolog of NCBI NO: 21928139 NR Description: AT4g18060/F15J5_30 [Arabidopsis thaliana]
  misc_feature (1)..(315): Homolog of NCBI NO: 22328762 NR Description: putative protein; protein id: At4g18060.1,
  misc_feature (1)..(207): Homolog of NCBI NO: 7485521 NR Description: hypothetical protein F15J5.30 - Arabidopsis >gi|5816992|emb|CAB53647.1| putative protein [Arabidopsis >gi|7268558|emb|CAB78808.1| putative protein [Arabidopsis
  misc_feature (1)..(306): Homolog of NCBI NO: 22093679 NR Description: putative SH3(Src homology) domain-containing
  misc_feature (1)..(230): Homolog of NCBI NO: 34902022 NR Description: unknown protein [Oryza sativa (japonica
  misc_feature (237)..(308): Homolog of NCBI NO: 34902022 NR Description: unknown protein [Oryza sativa (japonica
  misc_feature (1)..(237): Homolog of NCBI NO: 15221714 NR Description: unknown protein; protein id: At1g31440.1, by cDNA: gi_16974675, supported by cDNA: gi_19424042, supported
  misc_feature (242)..(308): Homolog of NCBI NO: 15221714 NR Description: unknown protein; protein id: At1g31440.1, by cDNA: gi_16974675, supported by cDNA: gi_19424042, supported
  misc_feature (1)..(242): Homolog of NCBI NO: 18418491 NR Description: putative protein; protein id: At4g34660.1, by cDNA: 32357., supported by cDNA: gi_18175937, supported by
MVIDELEMQRHHQLDKLYRSTRSAKEFQRDIVKAAEAFTTIGLRHIEAGTKLSEDCCRYGNEIVRNIDENILAKAAAIYGDARKHVDKEQEDFNKLLASQVLDPLRAMVAGSPLEDARHLAQRYSRMRQEAETHATEVSRRQARVREAPIPENVAKLQLAEAKMQELKANMAVLGKEATAALAAVESQQHRLTFQRLVAMVEGEKNYHLRIAAILSDIEAEMVTEKQHKESALPAIPTENGSEKTSYFLAEVIHPFSAVSEKELDLDKGDYIVVRKVSQTGWAEGECKGKAGWFPMAYIEKRQRLPTTNFAAEVY

SEQ ID NO: 78003 - protein, 308 aa, Arabidopsis thaliana
  peptide (1)..(308): Ceres Seq. ID no. 12592283
  misc_feature (241)..(295): Pfam Name: SH3 domain Pfam Description: SH3 domain
  misc_feature (1)..(308): Homolog of NCBI NO: 16974680 NR Description: SH3 domain-containing protein 3 [Arabidopsis
  misc_feature (1)..(308): Homolog of NCBI NO: 21928139 NR Description: AT4g18060/F15J5_30 [Arabidopsis thaliana]
  misc_feature (1)..(308): Homolog of NCBI NO: 22328762 NR Description: putative protein; protein id: At4g18060.1,
  misc_feature (1)..(200): Homolog of NCBI NO: 7485521 NR Description: hypothetical protein F15J5.30 - Arabidopsis >gi|5816992|emb|CAB53647.1| putative protein [Arabidopsis >gi|7268558|emb|CAB78808.1| putative protein [Arabidopsis
  misc_feature (1)..(299): Homolog of NCBI NO: 22093679 NR Description: putative SH3(Src homology) domain-containing
  misc_feature (1)..(223): Homolog of NCBI NO: 34902022 NR Description: unknown protein [Oryza sativa (japonica
  misc_feature (230)..(301): Homolog of NCBI NO: 34902022 NR Description: unknown protein [Oryza sativa (japonica
  misc_feature (1)..(230): Homolog of NCBI NO: 15221714 NR Description: unknown protein; protein id: At1g31440.1, by cDNA: gi_16974675, supported by cDNA: gi_19424042, supported
  misc_feature (235)..(301): Homolog of NCBI NO: 15221714 NR Description: unknown protein; protein id: At1g31440.1, by cDNA: gi_16974675, supported by cDNA: gi_19424042, supported
  misc_feature (1)..(235): Homolog of NCBI NO: 18418491 NR Description: putative protein; protein id: At4g34660.1, by cDNA: 32357., supported by cDNA: gi_18175937, supported by
MQRHHQLDKLYRSTRSAKEFQRDIVKAAEAFTTIGLRHIEAGTKLSEDCCRYGNEIVRNIDENILAKAAAIYGDARKHVDKEQEDFNKLLASQVLDPLRAMVAGSPLEDARHLAQRYSRMRQEAETHATEVSRRQARVREAPIPENVAKLQLAEAKMQELKANMAVLGKEATAALAAVESQQHRLTFQRLVAMVEGEKNYHLRIAAILSDIEAEMVTEKQHKESALPAIPTENGSEKTSYFLAEVIHPFSAVSEKELDLDKGDYIVVRKVSQTGWAEGECKGKAGWFPMAYIEKRQRLPTTNFAAEVY

SEQ ID NO: 78004 - DNA, 2421 bp, Arabidopsis thaliana
  misc_feature (1)..(2421): Ceres Seq. ID no. 12600453
  misc_feature: MA Experiment ID: 20000307 Result: Up-regulated in Transcription
  misc_feature: MA Experiment 20000307 PARAMETER Experiment Name: At_Germinating_Seeds_Sub_P Parameter: Age (hr) Value: 24 vs. 0
  misc_feature: MA Experiment 20000307 PARAMETER Experiment Name: At_Germinating_Seeds_Sub_P Parameter: Organism Value: A. thaliana
  misc_feature: MA Experiment 20000307 PARAMETER Experiment Name: At_Germinating_Seeds_Sub_P Parameter: Plant Line Value: WS
  misc_feature: MA Experiment 20000307 PARAMETER Experiment Name: At_Germinating_Seeds_Sub_P Parameter: Tissue Value: Germinating Seeds
  misc_feature: MA Experiment ID: 20000355 Result: Up-regulated in Transcription
  misc_feature: MA Experiment 20000355 PARAMETER Experiment Name: At_Siliques_Sub_P Parameter: Age (day) Value: 21
  misc_feature: MA Experiment 20000355 PARAMETER Experiment Name: At_Siliques_Sub_P Parameter: Organism Value: A. thaliana
  misc_feature: MA Experiment 20000355 PARAMETER Experiment Name: At_Siliques_Sub_P Parameter: Plant Line Value: WS
  misc_feature: MA Experiment 20000355 PARAMETER Experiment Name: At_Siliques_Sub_P Parameter: Tissue Value: Less Than 5mm Siliques vs. Whole Plant
  misc_feature: MA Experiment ID: 20000440 Result: Up-regulated in Transcription
  misc_feature: MA Experiment 20000440 PARAMETER Experiment Name: At_Closed-Flower__Sub_P Parameter: Tissue Value: Closed Flower vs. Whole Plant
tttctggttacagacagatacattccctctgagaaccaagaaaacaaaataataataaaaaaccctaattccccgctccacttctctctctcacgctctctctgtgattttagtatggaagcaacggcggaggaatcagttagtactcttgttacgacgatggttgatgagacgtatgagttcttagcgcctcgatggtttgatttcgttaatggagagactgaagatgagtctcgccgagcagaactctggtttcaatcggccttaagctgcgctccttctccttcggttcctagaatcaaagcaaggagatcgttcaaggtagaggccatgtgcaacttcaatgaagctgaagaagagacgctcaaggataaagagccgttagaaccagtagttccaattgtttctttacaatcgcagccttctcaggccaagaaagcagaagttgctccttctaaagcaagcactgttaagccgtctcgcatcagttccaaggacgcagaggtcaacaacaagaccgtagatgccaggttctccatcgttctttgggagattgtatcgctgttaagtgacgatccgacgactgagccaatagaagacaaggagaacattgctcctgcttgcacacccaaaccaccaatgcagttttctctaggggcaaagtcggtggatcttaagaagcagcaaactgctagaaagatagctagtctgctgaagaatccatctacactaaggcctaaaaaccagtctcaagccaaaggcagtcatcagaaaagtgtgaaaggggaaacgaatcttaacaacatagctagcactaccaatctgattcaagaaaatcaagccatcaaaaggcaaaagctagatgatggaaaatcaagacagattctcaatccaaaaccagcaactctgctccacaagacaagaaatggtcttgttaacactggtttcaacttatgcccttcagtcactaagcacactccgaaggaaaacagaaaggtttatgttcgtgagcaaattgcaccttttgtttcaactgctgaattgatgaagaagttccaaacaagcacgcgagacctattcgtccagaatcgacctaagctgacactgacaagaccaaaggaacccgaatttgtgacgtcccaacgagctcgtcctttgagagttaagagcagtgcagaacttgaggaagagatgttggcaaagattcccaagtttaaagctcgacctgtgaacaagaaggaatttcatcttcaaacaatggcaagggctaaccagcatgcagagacatcttcaatagcttcaacagaagtgtctaagcagcataatgatcagaagcatcaccttactgaaccaaagagccctgtgctccaaacaatgctaagagctcgtcctactatagcaaaaactactgcagaacttgagcaagaggaactggagaaggcaccaaagttcaaagcaaaacctttgaacaaaaagatatttgaaagtaaaggagaaatgggtatcttttgcaacaccaagaagcacataacgatacctcaagagtttcactttgcgacagatgagaggatatcacgaccagaatctgtcttagatatattcgacaaggaaagaggcgctgagaaagagaagaaattttatatggaactcatgtataagaaattaggagatgtaaaggcaagagttccaaaggcaaatccatatccttacacgacggactatccagtgaagagagagatggtgttgataaatcttacgtgttccaactctcaggtaccaccaaaaccagaacctaagcaatgcacacaaccagaaccgttccagttagagagtctagtaaggcacgaagaggaaatgcgaagagaaagggaagagaggaggagaatggagacagaagaagcccagaagaggctcttcaaagcacaaccagttataaaagaggacccaatccctgttccagagaaagtacgaatgcccctcacagaaattcaggagttcaatcttcatgtagagcatcgagctgttgaacgagcagattttgatcacaaagtaagcattcttttcagtcatttcagcaaacaaaagaatgcttcaataacctctgaaattgatgaatccattctattttggaaccagatcaaagagaaggagaaccagtacaaaagataccgtgaagagagtgaagctgcaaaaatggtggaggaagagagagctctgaagcaaatgagaaagacaatggttcctcatgccagacctgtgcctaacttcaacaaacccttcttacctcagaagtccaacaaggggaccacaaaagcaaaatcacccaatcttagagtgattaaaagaaccgagagaagaaccatgatggctcgaccaaccatctctgcagctactagcgcctctgctggtcagatgagatag

SEQ ID NO: 78005 - protein, 806 aa, Arabidopsis thaliana
  peptide (1)..(806): Ceres Seq. ID no. 12600454
  misc_feature (162)..(413): Homolog of NCBI NO: 34395225 NR Description: unknown protein [Oryza sativa (japonica
  misc_feature (625)..(789): Homolog of NCBI NO: 15241452 NR Description: putative protein; protein id: At5g44270.1 thaliana] >gi|10176882|dbj|BAB10112.1| contains similarity to
  misc_feature (331)..(513): Homolog of NCBI NO: 7486581 NR Description: hypothetical protein F7H19.40 - Arabidopsis >gi|3292811|emb|CAA19801.1| hypothetical protein [Arabidopsis >gi|7269133|emb|CAB79241.1| hypothetical protein [Arabidopsis
  misc_feature (39)..(124): Homolog of NCBI NO: 7486581 NR Description: hypothetical protein F7H19.40 - Arabidopsis >gi|3292811|emb|CAA19801.1| hypothetical protein [Arabidopsis >gi|7269133|emb|CAB79241.1| hypothetical protein [Arabidopsis
  misc_feature (331)..(513): Homolog of NCBI NO: 30685961 NR Description: expressed protein [Arabidopsis thaliana]
  misc_feature (39)..(124): Homolog of NCBI NO: 30685961 NR Description: expressed protein [Arabidopsis thaliana]
  misc_feature (224)..(543): Homolog of NCBI NO: 15234384 NR Description: putative protein; protein id: At4g11990.1
  misc_feature (36)..(132): Homolog of NCBI NO: 15234384 NR Description: putative protein; protein id: At4g11990.1
  misc_feature (118)..(738): Homolog of NCBI NO: 28071277 NR Description: restricted expression proliferation associated
  misc_feature (54)..(368): Homolog of NCBI NO: 34395225 NR Description: unknown protein [Oryza sativa (japonica
FLVTDRYIPSENQENKIIIKNPNSPLHFSLSRSLCDFSMEATAEESVSTLVTTMVDETYEFLAPRWFDFVNGETEDESRRAELWFQSALSCAPSPSVPRIKARRSFKVEAMCNFNEAEEETLKDKEPLEPVVPIVSLQSQPSQAKKAEVAPSKASTVKPSRISSKDAEVNNKTVDARFSIVLWEIVSLLSDDPTTEPIEDKENIAPACTPKPPMQFSLGAKSVDLKKQQTARKIASLLKNPSTLRPKNQSQAKGSHQKSVKGETNLNNIASTTNLIQENQAIKRQKLDDGKSRQILNPKPATLLHKTRNGLVNTGFNLCPSVTKHTPKENRKVYVREQIAPFVSTAELMKKFQTSTRDLFVQNRPKLTLTRPKEPEFVTSQRARPLRVKSSAELEEEMLAKIPKFKARPVNKKEFHLQTMARANQHAETSSIASTEVSKQHNDQKHHLTEPKSPVLQTMLRARPTIAKTTAELEQEELEKAPKFKAKPLNKKIFESKGEMGIFCNTKKHITIPQEFHFATDERISRPESVLDIFDKERGAEKEKKFYMELMYKKLGDVKARVPKANPYPYTTDYPVKREMVLINLTCSNSQVPPKPEPKQCTQPEPFQLESLVRHEEEMRREREERRRMETEEAQKRLFKAQPVIKEDPIPVPEKVRMPLTEIQEFNLHVEHRAVERADFDHKVSILFSHFSKQKNASITSEIDESILFWNQIKEKENQYKRYREESEAAKMVEEERALKQMRKTMVPHARPVPNFNKPFLPQKSNKGTTKAKSPNLRVIKRTERRTMMARPTISAATSASAGQMR

SEQ ID NO: 78006 - protein, 768 aa, Arabidopsis thaliana
  peptide (1)..(768): Ceres Seq. ID no. 12600455
  misc_feature (124)..(375): Homolog of NCBI NO: 34395225 NR Description: unknown protein [Oryza sativa (japonica
  misc_feature (587)..(751): Homolog of NCBI NO: 15241452 NR Description: putative protein; protein id: At5g44270.1 thaliana] >gi|10176882|dbj|BAB10112.1| contains similarity to
  misc_feature (293)..(475): Homolog of NCBI NO: 7486581 NR Description: hypothetical protein F7H19.40 - Arabidopsis >gi|3292811|emb|CAA19801.1| hypothetical protein [Arabidopsis >gi|7269133|emb|CAB79241.1| hypothetical protein [Arabidopsis
  misc_feature (1)..(86): Homolog of NCBI NO: 7486581 NR Description: hypothetical protein F7H19.40 - Arabidopsis >gi|3292811|emb|CAA19801.1| hypothetical protein [Arabidopsis >gi|7269133|emb|CAB79241.1| hypothetical protein [Arabidopsis
  misc_feature (293)..(475): Homolog of NCBI NO: 30685961 NR Description: expressed protein [Arabidopsis thaliana]
  misc_feature (1)..(86): Homolog of NCBI NO: 30685961 NR Description: expressed protein [Arabidopsis thaliana]
  misc_feature (186)..(505): Homolog of NCBI NO: 15234384 NR Description: putative protein; protein id: At4g11990.1
  misc_feature (1)..(94): Homolog of NCBI NO: 15234384 NR Description: putative protein; protein id: At4g11990.1
  misc_feature (80)..(700): Homolog of NCBI NO: 28071277 NR Description: restricted expression proliferation associated
  misc_feature (16)..(330): Homolog of NCBI NO: 34395225 NR Description: unknown protein [Oryza sativa (japonica
MEATAEESVSTLVTTMVDETYEFLAPRWFDFVNGETEDESRRAELWFQSALSCAPSPSVPRIKARRSFKVEAMCNFNEAEEETLKDKEPLEPVVPIVSLQSQPSQAKKAEVAPSKASTVKPSRISSKDAEVNNKTVDARFSIVLWEIVSLLSDDPTTEPIEDKENIAPACTPKPPMQFSLGAKSVDLKKQQTARKIASLLKNPSTLRPKNQSQAKGSHQKSVKGETNLNNIASTTNLIQENQAIKRQKLDDGKSRQILNPKPATLLHKTRNGLVNTGFNLCPSVTKHTPKENRKVYVREQIAPFVSTAELMKKFQTSTRDLFVQNRPKLTLTRPKEPEFVTSQRARPLRVKSSAELEEEMLAKIPKFKARPVNKKEFHLQTMARANQHAETSSIASTEVSKQHNDQKHHLTEPKSPVLQTMLRARPTIAKTTAELEQEELEKAPKFKAKPLNKKIFESKGEMGIFCNTKKHITIPQEFHFATDERISRPESVLDIFDKERGAEKEKKFYMELMYKKLGDVKARVPKANPYPYTTDYPVKREMVLINLTCSNSQVPPKPEPKQCTQPEPFQLESLVRHEEEMRREREERRRMETEEAQKRLFKAQPVIKEDPIPVPEKVRMPLTEIQEFNLHVEHRAVERADFDHKVSILFSHFSKQKNASITSEIDESILFWNQIKEKENQYKRYREESEAAKMVEEERALKQMRKTMVPHARPVPNFNKPFLPQKSNKGTTKAKSPNLRVIKRTERRTMMARPTISAATSASAGQMR

SEQ ID NO: 78007 - protein, 753 aa, Arabidopsis thaliana
  peptide (1)..(753): Ceres Seq. ID no. 12600456
  misc_feature (109)..(360): Homolog of NCBI NO: 34395225 NR Description: unknown protein [Oryza sativa (japonica
  misc_feature (572)..(736): Homolog of NCBI NO: 15241452 NR Description: putative protein; protein id: At5g44270.1 thaliana] >gi|10176882|dbj|BAB10112.1| contains similarity to
  misc_feature (278)..(460): Homolog of NCBI NO: 7486581 NR Description: hypothetical protein F7H19.40 - Arabidopsis >gi|3292811|emb|CAA19801.1| hypothetical protein [Arabidopsis >gi|7269133|emb|CAB79241.1| hypothetical protein [Arabidopsis
  misc_feature (1)..(71): Homolog of NCBI NO: 7486581 NR Description: hypothetical protein F7H19.40 - Arabidopsis >gi|3292811|emb|CAA19801.1| hypothetical protein [Arabidopsis >gi|7269133|emb|CAB79241.1| hypothetical protein [Arabidopsis
  misc_feature (278)..(460): Homolog of NCBI NO: 30685961 NR Description: expressed protein [Arabidopsis thaliana]
  misc_feature (1)..(71): Homolog of NCBI NO: 30685961 NR Description: expressed protein [Arabidopsis thaliana]
  misc_feature (171)..(490): Homolog of NCBI NO: 15234384 NR Description: putative protein; protein id: At4g11990.1
  misc_feature (1)..(79): Homolog of NCBI NO: 15234384 NR Description: putative protein; protein id: At4g11990.1
  misc_feature (65)..(685): Homolog of NCBI NO: 28071277 NR Description: restricted expression proliferation associated
  misc_feature (1)..(315): Homolog of NCBI NO: 34395225 NR Description: unknown protein [Oryza sativa (japonica
MVDETYEFLAPRWFDFVNGETEDESRRAELWFQSALSCAPSPSVPRIKARRSFKVEAMCNFNEAEEETLKDKEPLEPVVPIVSLQSQPSQAKKAEVAPSKASTVKPSRISSKDAEVNNKTVDARFSIVLWEIVSLLSDDPTTEPIEDKENIAPACTPKPPMQFSLGAKSVDLKKQQTARKIASLLKNPSTLRPKNQSQAKGSHQKSVKGETNLNNIASTTNLIQENQAIKRQKLDDGKSRQILNPKPATLLHKTRNGLVNTGFNLCPSVTKHTPKENRKVYVREQIAPFVSTAELMKKFQTSTRDLFVQNRPKLTLTRPKEPEFVTSQRARPLRVKSSAELEEEMLAKIPKFKARPVNKKEFHLQTMARANQHAETSSIASTEVSKQHNDQKHHLTEPKSPVLQTMLRARPTIAKTTAELEQEELEKAPKFKAKPLNKKIFESKGEMGIFCNTKKHITIPQEFHFATDERISRPESVLDIFDKERGAEKEKKFYMELMYKKLGDVKARVPKANPYPYTTDYPVKREMVLINLTCSNSQVPPKPEPKQCTQPEPFQLESLVRHEEEMRREREERRRMETEEAQKRLFKAQPVIKEDPIPVPEKVRMPLTEIQEFNLHVEHRAVERADFDHKVSILFSHFSKQKNASITSEIDESILFWNQIKEKENQYKRYREESEAAKMVEEERALKQMRKTMVPHARPVPNFNKPFLPQKSNKGTTKAKSPNLRVIKRTERRTMMARPTISAATSASAGQMR

SEQ ID NO: 78008 - DNA, 1891 bp, Arabidopsis thaliana
  misc_feature (1)..(1891): Ceres Seq. ID no. 12600627
  misc_feature: MA Experiment ID: 108462 Result: Up-regulated in Transcription
  misc_feature: MA Experiment 108462 PARAMETER Experiment Name: At_Germinating_Seeds_cDNA_P Parameter: Age (day) Value: 2 vs. 0
  misc_feature: MA Experiment 108462 PARAMETER Experiment Name: At_Germinating_Seeds_cDNA_P Parameter: Tissue Value: Germinating Seeds
  misc_feature: MA Experiment ID: 108463 Result: Up-regulated in Transcription
  misc_feature: MA Experiment 108463 PARAMETER Experiment Name: At_Germinating_Seeds_cDNA_P Parameter: Age (day) Value: 3 vs. 0
  misc_feature: MA Experiment 108463 PARAMETER Experiment Name: At_Germinating_Seeds_cDNA_P Parameter: Tissue Value: Germinating Seeds
  misc_feature: MA Experiment ID: 20000173 Result: Down-regulated in Transcription
  misc_feature: MA Experiment 20000173 PARAMETER Experiment Name: At_42deg_Heat_P Parameter: Age (day) Value: 14
  misc_feature: MA Experiment 20000173 PARAMETER Experiment Name: At_42deg_Heat_P Parameter: Organism Value: A. thaliana
  misc_feature: MA Experiment 20000173 PARAMETER Experiment Name: At_42deg_Heat_P Parameter: Plant Line Value: WS
  misc_feature: MA Experiment 20000173 PARAMETER Experiment Name: At_42deg_Heat_P Parameter: Temperature (deg C) Value: 42 vs. 22
  misc_feature: MA Experiment 20000173 PARAMETER Experiment Name: At_42deg_Heat_P Parameter: Timepoint (hr) Value: 6
  misc_feature: MA Experiment 20000173 PARAMETER Experiment Name: At_42deg_Heat_P Parameter: Tissue Value: Aerial
  misc_feature: MA Experiment ID: 20000180 Result: Up-regulated in Transcription
  misc_feature: MA Experiment 20000180 PARAMETER Experiment Name: At_Germinating_Seeds_P Parameter: Age (hr) Value: 24 vs. 0
  misc_feature: MA Experiment 20000180 PARAMETER Experiment Name: At_Germinating_Seeds_P Parameter: Tissue Value: Germinating Seeds
  misc_feature: MA Experiment ID: 20000234 Result: Up-regulated in Transcription
  misc_feature: MA Experiment 20000234 PARAMETER Experiment Name: At_Siliques_P Parameter: Age (day) Value: 21
  misc_feature: MA Experiment 20000234 PARAMETER Experiment Name: At_Siliques_P Parameter: Organism Value: A. thaliana
  misc_feature: MA Experiment 20000234 PARAMETER Experiment Name: At_Siliques_P Parameter: Plant Line Value: WS
  misc_feature: MA Experiment 20000234 PARAMETER Experiment Name: At_Siliques_P Parameter: Tissue Value: Less Than 5mm Siliques vs. Whole Plant
  misc_feature: MA Experiment ID: 20000235 Result: Up-regulated in Transcription
  misc_feature: MA Experiment 20000235 PARAMETER Experiment Name: At_Siliques_P Parameter: Age (day) Value: 21
  misc_feature: MA Experiment 20000235 PARAMETER Experiment Name: At_Siliques_P Parameter: Organism Value: A. thaliana
  misc_feature: MA Experiment 20000235 PARAMETER Experiment Name: At_Siliques_P Parameter: Plant Line Value: WS
  misc_feature: MA Experiment 20000235 PARAMETER Experiment Name: At_Siliques_P Parameter: Tissue Value: 5-10mm Siliques vs. Whole Plant
  misc_feature: MA Experiment ID: 20000264 Result: Up-regulated in Transcription
  misc_feature: MA Experiment 20000264 PARAMETER Experiment Name: At_Open_Flower_P Parameter: Age (day) Value: 21
  misc_feature: MA Experiment 20000264 PARAMETER Experiment Name: At_Open_Flower_P Parameter: Plant Line Value: WS
  misc_feature: MA Experiment 20000264 PARAMETER Experiment Name: At_Open_Flower_P Parameter: Tissue Value: Open Flower vs. Whole Plant
  misc_feature: MA Experiment ID: 20000265 Result: Up-regulated in Transcription
  misc_feature: MA Experiment 20000265 PARAMETER Experiment Name: At_Open_Flower_P Parameter: Age (day) Value: 21
  misc_feature: MA Experiment 20000265 PARAMETER Experiment Name: At_Open_Flower_P Parameter: Plant Line Value: WS
  misc_feature: MA Experiment 20000265 PARAMETER Experiment Name: At_Open_Flower_P Parameter: Tissue Value: Closed Flower vs. Whole Plant
  misc_feature: MA Experiment ID: 20000286 Result: Up-regulated in Transcription
  misc_feature: MA Experiment 20000286 PARAMETER Experiment Name: At_Open_Flower_P Parameter: Age (day) Value: 21
  misc_feature: MA Experiment 20000286 PARAMETER Experiment Name: At_Open_Flower_P Parameter: Plant Line Value: WS
  misc_feature: MA Experiment 20000286 PARAMETER Experiment Name: At_Open_Flower_P Parameter: Tissue Value: Half Open vs. Whole Plant
  misc_feature: MA Experiment ID: 20000438 Result: Up-regulated in Transcription
  misc_feature: MA Experiment 20000438 PARAMETER Experiment Name: At_Shoots__P Parameter: Age (day) Value: 14
  misc_feature: MA Experiment 20000438 PARAMETER Experiment Name: At_Shoots__P Parameter: Tissue Value: Shoots vs. Whole Plant
  misc_feature: MA Experiment ID: 20000794 Result: Up-regulated in Transcription
  misc_feature: MA Experiment 20000794 PARAMETER Experiment Name: At_Petals_P Parameter: Age (day) Value: 23-25 days
  misc_feature: MA Experiment 20000794 PARAMETER Experiment Name: At_Petals_P Parameter: Plant Line Value: WS
  misc_feature: MA Experiment 20000794 PARAMETER Experiment Name: At_Petals_P Parameter: Tissue Value: Petals vs. Whole plant
aactcatcttcacagatgtctcaagcagctctctctctttctctctctctctctcttctttctctgatcacaagggttatttgtctgaatctcattctattgagtcattattgacctctgcagagatccggacaaagttttgaaaccgaccacaagtccaagaatcatcgatcatacaacaatgtctggagactctctgctcacatctaaacaaggaggaggttctttgtccatatactcacagccaaagaatgttactaaagagttcaacggtcgtgattcccccaagaacagcaaattccaccattacagatttgagctcgagcacgatgtgaagcgattgaaaaatcaattgcagaaagagactgcaatgcgcgctcttttgctgaaagcttctgatcaaagccataagattgagctgtctcacgcatcttctcttcctcgcagtgttcaagaacttctcaccaatatagcagctatggaagctacggtctctaagctcgaacaagagatcatgtctctgcatttcttgctgattcaagaacgaaacgagagaaaacttgccgagtacaacctcacccattctctatctccacctaatgctttagatttggttagactttccgaaaagaatgaaagtctacgccctaaagaccacaaagcacaacctagaagcaaagtggcaaagtccttgcagagttttgacaatgctaatgaactatccaaggagatgatcagatgcatgagaaacatatttgtgtctctaggagagacatctgcaggatccaaatcctcacaagagactgccagtgtttcttctcgtgagaatcctccatcatcatcaacgtcatggtggtctccttcagaacactcacggatctccaggtgggcacagagtccacggatcgatattcagaagaactcagatgttttagccacagagagcgatgtgtttgatctttatacagtccaaggaaagctgagctgggctgacatcgggagttacagatctgcaactgaagtggcttcaatgtctgttgaggagaaaaggctcggatatgcttcagatgagttatggagattcaggaacctcgttgaaagacttgccagagtaaatccagcagaactaagccacaacgagaagcttgccttctggatcaacatatacaatgccatgatcatgcatgcatacttggcttacggcgtaccaaaaactgacttaaagctcttctccttgatgcaaaaggctgcttatacagttggtggccattcatacaacgcagcaacgatcgaatacatgactttaaagatgagccctcctctgcatcgtcctcaaattgctctgcttctctccattctcaagctgaaagtatcagacgaacagagacaagcggggataagtacaccggaacctctagtgtcatttgctctcagctgcgggatgcactcatctcctgcggtgagaatatactcagccgagaacgtaggagaagaacttgaagaagctcagaaagattatatccaggcgtcagtgggagtgagcccaaggggaaagttgattgtgccccaaatgcttcactgtttcgccaagaaatctgtcgatgactgcaaggttgctctgtggatttctcgtcatttgcctcctcgccaagctgcatttgttgagcagtgtattcacaggcgacaatggtggggttttctgggttcatctagtagcaaatgcggcatagttccttttgattcacggttccgatatttgtttcttccgtagcaaggcattgattcacaatgatgtgattaaagcaaatactgttccgatcctagggtttagatctatgattatttaggtgattcaatcttattttctcaaactaataaacaaataaatgga

SEQ ID NO: 78009 - protein, 529 aa, Arabidopsis thaliana
  peptide (1)..(529): Ceres Seq. ID no. 12600628
  misc_feature (302)..(447): Pfam Name: Protein of unknown function, DUF547 Pfam Description: Protein of unknown function, DUF547
  misc_feature (1)..(529): Homolog of NCBI NO: 30684987 NR Description: expressed protein [Arabidopsis thaliana] At1g16750/F19K19_26 [Arabidopsis thaliana]
  misc_feature (89)..(529): Homolog of NCBI NO: 25518300 NR Description: hypothetical protein F17F16.4 - Arabidopsis >gi|9954731|gb|AAG09084.1|AC026237_5 Unknown Protein [Arabidopsis
  misc_feature (184)..(529): Homolog of NCBI NO: 21618245 NR Description: unknown [Arabidopsis thaliana]
  misc_feature (46)..(529): Homolog of NCBI NO: 22331037 NR Description: hypothetical protein; protein id: At3g13000.1, by cDNA: gi_20260517 [Arabidopsis thaliana] gb|AAF35949.1~gene_id:MGH6.15~strong similarity to unknown
  misc_feature (51)..(139): Homolog of NCBI NO: 25518300 NR Description: hypothetical protein F17F16.4 - Arabidopsis >gi|9954731|gb|AAG09084.1|AC026237_5 Unknown Protein [Arabidopsis
  misc_feature (36)..(527): Homolog of NCBI NO: 30695170 NR Description: expressed protein [Arabidopsis thaliana]
  misc_feature (47)..(527): Homolog of NCBI NO: 15239037 NR Description: putative protein; protein id: At5g42690.1 thaliana] >gi|10177272|dbj|BAB10625.1|
  misc_feature (148)..(526): Homolog of NCBI NO: 25407787 NR Description: hypothetical protein AT4g37080 [imported] - thaliana >gi|4006868|emb|CAB16786.1| putative protein thaliana] >gi|7270657|emb|CAB80374.1| putative protein
  misc_feature (148)..(526): Homolog of NCBI NO: 30690854 NR Description: expressed protein [Arabidopsis thaliana] AT4g37080/C7A10_280 [Arabidopsis thaliana]
  misc_feature (125)..(529): Homolog of NCBI NO: 34895788 NR Description: P0434B04.9 [Oryza sativa (japonica
MSGDSLLTSKQGGGSLSIYSQPKNVTKEFNGRDSPKNSKFHHYRFELEHDVKRLKNQLQKETAMRALLLKASDQSHKIELSHASSLPRSVQELLTNIAAMEATVSKLEQEIMSLHFLLIQERNERKLAEYNLTHSLSPPNALDLVRLSEKNESLRPKDHKAQPRSKVAKSLQSFDNANELSKEMIRCMRNIFVSLGETSAGSKSSQETASVSSRENPPSSSTSWWSPSEHSRISRWAQSPRIDIQKNSDVLATESDVFDLYTVQGKLSWADIGSYRSATEVASMSVEEKRLGYASDELWRFRNLVERLARVNPAELSHNEKLAFWINIYNAMIMHAYLAYGVPKTDLKLFSLMQKAAYTVGGHSYNAATIEYMTLKMSPPLHRPQIALLLSILKLKVSDEQRQAGISTPEPLVSFALSCGMHSSPAVRIYSAENVGEELEEAQKDYIQASVGVSPRGKLIVPQMLHCFAKKSVDDCKVALWISRHLPPRQAAFVEQCIHRRQWWGFLGSSSSKCGIVPFDSRFRYLFLP

SEQ ID NO: 78010 - protein, 466 aa, Arabidopsis thaliana
  peptide (1)..(466): Ceres Seq. ID no. 12600629
  misc_feature (239)..(384): Pfam Name: Protein of unknown function, DUF547 Pfam Description: Protein of unknown function, DUF547
  misc_feature (1)..(466): Homolog of NCBI NO: 30684987 NR Description: expressed protein [Arabidopsis thaliana] At1g16750/F19K19_26 [Arabidopsis thaliana]
  misc_feature (26)..(466): Homolog of NCBI NO: 25518300 NR Description: hypothetical protein F17F16.4 - Arabidopsis >gi|9954731|gb|AAG09084.1|AC026237_5 Unknown Protein [Arabidopsis
  misc_feature (121)..(466): Homolog of NCBI NO: 21618245 NR Description: unknown [Arabidopsis thaliana]
  misc_feature (1)..(466): Homolog of NCBI NO: 22331037 NR Description: hypothetical protein; protein id: At3g13000.1, by cDNA: gi_20260517 [Arabidopsis thaliana] gb|AAF35949.1~gene_id:MGH6.15~strong similarity to unknown
  misc_feature (1)..(76): Homolog of NCBI NO: 25518300 NR Description: hypothetical protein F17F16.4 - Arabidopsis >gi|9954731|gb|AAG09084.1|AC026237_5 Unknown Protein [Arabidopsis
  misc_feature (1)..(464): Homolog of NCBI NO: 30695170 NR Description: expressed protein [Arabidopsis thaliana]
  misc_feature (1)..(464): Homolog of NCBI NO: 15239037 NR Description: putative protein; protein id: At5g42690.1 thaliana] >gi|10177272|dbj|BAB10625.1|
  misc_feature (85)..(463): Homolog of NCBI NO: 25407787 NR Description: hypothetical protein AT4g37080 [imported] - thaliana >gi|4006868|emb|CAB16786.1| putative protein thaliana] >gi|7270657|emb|CAB80374.1| putative protein
  misc_feature (85)..(463): Homolog of NCBI NO: 30690854 NR Description: expressed protein [Arabidopsis thaliana] AT4g37080/C7A10_280 [Arabidopsis thaliana]
  misc_feature (62)..(466): Homolog of NCBI NO: 34895788 NR Description: P0434B04.9 [Oryza sativa (japonica
MRALLLKASDQSHKIELSHASSLPRSVQELLTNIAAMEATVSKLEQEIMSLHFLLIQERNERKLAEYNLTHSLSPPNALDLVRLSEKNESLRPKDHKAQPRSKVAKSLQSFDNANELSKEMIRCMRNIFVSLGETSAGSKSSQETASVSSRENPPSSSTSWWSPSEHSRISRWAQSPRIDIQKNSDVLATESDVFDLYTVQGKLSWADIGSYRSATEVASMSVEEKRLGYASDELWRFRNLVERLARVNPAELSHNEKLAFWINIYNAMIMHAYLAYGVPKTDLKLFSLMQKAAYTVGGHSYNAATIEYMTLKMSPPLHRPQIALLLSILKLKVSDEQRQAGISTPEPLVSFALSCGMHSSPAVRIYSAENVGEELEEAQKDYIQASVGVSPRGKLIVPQMLHCFAKKSVDDCKVALWISRHLPPRQAAFVEQCIHRRQWWGFLGSSSSKCGIVPFDSRFRYLFLP

SEQ ID NO: 78011 - protein, 430 aa, Arabidopsis thaliana
  peptide (1)..(430): Ceres Seq. ID no. 12600630
  misc_feature (203)..(348): Pfam Name: Protein of unknown function, DUF547 Pfam Description: Protein of unknown function, DUF547
  misc_feature (1)..(430): Homolog of NCBI NO: 30684987 NR Description: expressed protein [Arabidopsis thaliana] At1g16750/F19K19_26 [Arabidopsis thaliana]
  misc_feature (1)..(430): Homolog of NCBI NO: 25518300 NR Description: hypothetical protein F17F16.4 - Arabidopsis >gi|9954731|gb|AAG09084.1|AC026237_5 Unknown Protein [Arabidopsis
  misc_feature (85)..(430): Homolog of NCBI NO: 21618245 NR Description: unknown [Arabidopsis thaliana]
  misc_feature (1)..(430): Homolog of NCBI NO: 22331037 NR Description: hypothetical protein; protein id: At3g13000.1, by cDNA: gi_20260517 [Arabidopsis thaliana] gb|AAF35949.1~gene_id:MGH6.15~strong similarity to unknown
  misc_feature (1)..(40): Homolog of NCBI NO: 25518300 NR Description: hypothetical protein F17F16.4 - Arabidopsis >gi|9954731|gb|AAG09084.1|AC026237_5 Unknown Protein [Arabidopsis
  misc_feature (1)..(428): Homolog of NCBI NO: 30695170 NR Description: expressed protein [Arabidopsis thaliana]
  misc_feature (1)..(428): Homolog of NCBI NO: 15239037 NR Description: putative protein; protein id: At5g42690.1 thaliana] >gi|10177272|dbj|BAB10625.1|
  misc_feature (49)..(427): Homolog of NCBI NO: 25407787 NR Description: hypothetical protein AT4g37080 [imported] - thaliana >gi|4006868|emb|CAB16786.1| putative protein thaliana] >gi|7270657|emb|CAB80374.1| putative protein
  misc_feature (49)..(427): Homolog of NCBI NO: 30690854 NR Description: expressed protein [Arabidopsis thaliana] AT4g37080/C7A10_280 [Arabidopsis thaliana]
  misc_feature (26)..(430): Homolog of NCBI NO: 34895788 NR Description: P0434B04.9 [Oryza sativa (japonica
MEATVSKLEQEIMSLHFLLIQERNERKLAEYNLTHSLSPPNALDLVRLSEKNESLRPKDHKAQPRSKVAKSLQSFDNANELSKEMIRCMRNIFVSLGETSAGSKSSQETASVSSRENPPSSSTSWWSPSEHSRISRWAQSPRIDIQKNSDVLATESDVFDLYTVQGKLSWADIGSYRSATEVASMSVEEKRLGYASDELWRFRNLVERLARVNPAELSHNEKLAFWINIYNAMIMHAYLAYGVPKTDLKLFSLMQKAAYTVGGHSYNAATIEYMTLKMSPPLHRPQIALLLSILKLKVSDEQRQAGISTPEPLVSFALSCGMHSSPAVRIYSAENVGEELEEAQKDYIQASVGVSPRGKLIVPQMLHCFAKKSVDDCKVALWISRHLPPRQAAFVEQCIHRRQWWGFLGSSSSKCGIVPFDSRFRYLFLP

SEQ ID NO: 78012 - DNA, 2993 bp, Arabidopsis thaliana
  misc_feature (1)..(2993): Ceres Seq. ID no. 12600682
  misc_feature: MA Experiment ID: 108434 Result: Down-regulated in Transcription
  misc_feature: MA Experiment 108434 PARAMETER Experiment Name: At_Root_Tips_cDNA_P Parameter: Tissue Value: Root Tips
  misc_feature: MA Experiment ID: 108464 Result: Up-regulated in Transcription
  misc_feature: MA Experiment 108464 PARAMETER Experiment Name: At_Germinating_Seeds_cDNA_P Parameter: Age (day) Value: 4 vs. 0
  misc_feature: MA Experiment 108464 PARAMETER Experiment Name: At_Germinating_Seeds_cDNA_P Parameter: Tissue Value: Germinating Seeds
  misc_feature: MA Experiment ID: 108469 Result: Up-regulated in Transcription
  misc_feature: MA Experiment ID: 108488 Result: Down-regulated in Transcription
  misc_feature: MA Experiment ID: 108489 Result: Up-regulated in Transcription
  misc_feature: MA Experiment ID: 108573 Result: Up-regulated in Transcription
  misc_feature: MA Experiment 108573 PARAMETER Experiment Name: At_Drought_cDNA_P Parameter: Timepoint (hr) Value: 6
  misc_feature: MA Experiment 108573 PARAMETER Experiment Name: At_Drought_cDNA_P Parameter: Tissue Value: Aerial
  misc_feature: MA Experiment 108573 PARAMETER Experiment Name: At_Drought_cDNA_P Parameter: Treatment Value: Drought vs. No Drought
  misc_feature: MA Experiment ID: 108574 Result: Up-regulated in Transcription
  misc_feature: MA Experiment 108574 PARAMETER Experiment Name: At_Wounding__cDNA_P Parameter: Timepoint (hr) Value: 1
  misc_feature: MA Experiment 108574 PARAMETER Experiment Name: At_Wounding__cDNA_P Parameter: Tissue Value: Aerial
  misc_feature: MA Experiment 108574 PARAMETER Experiment Name: At_Wounding__cDNA_P Parameter: Treatment Value: Wounding vs. No Wounding
  misc_feature: MA Experiment ID: 108595 Result: Up-regulated in Transcription
  misc_feature: MA Experiment 108595 PARAMETER Experiment Name: At_Ler-pi_Ovule_cDNA_P Parameter: Plant Line Value: null
  misc_feature: MA Experiment ID: 108667 Result: Up-regulated in Transcription
  misc_feature: MA Experiment 108667 PARAMETER Experiment Name: At_2mM_SA_cDNA_P Parameter: Plant Line Value: WS
  misc_feature: MA Experiment 108667 PARAMETER Experiment Name: At_2mM_SA_cDNA_P Parameter: Timepoint (hr) Value: 1
  misc_feature: MA Experiment 108667 PARAMETER Experiment Name: At_2mM_SA_cDNA_P Parameter: Treatment Value: 2mM SA vs. No Treatment
  misc_feature: MA Experiment ID: 20000314 Result: Down-regulated in Transcription
  misc_feature: MA Experiment 20000314 PARAMETER Experiment Name: At_14day_Shoots-Roots_Sub_P Parameter: Age (day) Value: 14
  misc_feature: MA Experiment 20000314 PARAMETER Experiment Name: At_14day_Shoots-Roots_Sub_P Parameter: Organism Value: A. thaliana
  misc_feature: MA Experiment 20000314 PARAMETER Experiment Name: At_14day_Shoots-Roots_Sub_P Parameter: Plant Line Value: WS
  misc_feature: MA Experiment 20000314 PARAMETER Experiment Name: At_14day_Shoots-Roots_Sub_P Parameter: Tissue Value: Roots vs. Whole Plant
  misc_feature: MA Experiment ID: 20000329 Result: Up-regulated in Transcription
  misc_feature: MA Experiment 20000329 PARAMETER Experiment Name: At_4deg_Cold_Sub_P Parameter: Age (day) Value: 14
  misc_feature: MA Experiment 20000329 PARAMETER Experiment Name: At_4deg_Cold_Sub_P Parameter: Organism Value: A. thaliana
  misc_feature: MA Experiment 20000329 PARAMETER Experiment Name: At_4deg_Cold_Sub_P Parameter: Plant Line Value: WS
  misc_feature: MA Experiment 20000329 PARAMETER Experiment Name: At_4deg_Cold_Sub_P Parameter: Temperature (deg C) Value: 4 vs. 22
  misc_feature: MA Experiment 20000329 PARAMETER Experiment Name: At_4deg_Cold_Sub_P Parameter: Timepoint (hr) Value: 6
  misc_feature: MA Experiment 20000329 PARAMETER Experiment Name: At_4deg_Cold_Sub_P Parameter: Tissue Value: Aerial
agaacgcaaccaaataaagaaagctctcaaactcagtcttgaagcttcaactttatatctaccatatcatcaactaactaattctttttaaaatggctttagctaatgagataatgggttctcgtctaatcttcgagagatcatcatcacttgcgtctccgtttcattcgcgtttctccatcaagaagaagacacagagaacacagttctccatcaacccttttgatccgagacctatgagagccgttaactcaagcggcgttgtagcggccatcagcgaggatttggttaaaacgctgcgtattagcactgtcggtagaaaacaagagaaggaggaagaagaggagaagtcggtgaagtttaaggtgagagcagttgcgacggtgaggaacaaaaacaaagaggattttaaagaaactttggttaagcatttggatgcttttactgataaaattggtagaaacgttgtcttggagcttatgagtacccaagttgatccaaaaacgaatgagccaaagaagagtaaagcggcagttttgaaagattggtcaaagaaatcaaattcaaaggcggaaagagtccattacacggccgagttcacggtggattcagcctttggttctccgggagccatcaccgtgaccaacaaacaccaaaaagagttctttcttgagagcatcaccatcgagggtttcgcatgtggccctgttcacttcccctgcaactcttgggtccaatctcaaaaagaccatccatccaaacgaattctcttcactaatcagccttacttgccgagcgagacaccgtccggtctaagaacattaagggagaaagaattggagaatctaagaggaaatggtaaaggagaaagaaaattatcagacagaatctacgattatgatgtgtacaacgacataggaaatccggacatatcacgtgaactagcccgtcccacacttggtggccgtgaatttccttaccctagacgctgtcgaaccggccggtcttcaaccgacaccgatatgatgtctgagaggcgggtggagaaaccattaccgatgtatgtgccaagagatgagcagttcgaggagtctaagcagaacacttttgctgcatgtagacttaaggcggttttacataaccttataccttcactaaaagctagcattttggctgaggacttcgctaactttggtgagatcgatagtctttacaaagaaggcttgcttctcaagttagggtttcaagatgatatgttcaagaaattccctttaccgaagatcgtcactaccctccaaaaatcaagcgagggcttgcttagatacgacactcctaaaatagtttcaaaggataaatatgcatggcttcgagatgacgagttcgcacgccaagccatagctgggatcaacccggtcaacatagaacgagtcacgtcttatccaccggtcagcaatcttgaccctgaaatctacggaccaggtcttcactccgctctcacggaagaccacatcatcggtcaacttgatggcttaaccgtacaacaagcgttagagacgaaccgtttgtttatggtggactaccatgacatatacttaccgtttctagatagaatcaacgcgcttgatggacgcaaggcttacgcgactcgaaccatattgttcttgacccgactcggtacactcaagcctatcgccatcgagctaagcctcccttctcaatcaagctcaaaccaaaagtccaagcgcgtggtcacacctccagtagacgcaacctccaactggatgtggcagctagccaaggcccacgttgggtccaatgacgctggtgtccaccagcttgtgaatcattggttacgtactcatgcgtgtttggaaccgtttatattagctgctcatagacaattaagcgcaatgcatccgatattcaaattattagaccctcacatgaggtacactttggagatcaatgccgtggcacgacagactttgattagtgcggacggtgtgatcgagtcgtgcttcactgctggtcaatacggtctagagattagttccgctgcgtataagaacaaatggcggtttgatatggaaggtctccctgctgatctcatccgaagggggatggctgttccagacccaacacaaccacatgggcttaaattacttgttgaagactacccatacgccaacgacggtctcttattatggtccgcaatccaaacttgggtccgaacctacgtggaacgttattacgcaaactcgaacctaatccaaaccgatactgagctccaagcctggtactctgagtcaatcaacgtaggtcacgctgatcaccgcgacgccgagtggtggccgaagctttccaccgtcgaagatctcgtctccgtcatcaccaccatcatctggctcgcctcggcacaacacgcggcactcaacttcggacaatatccttacggtggctacgtcccgaaccgaccaccgctaatgcggcggttgattcccgacgagtcagatcccgagttcacgagttttatcgaagatcctcaaaagtattttttctcgtcgatgccgagtttattgcaaacgacgaagtttatggcggtggttgatacattgtcgacacattcgccggatgaggagtatatcggagagagacaacaaccgtcgatatggactggagatgctgagatcgtagatgcgttttatggattctcggcggaaatcggacggatagagaaggagattgacaagaggaatcgtgatcctagccgtaggaatcgctgtggcgcgggagtgttaccgtatgagttgatggctccgagttctgaaccgggtgttacgtgtagaggagtgcctaatagtgtatctatttagaattattcaatttttcaaagtatagagaattttataagtatataattagattttgacgcagtatggtttatttgccgatattgtaaaattcttacaaggattttattatgttgatttatt

SEQ ID NO: 78013 - protein, 926 aa, Arabidopsis thaliana
  peptide (1)..(926): Ceres Seq. ID no. 12600683
  misc_feature (125)..(226): Pfam Name: PLAT/LH2 domain Pfam Description: PLAT/LH2 domain
  misc_feature (57)..(926): Homolog of NCBI NO: 27436755 NR Description: Putative lipoxygenase [Oryza sativa (japonica
  misc_feature (85)..(926): Homolog of NCBI NO: 7433160 NR Description: probable lipoxygenase (EC 1.13.11.12) CPRD46,
  misc_feature (92)..(926): Homolog of NCBI NO: 7433169 NR Description: probable lipoxygenase (EC 1.13.11.12) (clone H1)
  misc_feature (85)..(926): Homolog of NCBI NO: 7433168 NR Description: lipoxygenase (EC 1.13.11.12) loxC, chloroplast -
  misc_feature (72)..(926): Homolog of NCBI NO: 28411860 NR Description: putative lipoxygenase [Oryza sativa (japonica
  misc_feature (114)..(926): Homolog of NCBI NO: 18461098 NR Description: lipoxygenase [Citrus jambhiri]
  misc_feature (72)..(926): Homolog of NCBI NO: 585422 NR Description: Lipoxygenase, chloroplast precursor
  misc_feature (72)..(926): Homolog of NCBI NO: 626032 NR Description: lipoxygenase (EC 1.13.11.12) L-2 - rice
  misc_feature (84)..(926): Homolog of NCBI NO: 27372775 NR Description: lipoxygenase 2 [Brassica napus]
  misc_feature (61)..(926): Homolog of NCBI NO: 30686619 NR Description: lipoxygenase (LOX), putative [Arabidopsis
MALANEIMGSRLIFERSSSLASPFHSRFSIKKKTQRTQFSINPFDPRPMRAVNSSGVVAAISEDLVKTLRISTVGRKQEKEEEEEKSVKFKVRAVATVRNKNKEDFKETLVKHLDAFTDKIGRNVVLELMSTQVDPKTNEPKKSKAAVLKDWSKKSNSKAERVHYTAEFTVDSAFGSPGAITVTNKHQKEFFLESITIEGFACGPVHFPCNSWVQSQKDHPSKRILFTNQPYLPSETPSGLRTLREKELENLRGNGKGERKLSDRIYDYDVYNDIGNPDISRELARPTLGGREFPYPRRCRTGRSSTDTDMMSERRVEKPLPMYVPRDEQFEESKQNTFAACRLKAVLHNLIPSLKASILAEDFANFGEIDSLYKEGLLLKLGFQDDMFKKFPLPKIVTTLQKSSEGLLRYDTPKIVSKDKYAWLRDDEFARQAIAGINPVNIERVTSYPPVSNLDPEIYGPGLHSALTEDHIIGQLDGLTVQQALETNRLFMVDYHDIYLPFLDRINALDGRKAYATRTILFLTRLGTLKPIAIELSLPSQSSSNQKSKRVVTPPVDATSNWMWQLAKAHVGSNDAGVHQLVNHWLRTHACLEPFILAAHRQLSAMHPIFKLLDPHMRYTLEINAVARQTLISADGVIESCFTAGQYGLEISSAAYKNKWRFDMEGLPADLIRRGMAVPDPTQPHGLKLLVEDYPYANDGLLLWSAIQTWVRTYVERYYANSNLIQTDTELQAWYSESINVGHADHRDAEWWPKLSTVEDLVSVITTIIWLASAQHAALNFGQYPYGGYVPNRPPLMRRLIPDESDPEFTSFIEDPQKYFFSSMPSLLQTTKFMAVVDTLSTHSPDEEYIGERQQPSIWTGDAEIVDAFYGFSAEIGRIEKEIDKRNRDPSRRNRCGAGVLPYELMAPSSEPGVTCRGVPNSVSI

SEQ ID NO: 78014 - protein, 919 aa, Arabidopsis thaliana
  peptide (1)..(919): Ceres Seq. ID no. 12600684
  misc_feature (118)..(219): Pfam Name: PLAT/LH2 domain Pfam Description: PLAT/LH2 domain
  misc_feature (50)..(919): Homolog of NCBI NO: 27436755 NR Description: Putative lipoxygenase [Oryza sativa (japonica
  misc_feature (78)..(919): Homolog of NCBI NO: 7433160 NR Description: probable lipoxygenase (EC 1.13.11.12) CPRD46,
  misc_feature (85)..(919): Homolog of NCBI NO: 7433169 NR Description: probable lipoxygenase (EC 1.13.11.12) (clone H1)
  misc_feature (78)..(919): Homolog of NCBI NO: 7433168 NR Description: lipoxygenase (EC 1.13.11.12) loxC, chloroplast -
  misc_feature (65)..(919): Homolog of NCBI NO: 28411860 NR Description: putative lipoxygenase [Oryza sativa (japonica
  misc_feature (107)..(919): Homolog of NCBI NO: 18461098 NR Description: lipoxygenase [Citrus jambhiri]
  misc_feature (65)..(919): Homolog of NCBI NO: 585422 NR Description: Lipoxygenase, chloroplast precursor
  misc_feature (65)..(919): Homolog of NCBI NO: 626032 NR Description: lipoxygenase (EC 1.13.11.12) L-2 - rice
  misc_feature (77)..(919): Homolog of NCBI NO: 27372775 NR Description: lipoxygenase 2 [Brassica napus]
  misc_feature (54)..(919): Homolog of NCBI NO: 30686619 NR Description: lipoxygenase (LOX), putative [Arabidopsis
MGSRLIFERSSSLASPFHSRFSIKKKTQRTQFSINPFDPRPMRAVNSSGVVAAISEDLVKTLRISTVGRKQEKEEEEEKSVKFKVRAVATVRNKNKEDFKETLVKHLDAFTDKIGRNVVLELMSTQVDPKTNEPKKSKAAVLKDWSKKSNSKAERVHYTAEFTVDSAFGSPGAITVTNKHQKEFFLESITIEGFACGPVHFPCNSWVQSQKDHPSKRILFTNQPYLPSETPSGLRTLREKELENLRGNGKGERKLSDRIYDYDVYNDIGNPDISRELARPTLGGREFPYPRRCRTGRSSTDTDMMSERRVEKPLPMYVPRDEQFEESKQNTFAACRLKAVLHNLIPSLKASILAEDFANFGEIDSLYKEGLLLKLGFQDDMFKKFPLPKIVTTLQKSSEGLLRYDTPKIVSKDKYAWLRDDEFARQAIAGINPVNIERVTSYPPVSNLDPEIYGPGLHSALTEDHIIGQLDGLTVQQALETNRLFMVDYHDIYLPFLDRINALDGRKAYATRTILFLTRLGTLKPIAIELSLPSQSSSNQKSKRVVTPPVDATSNWMWQLAKAHVGSNDAGVHQLVNHWLRTHACLEPFILAAHRQLSAMHPIFKLLDPHMRYTLEINAVARQTLISADGVIESCFTAGQYGLEISSAAYKNKWRFDMEGLPADLIRRGMAVPDPTQPHGLKLLVEDYPYANDGLLLWSAIQTWVRTYVERYYANSNLIQTDTELQAWYSESINVGHADHRDAEWWPKLSTVEDLVSVITTIIWLASAQHAALNFGQYPYGGYVPNRPPLMRRLIPDESDPEFTSFIEDPQKYFFSSMPSLLQTTKFMAVVDTLSTHSPDEEYIGERQQPSIWTGDAEIVDAFYGFSAEIGRIEKEIDKRNRDPSRRNRCGAGVLPYELMAPSSEPGVTCRGVPNSVSI

SEQ ID NO: 78015 - protein, 878 aa, Arabidopsis thaliana
  peptide (1)..(878): Ceres Seq. ID no. 12600685
  misc_feature (77)..(178): Pfam Name: PLAT/LH2 domain Pfam Description: PLAT/LH2 domain
  misc_feature (9)..(878): Homolog of NCBI NO: 27436755 NR Description: Putative lipoxygenase [Oryza sativa (japonica
  misc_feature (37)..(878): Homolog of NCBI NO: 7433160 NR Description: probable lipoxygenase (EC 1.13.11.12) CPRD46,
  misc_feature (44)..(878): Homolog of NCBI NO: 7433169 NR Description: probable lipoxygenase (EC 1.13.11.12) (clone H1)
  misc_feature (37)..(878): Homolog of NCBI NO: 7433168 NR Description: lipoxygenase (EC 1.13.11.12) loxC, chloroplast -
  misc_feature (24)..(878): Homolog of NCBI NO: 28411860 NR Description: putative lipoxygenase [Oryza sativa (japonica
  misc_feature (66)..(878): Homolog of NCBI NO: 18461098 NR Description: lipoxygenase [Citrus jambhiri]
  misc_feature (24)..(878): Homolog of NCBI NO: 585422 NR Description: Lipoxygenase, chloroplast precursor
  misc_feature (24)..(878): Homolog of NCBI NO: 626032 NR Description: lipoxygenase (EC 1.13.11.12) L-2 - rice
  misc_feature (36)..(878): Homolog of NCBI NO: 27372775 NR Description: lipoxygenase 2 [Brassica napus]
  misc_feature (13)..(878): Homolog of NCBI NO: 30686619 NR Description: lipoxygenase (LOX), putative [Arabidopsis
MRAVNSSGVVAAISEDLVKTLRISTVGRKQEKEEEEEKSVKFKVRAVATVRNKNKEDFKETLVKHLDAFTDKIGRNVVLELMSTQVDPKTNEPKKSKAAVLKDWSKKSNSKAERVHYTAEFTVDSAFGSPGAITVTNKHQKEFFLESITIEGFACGPVHFPCNSWVQSQKDHPSKRILFTNQPYLPSETPSGLRTLREKELENLRGNGKGERKLSDRIYDYDVYNDIGNPDISRELARPTLGGREFPYPRRCRTGRSSTDTDMMSERRVEKPLPMYVPRDEQFEESKQNTFAACRLKAVLHNLIPSLKASILAEDFANFGEIDSLYKEGLLLKLGFQDDMFKKFPLPKIVTTLQKSSEGLLRYDTPKIVSKDKYAWLRDDEFARQAIAGINPVNIERVTSYPPVSNLDPEIYGPGLHSALTEDHIIGQLDGLTVQQALETNRLFMVDYHDIYLPFLDRINALDGRKAYATRTILFLTRLGTLKPIAIELSLPSQSSSNQKSKRVVTPPVDATSNWMWQLAKAHVGSNDAGVHQLVNHWLRTHACLEPFILAAHRQLSAMHPIFKLLDPHMRYTLEINAVARQTLISADGVIESCFTAGQYGLEISSAAYKNKWRFDMEGLPADLIRRGMAVPDPTQPHGLKLLVEDYPYANDGLLLWSAIQTWVRTYVERYYANSNLIQTDTELQAWYSESINVGHADHRDAEWWPKLSTVEDLVSVITTIIWLASAQHAALNFGQYPYGGYVPNRPPLMRRLIPDESDPEFTSFIEDPQKYFFSSMPSLLQTTKFMAVVDTLSTHSPDEEYIGERQQPSIWTGDAEIVDAFYGFSAEIGRIEKEIDKRNRDPSRRNRCGAGVLPYELMAPSSEPGVTCRGVPNSVSI

SEQ ID NO: 78016 - DNA, 1009 bp, Arabidopsis thaliana
  misc_feature (1)..(1009): Ceres Seq. ID no. 12600686
  misc_feature: MA Experiment ID: 20000179 Result: Down-regulated in Transcription
  misc_feature: MA Experiment 20000179 PARAMETER Experiment Name: At_Germinating_Seeds_P Parameter: Age (hr) Value: 6 vs. 0
  misc_feature: MA Experiment 20000179 PARAMETER Experiment Name: At_Germinating_Seeds_P Parameter: Tissue Value: Germinating Seeds
  misc_feature: MA Experiment ID: 20000184 Result: Up-regulated in Transcription
  misc_feature: MA Experiment 20000184 PARAMETER Experiment Name: At_Shoots__P Parameter: Age (day) Value: 7
  misc_feature: MA Experiment 20000184 PARAMETER Experiment Name: At_Shoots__P Parameter: Tissue Value: Shoots vs. Whole Plant
aacaaaaaccttttgattccaattgttcttctctcttcttcttcttcttcttcttcttcttcttcgccgcttcttctctctcgaattcaccccatctcaagtgtacgttagcctcctccctctaatggcgactcgtcttcagtttgagaacaactgcgaagttggtgtcttttccaaactcactaatgcctattgcttagtcgctataggaggctctgagaacttttacagtgcttttgagtcggagttagcagatgttatccctattgttaagacctctattggaggaacacgaattattgggcgtctttgtgctggaaacaagaatgggcttcttgtacctcatacaacaactgaccaagagcttcaacacttaaggaacagtctacctgatcaagttgtggtccagcgaattgatgaacgtctgtctgctcttggaaattgcattgcctgcaatgactatgtagctcttgcccacaccgatcttgataaggaaaccgaggaaataatagcggatgtacttggcgttgaagttttccgtcagacaattgcaggcaacattctcgtgggcagttactgtgccctatccaacaaaggtggaatggtccatcctcacacctcagtggaagacttggaagaactctcaacacttcttcaagtccctctcgttgcaggaaccgtgaaccgtggtagtgaagttatcgctgcgggtatgaccgttaatgattggacctctttctgcggttcagacacaactgcgactgagctctctgtcatagacagcatcttcaagctaagggaagcccaacccagctctatcgtcgatgagatgaggaagtcattgatcgatacctatgtttaaattttgtttgtttggatgacacacacatcccaacatcgccaatgtgtcaatgtcagaaaattttcatactctactgtttgcaagaattagctgttttattttatttttgtgtggtttttaacagtttaaaggaaatctgttgatgtc

SEQ ID NO: 78017 - protein, 245 aa, Arabidopsis thaliana
  peptide (1)..(245): Ceres Seq. ID no. 12600687
  misc_feature (3)..(204): Pfam Name: eIF-6 family Pfam Description: eIF-6 family
  misc_feature (1)..(245): Homolog of NCBI NO: 15228161 NR Description: eukaryotic translation initiation factor 6 - like protein; protein id: At3g55620.1 [Arabidopsis thaliana]
  misc_feature (1)..(245): Homolog of NCBI NO: 27261099 NR Description: putative eukaryotic translation initiation factor
  misc_feature (1)..(243): Homolog of NCBI NO: 27501448 NR Description: integrin beta 4 binding protein [Mus musculus]
  misc_feature (1)..(243): Homolog of NCBI NO: 4504771 NR Description: integrin beta 4 binding protein; eukaryotic initiation factor 3A; p27BBP [Homo sapiens]
  misc_feature (1)..(243): Homolog of NCBI NO: 6381991 NR Description: b4 integrin interactor homolog [Mus musculus]
  misc_feature (1)..(244): Homolog of NCBI NO: 6325273 NR Description: similar to human translation initiation factor 6 however, TIF6 does not act as a true translation initiation protein may be involved in the biogenesis and or stability of the
  misc_feature (1)..(243): Homolog of NCBI NO: 37181067 NR Description: p27BBP/eIF6 [Xenopus laevis]
  misc_feature (1)..(243): Homolog of NCBI NO: 13785574 NR Description: p27BBP protein [Homo sapiens]
  misc_feature (1)..(242): Homolog of NCBI NO: 21492634 NR Description: CG17611-PA [Drosophila melanogaster]
  misc_feature (1)..(241): Homolog of NCBI NO: 34903364 NR Description: unnamed protein product [Oryza sativa (japonica group)] >gi|6498439|dbj|BAA87842.1| unnamed protein product
MATRLQFENNCEVGVFSKLTNAYCLVAIGGSENFYSAFESELADVIPIVKTSIGGTRIIGRLCAGNKNGLLVPHTTTDQELQHLRNSLPDQVVVQRIDERLSALGNCIACNDYVALAHTDLDKETEEIIADVLGVEVFRQTIAGNILVGSYCALSNKGGMVHPHTSVEDLEELSTLLQVPLVAGTVNRGSEVIAAGMTVNDWTSFCGSDTTATELSVIDSIFKLREAQPSSIVDEMRKSLIDTYV

SEQ ID NO: 78018 - DNA, 1111 bp, Arabidopsis thaliana
  misc_feature (1)..(1111): Ceres Seq. ID no. 12600756
  misc_feature: MA Experiment ID: 20001450 Result: Down-regulated in Transcription
  misc_feature: MA Experiment 20001450 PARAMETER Experiment Name: At_Far-red-induction_P Parameter: Age (day) Value: 7
  misc_feature: MA Experiment 20001450 PARAMETER Experiment Name: At_Far-red-induction_P Parameter: Light Value: Far-red vs. White
  misc_feature: MA Experiment 20001450 PARAMETER Experiment Name: At_Far-red-induction_P Parameter: Organism Value: A. thaliana
  misc_feature: MA Experiment 20001450 PARAMETER Experiment Name: At_Far-red-induction_P Parameter: Plant Line Value: Columbia
  misc_feature: MA Experiment 20001450 PARAMETER Experiment Name: At_Far-red-induction_P Parameter: Timepoint (hr) Value: 8
  misc_feature: MA Experiment 20001450 PARAMETER Experiment Name: At_Far-red-induction_P Parameter: Tissue Value: Whole Plant
  misc_feature: MA Experiment ID: 20001451 Result: Down-regulated in Transcription
  misc_feature: MA Experiment 20001451 PARAMETER Experiment Name: At_Far-red-induction_P Parameter: Age (day) Value: 7
  misc_feature: MA Experiment 20001451 PARAMETER Experiment Name: At_Far-red-induction_P Parameter: Light Value: Far-red vs. White
  misc_feature: MA Experiment 20001451 PARAMETER Experiment Name: At_Far-red-induction_P Parameter: Organism Value: A. thaliana
  misc_feature: MA Experiment 20001451 PARAMETER Experiment Name: At_Far-red-induction_P Parameter: Plant Line Value: Columbia
  misc_feature: MA Experiment 20001451 PARAMETER Experiment Name: At_Far-red-induction_P Parameter: Timepoint (hr) Value: 24
  misc_feature: MA Experiment 20001451 PARAMETER Experiment Name: At_Far-red-induction_P Parameter: Tissue Value: Whole Plant
gccattgcttaatcctctcctctccttcacgttgagatatttttgagttttctgtgttgaattttggggaatcgaagaaattgaatttcaaaaatcaatggcggaagaaattgaaaaatctgtgccgacagaggaatctctgatggagaagatctccgagaagattcaccatcacgattcgtcgtcatcgtctgaatccgagtacgagaaacctgattctccttcggctgtgaaggcgaagatctatcgtatgtttggcagagagaagcctgttcacaaggttctcggtggtggaaagcctgctgatgtgttcttgtggagggataaaaaactatcaggtgctgttcttggtgtcgcgactgctatttgggttctgttcgagctggttgagtatcatttgttgagtcttttgtgtcacatttcgatactcgctcttggaggcctctttttgtggtccaatgctcacacacttatcaacaagacttcaccacaaattccagaaatccatgttcccgaggaggctttccttgtggttgcttcttctctgagaaacgaactaaaccaagcttttgttatcctacgaagcattgctttaggaagggacctaaaaaaattcctgatggttgttgtcggtctatggatcatctcggtggtgggcaattggttcaatttcctgactttggtgtacatttgcttcgtgatattgcacacagtcccaatgttgtatgagaaacacgaggacaaggttgatccattggcagagaaagcaatgaaggagttgcagaaacagtatgtggttttcgatgaaaaggttctctctaagattcccattgcttctctcaaggcaaaggcaaaattgggttaaaaagagagacagacgtctatggttttctttttgcatttttgatcatgtgaaattggtggtcacttgcagggttttgccgctaatggcccaactgtcctttttatgattttatcacgttttgagtacacttgttttttcttttcaaataccattttttccagctttttatggagaattcttgagctcatgaaacgtgagacattgtttcgttttgaatattccacaaatatagaagatataaatcac

SEQ ID NO: 78019 - protein, 255 aa, Arabidopsis thaliana; identical to SEQ ID NO: 41576
  peptide (1)..(255): Ceres Seq. ID no. 12600757
  misc_feature (1)..(255): Homolog of NCBI NO: 18406991 NR Description: expressed protein; protein id: At2g46170.1, by cDNA: gi_15450758, supported by cDNA: gi_18491130 [Arabidopsis >gi|25408969|pir||E84899 hypothetical protein At2g46170
  misc_feature (1)..(253): Homolog of NCBI NO: 15236556 NR Description: putative protein; protein id: At4g23630.1, by cDNA: 39185., supported by cDNA: gi_15215585 [Arabidopsis
  misc_feature (9)..(253): Homolog of NCBI NO: 15237093 NR Description: putative protein; protein id: At4g11220.1, by cDNA: 23536., supported by cDNA: gi_14334419, supported by gi_15081760, supported by cDNA: gi_16209686 [Arabidopsis
  misc_feature (12)..(251): Homolog of NCBI NO: 15238125 NR Description: putative protein; protein id: At5g41600.1, by cDNA: gi_14334529, supported by cDNA: gi_16323068 [Arabidopsis >gi|10178014|dbj|BAB11466.1| contains similarity to 24 kDa seed
  misc_feature (1)..(243): Homolog of NCBI NO: 15222616 NR Description: hypothetical protein; protein id: At1g64090.1, by cDNA: gi_17381217 [Arabidopsis thaliana] F22C12.15 [Arabidopsis thaliana] >gi|17381218|gb|AAL36421.1|
  misc_feature (12)..(251): Homolog of NCBI NO: 34909318 NR Description: OSJNBb0021A09.5 [Oryza sativa (japonica
  misc_feature (1)..(251): Homolog of NCBI NO: 15233147 NR Description: putative protein; protein id: At3g61560.1
  misc_feature (31)..(251): Homolog of NCBI NO: 34904202 NR Description: P0492F05.25 [Oryza sativa (japonica
  misc_feature (3)..(244): Homolog of NCBI NO: 15234108 NR Description: hypothetical protein; protein id: At4g01230.1
  misc_feature (13)..(251): Homolog of NCBI NO: 34897094 NR Description: unknown protein [Oryza sativa (japonica

SEQ ID NO: 78020 - protein, 240 aa, Arabidopsis thaliana; identical to SEQ ID NO: 41577
  peptide (1)..(240): Ceres Seq. ID no. 12600758
  misc_feature (1)..(240): Homolog of NCBI NO: 18406991 NR Description: expressed protein; protein id: At2g46170.1, by cDNA: gi_15450758, supported by cDNA: gi_18491130 [Arabidopsis >gi|25408969|pir||E84899 hypothetical protein At2g46170
  misc_feature (1)..(238): Homolog of NCBI NO: 15236556 NR Description: putative protein; protein id: At4g23630.1, by cDNA: 39185., supported by cDNA: gi_15215585 [Arabidopsis
  misc_feature (1)..(238): Homolog of NCBI NO: 15237093 NR Description: putative protein; protein id: At4g11220.1, by cDNA: 23536., supported by cDNA: gi_14334419, supported by gi_15081760, supported by cDNA: gi_16209686 [Arabidopsis
  misc_feature (1)..(236): Homolog of NCBI NO: 15238125 NR Description: putative protein; protein id: At5g41600.1, by cDNA: gi_14334529, supported by cDNA: gi_16323068 [Arabidopsis >gi|10178014|dbj|BAB11466.1| contains similarity to 24 kDa seed
  misc_feature (1)..(228): Homolog of NCBI NO: 15222616 NR Description: hypothetical protein; protein id: At1g64090.1, by cDNA: gi_17381217 [Arabidopsis thaliana] F22C12.15 [Arabidopsis thaliana] >gi|17381218|gb|AAL36421.1|
  misc_feature (1)..(236): Homolog of NCBI NO: 34909318 NR Description: OSJNBb0021A09.5 [Oryza sativa (japonica
  misc_feature (1)..(236): Homolog of NCBI NO: 15233147 NR Description: putative protein; protein id: At3g61560.1
  misc_feature (16)..(236): Homolog of NCBI NO: 34904202 NR Description: P0492F05.25 [Oryza sativa (japonica
  misc_feature (1)..(229): Homolog of NCBI NO: 15234108 NR Description: hypothetical protein; protein id: At4g01230.1
  misc_feature (1)..(236): Homolog of NCBI NO: 34897094 NR Description: unknown protein [Oryza sativa (japonica

SEQ ID NO: 78021 - protein, 204 aa, Arabidopsis thaliana; identical to SEQ ID NO: 41578
  peptide (1)..(204): Ceres Seq. ID no. 12600759
  misc_feature (1)..(204): Homolog of NCBI NO: 18406991 NR Description: expressed protein; protein id: At2g46170.1, by cDNA: gi_15450758, supported by cDNA: gi_18491130 [Arabidopsis >gi|25408969|pir||E84899 hypothetical protein At2g46170
  misc_feature (1)..(202): Homolog of NCBI NO: 15236556 NR Description: putative protein; protein id: At4g23630.1, by cDNA: 39185., supported by cDNA: gi_15215585 [Arabidopsis
  misc_feature (1)..(202): Homolog of NCBI NO: 15237093 NR Description: putative protein; protein id: At4g11220.1, by cDNA: 23536., supported by cDNA: gi_14334419, supported by gi_15081760, supported by cDNA: gi_16209686 [Arabidopsis
  misc_feature (1)..(200): Homolog of NCBI NO: 15238125 NR Description: putative protein; protein id: At5g41600.1, by cDNA: gi_14334529, supported by cDNA: gi_16323068 [Arabidopsis >gi|10178014|dbj|BAB11466.1| contains similarity to 24 kDa seed
  misc_feature (1)..(192): Homolog of NCBI NO: 15222616 NR Description: hypothetical protein; protein id: At1g64090.1, by cDNA: gi_17381217 [Arabidopsis thaliana] F22C12.15 [Arabidopsis thaliana] >gi|17381218|gb|AAL36421.1|
  misc_feature (1)..(200): Homolog of NCBI NO: 34909318 NR Description: OSJNBb0021A09.5 [Oryza sativa (japonica
  misc_feature (1)..(200): Homolog of NCBI NO: 15233147 NR Description: putative protein; protein id: At3g61560.1
  misc_feature (1)..(200): Homolog of NCBI NO: 34904202 NR Description: P0492F05.25 [Oryza sativa (japonica
  misc_feature (1)..(193): Homolog of NCBI NO: 15234108 NR Description: hypothetical protein; protein id: At4g01230.1
  misc_feature (1)..(200): Homolog of NCBI NO: 34897094 NR Description: unknown protein [Oryza sativa (japonica

SEQ ID NO: 78022 - DNA, 1658 bp, Arabidopsis thaliana
  misc_feature (1)..(1658): Ceres Seq. ID no. 12600913
  misc_feature: MA Experiment ID: 20000173 Result: Up-regulated in Transcription
  misc_feature: MA Experiment 20000173 PARAMETER Experiment Name: At_42deg_Heat_P Parameter: Age (day) Value: 14
  misc_feature: MA Experiment 20000173 PARAMETER Experiment Name: At_42deg_Heat_P Parameter: Organism Value: A. thaliana
  misc_feature: MA Experiment 20000173 PARAMETER Experiment Name: At_42deg_Heat_P Parameter: Plant Line Value: WS
  misc_feature: MA Experiment 20000173 PARAMETER Experiment Name: At_42deg_Heat_P Parameter: Temperature (deg C) Value: 42 vs. 22
  misc_feature: MA Experiment 20000173 PARAMETER Experiment Name: At_42deg_Heat_P Parameter: Timepoint (hr) Value: 6
  misc_feature: MA Experiment 20000173 PARAMETER Experiment Name: At_42deg_Heat_P Parameter: Tissue Value: Aerial
  misc_feature: MA Experiment ID: 20000180 Result: Up-regulated in Transcription
  misc_feature: MA Experiment 20000180 PARAMETER Experiment Name: At_Germinating_Seeds_P Parameter: Age (hr) Value: 24 vs. 0
  misc_feature: MA Experiment 20000180 PARAMETER Experiment Name: At_Germinating_Seeds_P Parameter: Tissue Value: Germinating Seeds
  misc_feature: MA Experiment ID: 20000182 Result: Up-regulated in Transcription
  misc_feature: MA Experiment 20000182 PARAMETER Experiment Name: At_2mM_SA_P Parameter: Age (day) Value: 14
  misc_feature: MA Experiment 20000182 PARAMETER Experiment Name: At_2mM_SA_P Parameter: Organism Value: A. thaliana
  misc_feature: MA Experiment 20000182 PARAMETER Experiment Name: At_2mM_SA_P Parameter: Plant Line Value: WS
  misc_feature: MA Experiment 20000182 PARAMETER Experiment Name: At_2mM_SA_P Parameter: Timepoint (hr) Value: 6
  misc_feature: MA Experiment 20000182 PARAMETER Experiment Name: At_2mM_SA_P Parameter: Tissue Value: Aerial
  misc_feature: MA Experiment 20000182 PARAMETER Experiment Name: At_2mM_SA_P Parameter: Treatment Value: 2mM SA vs. No Treatment
  misc_feature: MA Experiment ID: 20000184 Result: Up-regulated in Transcription
  misc_feature: MA Experiment 20000184 PARAMETER Experiment Name: At_Shoots__P Parameter: Age (day) Value: 7
  misc_feature: MA Experiment 20000184 PARAMETER Experiment Name: At_Shoots__P Parameter: Tissue Value: Shoots vs. Whole Plant
  misc_feature: MA Experiment ID: 20000185 Result: Up-regulated in Transcription
  misc_feature: MA Experiment 20000185 PARAMETER Experiment Name: At_Roots__P Parameter: Age (day) Value: 7 vs. 21
  misc_feature: MA Experiment 20000185 PARAMETER Experiment Name: At_Roots__P Parameter: Organism Value: A. thaliana
  misc_feature: MA Experiment 20000185 PARAMETER Experiment Name: At_Roots__P Parameter: Tissue Value: Roots vs. Whole Plant
  misc_feature: MA Experiment ID: 20000264 Result: Up-regulated in Transcription
  misc_feature: MA Experiment 20000264 PARAMETER Experiment Name: At_Open_Flower_P Parameter: Age (day) Value: 21
  misc_feature: MA Experiment 20000264 PARAMETER Experiment Name: At_Open_Flower_P Parameter: Plant Line Value: WS
  misc_feature: MA Experiment 20000264 PARAMETER Experiment Name: At_Open_Flower_P Parameter: Tissue Value: Open Flower vs. Whole Plant
  misc_feature: MA Experiment ID: 20000268 Result: Up-regulated in Transcription
  misc_feature: MA Experiment 20000268 PARAMETER Experiment Name: At_100mM_NaCl__P Parameter: Age (day) Value: 14
  misc_feature: MA Experiment 20000268 PARAMETER Experiment Name: At_100mM_NaCl__P Parameter: Organism Value: A. thaliana
  misc_feature: MA Experiment 20000268 PARAMETER Experiment Name: At_100mM_NaCl__P Parameter: Plant Line Value: WS
  misc_feature: MA Experiment 20000268 PARAMETER Experiment Name: At_100mM_NaCl__P Parameter: Timepoint (hr) Value: 6
  misc_feature: MA Experiment 20000268 PARAMETER Experiment Name: At_100mM_NaCl__P Parameter: Tissue Value: Whole Plant
  misc_feature: MA Experiment 20000268 PARAMETER Experiment Name: At_100mM_NaCl__P Parameter: Treatment Value: 100mM NaCl vs. No Treatment
  misc_feature: MA Experiment ID: 20000436 Result: Up-regulated in Transcription
  misc_feature: MA Experiment 20000436 PARAMETER Experiment Name: At_Drought_P Parameter: Age (day) Value: 7
  misc_feature: MA Experiment 20000436 PARAMETER Experiment Name: At_Drought_P Parameter: Organism Value: A. thaliana
  misc_feature: MA Experiment 20000436 PARAMETER Experiment Name: At_Drought_P Parameter: Plant Line Value: WS
  misc_feature: MA Experiment 20000436 PARAMETER Experiment Name: At_Drought_P Parameter: Timepoint (hr) Value: 12
  misc_feature: MA Experiment 20000436 PARAMETER Experiment Name: At_Drought_P Parameter: Tissue Value: Whole Plant
  misc_feature: MA Experiment 20000436 PARAMETER Experiment Name: At_Drought_P Parameter: Treatment Value: Drought vs. No Drought
  misc_feature: MA Experiment ID: 20000438 Result: Up-regulated in Transcription
  misc_feature: MA Experiment 20000438 PARAMETER Experiment Name: At_Shoots__P Parameter: Age (day) Value: 14
  misc_feature: MA Experiment 20000438 PARAMETER Experiment Name: At_Shoots__P Parameter: Tissue Value: Shoots vs. Whole Plant
  misc_feature: MA Experiment ID: 20000439 Result: Up-regulated in Transcription
  misc_feature: MA Experiment 20000439 PARAMETER Experiment Name: At_Roots__P Parameter: Age (day) Value: 14 vs. 21
  misc_feature: MA Experiment 20000439 PARAMETER Experiment Name: At_Roots__P Parameter: Organism Value: A. thaliana
  misc_feature: MA Experiment 20000439 PARAMETER Experiment Name: At_Roots__P Parameter: Tissue Value: Roots vs. Whole Plant
  misc_feature: MA Experiment ID: 20000441 Result: Up-regulated in Transcription
  misc_feature: MA Experiment 20000441 PARAMETER Experiment Name: At_1uM_BR-BRZ__P Parameter: Tissue Value: Shoot Apices
  misc_feature: MA Experiment 20000441 PARAMETER Experiment Name: At_1uM_BR-BRZ__P Parameter: Treatment Value: 1uM BR vs. No Treatment
  misc_feature: MA Experiment ID: 20000443 Result: Up-regulated in Transcription
  misc_feature: MA Experiment 20000443 PARAMETER Experiment Name: At_1uM_BR-BRZ__P Parameter: Tissue Value: Shoot Apices
  misc_feature: MA Experiment 20000443 PARAMETER Experiment Name: At_1uM_BR-BRZ__P Parameter: Treatment Value: 1uM BRZ vs. No Treatment
  misc_feature: MA Experiment ID: 20000445 Result: Up-regulated in Transcription
  misc_feature: MA Experiment 20000445 PARAMETER Experiment Name: At_100uM_NAA__P Parameter: Age (day) Value: 14
  misc_feature: MA Experiment 20000445 PARAMETER Experiment Name: At_100uM_NAA__P Parameter: Organism Value: A. thaliana
  misc_feature: MA Experiment 20000445 PARAMETER Experiment Name: At_100uM_NAA__P Parameter: Plant Line Value: WS
  misc_feature: MA Experiment 20000445 PARAMETER Experiment Name: At_100uM_NAA__P Parameter: Timepoint (hr) Value: 6
  misc_feature: MA Experiment 20000445 PARAMETER Experiment Name: At_100uM_NAA__P Parameter: Tissue Value: Aerial
  misc_feature: MA Experiment 20000445 PARAMETER Experiment Name: At_100uM_NAA__P Parameter: Treatment Value: 100uM NAA vs. No Treatment
  misc_feature: MA Experiment ID: 20000495 Result: Down-regulated in Transcription
  misc_feature: MA Experiment 20000495 PARAMETER Experiment Name: At_Guard_Cells_P Parameter: Harvest Date Value: 8/2/2002
  misc_feature: MA Experiment 20000495 PARAMETER Experiment Name: At_Guard_Cells_P Parameter: Organism Value: A. thaliana
  misc_feature: MA Experiment 20000495 PARAMETER Experiment Name: At_Guard_Cells_P Parameter: Tissue Value: Guard Cells vs. Leaves
  misc_feature: MA Experiment ID: 20000496 Result: Down-regulated in Transcription
  misc_feature: MA Experiment 20000496 PARAMETER Experiment Name: At_Guard_Cells_P Parameter: Harvest Date Value: 7/19/2002
  misc_feature: MA Experiment 20000496 PARAMETER Experiment Name: At_Guard_Cells_P Parameter: Organism Value: Canola
  misc_feature: MA Experiment 20000496 PARAMETER Experiment Name: At_Guard_Cells_P Parameter: Tissue Value: Guard Cells vs. Leaves
  misc_feature: MA Experiment ID: 20000573 Result: Down-regulated in Transcription
  misc_feature: MA Experiment 20000573 PARAMETER Experiment Name: At_100uM_ABA_Mutants__P Parameter: Organism Value: A. thaliana
  misc_feature: MA Experiment 20000573 PARAMETER Experiment Name: At_100uM_ABA_Mutants__P Parameter: Plant Line Value: CS22 vs. Ler wt
  misc_feature: MA Experiment 20000573 PARAMETER Experiment Name: At_100uM_ABA_Mutants__P Parameter: Timepoint (hr) Value: N/A
  misc_feature: MA Experiment 20000573 PARAMETER Experiment Name: At_100uM_ABA_Mutants__P Parameter: Tissue Value: Whole Plant
  misc_feature: MA Experiment 20000573 PARAMETER Experiment Name: At_100uM_ABA_Mutants__P Parameter: Treatment Value: None
  misc_feature: MA Experiment ID: 20000574 Result: Down-regulated in Transcription
  misc_feature: MA Experiment 20000574 PARAMETER Experiment Name: At_100uM_ABA_Mutants__P Parameter: Organism Value: A. thaliana
  misc_feature: MA Experiment 20000574 PARAMETER Experiment Name: At_100uM_ABA_Mutants__P Parameter: Plant Line Value: CS23 vs. Ler wt
  misc_feature: MA Experiment 20000574 PARAMETER Experiment Name: At_100uM_ABA_Mutants__P Parameter: Timepoint (hr) Value: N/A
  misc_feature: MA Experiment 20000574 PARAMETER Experiment Name: At_100uM_ABA_Mutants__P Parameter: Tissue Value: Whole Plant
  misc_feature: MA Experiment 20000574 PARAMETER Experiment Name: At_100uM_ABA_Mutants__P Parameter: Treatment Value: None
  misc_feature: MA Experiment ID: 20000794 Result: Up-regulated in Transcription
  misc_feature: MA Experiment 20000794 PARAMETER Experiment Name: At_Petals_P Parameter: Age (day) Value: 23-25 days
  misc_feature: MA Experiment 20000794 PARAMETER Experiment Name: At_Petals_P Parameter: Plant Line Value: WS
  misc_feature: MA Experiment 20000794 PARAMETER Experiment Name: At_Petals_P Parameter: Tissue Value: Petals vs. Whole plant
  misc_feature: MA Experiment ID: 20001247 Result: Up-regulated in Transcription
  misc_feature: MA Experiment 20001247 PARAMETER Experiment Name: At_Far-red-induction_P Parameter: Age (day) Value: 7
  misc_feature: MA Experiment 20001247 PARAMETER Experiment Name: At_Far-red-induction_P Parameter: Light Value: Far-red vs. White
  misc_feature: MA Experiment 20001247 PARAMETER Experiment Name: At_Far-red-induction_P Parameter: Organism Value: A. thaliana
  misc_feature: MA Experiment 20001247 PARAMETER Experiment Name: At_Far-red-induction_P Parameter: Plant Line Value: Columbia
  misc_feature: MA Experiment 20001247 PARAMETER Experiment Name: At_Far-red-induction_P Parameter: Timepoint (hr) Value: 1
  misc_feature: MA Experiment 20001247 PARAMETER Experiment Name: At_Far-red-induction_P Parameter: Tissue Value: Whole Plant
  misc_feature: MA Experiment ID: 20001248 Result: Down-regulated in Transcription
  misc_feature: MA Experiment 20001248 PARAMETER Experiment Name: At_Far-red-induction_P Parameter: Age (day) Value: 7
  misc_feature: MA Experiment 20001248 PARAMETER Experiment Name: At_Far-red-induction_P Parameter: Light Value: Far-red vs. White
  misc_feature: MA Experiment 20001248 PARAMETER Experiment Name: At_Far-red-induction_P Parameter: Organism Value: A. thaliana
  misc_feature: MA Experiment 20001248 PARAMETER Experiment Name: At_Far-red-induction_P Parameter: Plant Line Value: Columbia
  misc_feature: MA Experiment 20001248 PARAMETER Experiment Name: At_Far-red-induction_P Parameter: Timepoint (hr) Value: 4
  misc_feature: MA Experiment 20001248 PARAMETER Experiment Name: At_Far-red-induction_P Parameter: Tissue Value: Whole Plant
  misc_feature: MA Experiment ID: 20001554 Result: Up-regulated in Transcription
  misc_feature: MA Experiment 20001554 PARAMETER Experiment Name: At_Drought_Soil_Dry_P Parameter: Age (day) Value: 21
  misc_feature: MA Experiment 20001554 PARAMETER Experiment Name: At_Drought_Soil_Dry_P Parameter: Organism Value: A. thaliana
  misc_feature: MA Experiment 20001554 PARAMETER Experiment Name: At_Drought_Soil_Dry_P Parameter: Plant Line Value: WS
  misc_feature: MA Experiment 20001554 PARAMETER Experiment Name: At_Drought_Soil_Dry_P Parameter: Post Timepoint (hr) Value: None
  misc_feature: MA Experiment 20001554 PARAMETER Experiment Name: At_Drought_Soil_Dry_P Parameter: Post-Treatment Value: None
  misc_feature: MA Experiment 20001554 PARAMETER Experiment Name: At_Drought_Soil_Dry_P Parameter: Timepoint (day) Value: 7
  misc_feature: MA Experiment 20001554 PARAMETER Experiment Name: At_Drought_Soil_Dry_P Parameter: Treatment Value: Drought vs. No Drought
  misc_feature: MA Experiment ID: 20001558 Result: Down-regulated in Transcription
  misc_feature: MA Experiment 20001558 PARAMETER Experiment Name: At_Drought_Soil_Dry_P Parameter: Age (day) Value: 27
  misc_feature: MA Experiment 20001558 PARAMETER Experiment Name: At_Drought_Soil_Dry_P Parameter: Organism Value: A. thaliana
  misc_feature: MA Experiment 20001558 PARAMETER Experiment Name: At_Drought_Soil_Dry_P Parameter: Plant Line Value: WS
  misc_feature: MA Experiment 20001558 PARAMETER Experiment Name: At_Drought_Soil_Dry_P Parameter: Post Timepoint (hr) Value: 6
  misc_feature: MA Experiment 20001558 PARAMETER Experiment Name: At_Drought_Soil_Dry_P Parameter: Post-Treatment Value: Re-Water vs. No Drought
  misc_feature: MA Experiment 20001558 PARAMETER Experiment Name: At_Drought_Soil_Dry_P Parameter: Timepoint (day) Value: 13
  misc_feature: MA Experiment 20001558 PARAMETER Experiment Name: At_Drought_Soil_Dry_P Parameter: Treatment Value: Drought vs. No Drought
  misc_feature: MA Experiment ID: 20001560 Result: Down-regulated in Transcription
  misc_feature: MA Experiment 20001560 PARAMETER Experiment Name: At_Drought_Soil_Dry_P Parameter: Age (day) Value: 28
  misc_feature: MA Experiment 20001560 PARAMETER Experiment Name: At_Drought_Soil_Dry_P Parameter: Organism Value: A. thaliana
  misc_feature: MA Experiment 20001560 PARAMETER Experiment Name: At_Drought_Soil_Dry_P Parameter: Plant Line Value: WS
  misc_feature: MA Experiment 20001560 PARAMETER Experiment Name: At_Drought_Soil_Dry_P Parameter: Post Timepoint (hr) Value: None
  misc_feature: MA Experiment 20001560 PARAMETER Experiment Name: At_Drought_Soil_Dry_P Parameter: Post-Treatment Value: None
  misc_feature: MA Experiment 20001560 PARAMETER Experiment Name: At_Drought_Soil_Dry_P Parameter: Timepoint (day) Value: 14
  misc_feature: MA Experiment 20001560 PARAMETER Experiment Name: At_Drought_Soil_Dry_P Parameter: Treatment Value: Drought vs. No Drought
  misc_feature: MA Experiment ID: 20001905 Result: Up-regulated in Transcription
  misc_feature: MA Experiment 20001905 PARAMETER Experiment Name: At_Drought_Reproduction_P Parameter: Age (day) Value: 40
  misc_feature: MA Experiment 20001905 PARAMETER Experiment Name: At_Drought_Reproduction_P Parameter: Organism Value: A. thaliana
  misc_feature: MA Experiment 20001905 PARAMETER Experiment Name: At_Drought_Reproduction_P Parameter: Plant Line Value: WS
  misc_feature: MA Experiment 20001905 PARAMETER Experiment Name: At_Drought_Reproduction_P Parameter: Timepoint (day) Value: 10
  misc_feature: MA Experiment 20001905 PARAMETER Experiment Name: At_Drought_Reproduction_P Parameter: Tissue Value: Rosettes
  misc_feature: MA Experiment 20001905 PARAMETER Experiment Name: At_Drought_Reproduction_P Parameter: Treatment Value: Drought vs. No Drought
  misc_feature: MA Experiment ID: 20001906 Result: Up-regulated in Transcription
  misc_feature: MA Experiment 20001906 PARAMETER Experiment Name: At_Drought_Reproduction_P Parameter: Age (day) Value: 35
  misc_feature: MA Experiment 20001906 PARAMETER Experiment Name: At_Drought_Reproduction_P Parameter: Organism Value: A. thaliana
  misc_feature: MA Experiment 20001906 PARAMETER Experiment Name: At_Drought_Reproduction_P Parameter: Plant Line Value: WS
  misc_feature: MA Experiment 20001906 PARAMETER Experiment Name: At_Drought_Reproduction_P Parameter: Timepoint (day) Value: 5
  misc_feature: MA Experiment 20001906 PARAMETER Experiment Name: At_Drought_Reproduction_P Parameter: Tissue Value: Siliques
  misc_feature: MA Experiment 20001906 PARAMETER Experiment Name: At_Drought_Reproduction_P Parameter: Treatment Value: Drought vs. No Drought
acgaagattctcttgctcgaacaaaaaaattctctccgcgatacttacaaagcacaagtgagctagctttgagaaagattcaatttttgagccttaagattgtgatgggagttgtgtctatttcaagttcagctgcaagatctccactcgggttgggcaacgatcttttgacacatcggtcttcacttaaaaagccatccattgttgcttttaaagccgatgattccagcaattcagctttgatcattcctcctcgtgagcaagttttgattcctgctgaaaagcataatgagaagaagagagaagtaacgaggagaaagccttgtaaaaccccgaaaaaaccgctttccttggaacataattcggctccttcgtgttcgttaggagtagattacaatgaagctgctgcaagacttgaaagcatatacaagcttagtcctgcaacaaccacattagtcgaggatgatgttgaagatggcggctctaaagccaaagtttcacggaggagaaaaaggaaagaaagtggtgaggagaagaaagtggttgtgaggaataatgtgaagaaggaaaaacgtatgagtcttgataaacggattgctttgaagagaaacgttcaagagaaaccagtcgttgcttctgttgataagaaagtaacaaagaggcagcaagaagaggagaagatcgagaggcttgtgcgggactattcagcttctaatgatatagtgagcttggactggaaaaaaatgaagatacctcctgttctttcttctactgaacatgcttggttgttcaagttgatgcaacctatgaaggctcttcttgaagtgaaagatgtattgcaaaagagcttgggaagagagcctagggaagctgaaatagccggggagatcaatatgactgcgggtgaagtaaaaaagaaaatcgaaataggtagagctgcaagaaacaaacttattaagcacaatctccggcttgtcttgtttgttatgaacaaatactttcatgagtttaccaacggaccaaaattccaagacctttgtcaagcgggtatgagagggcttatcacagcaattgaccgctttgagccgaaaaggaagtttcgtctttcgacttatggtttgttttggattagacatgccatcatacggtcaatgacaacttcaaacttcactcgtgtcccatttggacttgaatcggttagagtggagatatataaagcaaagactgagctatggtttgagatgggaagacctccaacggaggacgaggtagttgagagactcaagataacacctgagagataccgtgaagtattgagggctgcaaaaccggttttgtcactaaattcaaaacattcggttactcaagaagaattcatcaacggaatcacagatgttgatggtgttggagctaataacagcagacagcctgctcttctcaggctcgctctcgacgatgtgctcgattcattgaagccgaaagagagtctggttattcgacagaggtacggtcttgatggaaaaggcgacaggactctaggagagatagctggaaatctcaacatctctagagaaatggttaggaaacatgaagtcaaggccttgatgaagcttaagcatcaggccagagttgattaccttcgtcaatacatcgtctaa

SEQ ID NO: 78023 - protein, 551 aa, Arabidopsis thaliana
  peptide (1)..(551): Ceres Seq. ID no. 12600914
  misc_feature (393)..(474): Pfam Name: Sigma-70 region 3 Pfam Description: Sigma-70 region 3
  misc_feature (35)..(551): Homolog of NCBI NO: 15237896 NR Description: sigma-like factor (emb CAA77213.1); protein id: [Arabidopsis thaliana] >gi|11358895|pir||T51328 transcription
  misc_feature (35)..(315): Homolog of NCBI NO: 15010718 NR Description: AT5g24120/MLE8_4 [Arabidopsis thaliana]
  misc_feature (130)..(550): Homolog of NCBI NO: 30698488 NR Description: Sig5 [Oryza sativa (japonica cultivar-group)]
  misc_feature (207)..(550): Homolog of NCBI NO: 17232755 NR Description: transcription initiation factor sigma [Nostoc sp.
  misc_feature (214)..(550): Homolog of NCBI NO: 23128093 NR Description: hypothetical protein [Nostoc punctiforme]
  misc_feature (210)..(550): Homolog of NCBI NO: 217140 NR Description: principal sigma factor [Synechococcus sp.]
  misc_feature (210)..(550): Homolog of NCBI NO: 97628 NR Description: transcription initiation factor sigma A -
  misc_feature (253)..(550): Homolog of NCBI NO: 23041419 NR Description: hypothetical protein [Trichodesmium erythraeum
  misc_feature (135)..(550): Homolog of NCBI NO: 16332132 NR Description: RNA polymerase sigma factor [Synechocystis sp.
  misc_feature (215)..(550): Homolog of NCBI NO: 558881 NR Description: SigA [Synechococcus sp. PCC 7002]
EDSLARTKKFSPRYLQSTSELALRKIQFLSLKIVMGVVSISSSAARSPLGLGNDLLTHRSSLKKPSIVAFKADDSSNSALIIPPREQVLIPAEKHNEKKREVTRRKPCKTPKKPLSLEHNSAPSCSLGVDYNEAAARLESIYKLSPATTTLVEDDVEDGGSKAKVSRRRKRKESGEEKKVVVRNNVKKEKRMSLDKRIALKRNVQEKPVVASVDKKVTKRQQEEEKIERLVRDYSASNDIVSLDWKKMKIPPVLSSTEHAWLFKLMQPMKALLEVKDVLQKSLGREPREAEIAGEINMTAGEVKKKIEIGRAARNKLIKHNLRLVLFVMNKYFHEFTNGPKFQDLCQAGMRGLITAIDRFEPKRKFRLSTYGLFWIRHAIIRSMTTSNFTRVPFGLESVRVEIYKAKTELWFEMGRPPTEDEVVERLKITPERYREVLRAAKPVLSLNSKHSVTQEEFINGITDVDGVGANNSRQPALLRLALDDVLDSLKPKESLVIRQRYGLDGKGDRTLGEIAGNLNISREMVRKHEVKALMKLKHQARVDYLRQYIV

SEQ ID NO: 78024 - protein, 517 aa, Arabidopsis thaliana
  peptide (1)..(517): Ceres Seq. ID no. 12600915
  misc_feature (359)..(440): Pfam Name: Sigma-70 region 3 Pfam Description: Sigma-70 region 3
  misc_feature (1)..(517): Homolog of NCBI NO: 15237896 NR Description: sigma-like factor (emb CAA77213.1); protein id: [Arabidopsis thaliana] >gi|11358895|pir||T51328 transcription
  misc_feature (1)..(281): Homolog of NCBI NO: 15010718 NR Description: AT5g24120/MLE8_4 [Arabidopsis thaliana]
  misc_feature (96)..(516): Homolog of NCBI NO: 30698488 NR Description: Sig5 [Oryza sativa (japonica cultivar-group)]
  misc_feature (173)..(516): Homolog of NCBI NO: 17232755 NR Description: transcription initiation factor sigma [Nostoc sp.
  misc_feature (180)..(516): Homolog of NCBI NO: 23128093 NR Description: hypothetical protein [Nostoc punctiforme]
  misc_feature (176)..(516): Homolog of NCBI NO: 217140 NR Description: principal sigma factor [Synechococcus sp.]
  misc_feature (176)..(516): Homolog of NCBI NO: 97628 NR Description: transcription initiation factor sigma A -
  misc_feature (219)..(516): Homolog of NCBI NO: 23041419 NR Description: hypothetical protein [Trichodesmium erythraeum
  misc_feature (101)..(516): Homolog of NCBI NO: 16332132 NR Description: RNA polymerase sigma factor [Synechocystis sp.
  misc_feature (181)..(516): Homolog of NCBI NO: 558881 NR Description: SigA [Synechococcus sp. PCC 7002]
MGVVSISSSAARSPLGLGNDLLTHRSSLKKPSIVAFKADDSSNSALIIPPREQVLIPAEKHNEKKREVTRRKPCKTPKKPLSLEHNSAPSCSLGVDYNEAAARLESIYKLSPATTTLVEDDVEDGGSKAKVSRRRKRKESGEEKKVVVRNNVKKEKRMSLDKRIALKRNVQEKPVVASVDKKVTKRQQEEEKIERLVRDYSASNDIVSLDWKKMKIPPVLSSTEHAWLFKLMQPMKALLEVKDVLQKSLGREPREAEIAGEINMTAGEVKKKIEIGRAARNKLIKHNLRLVLFVMNKYFHEFTNGPKFQDLCQAGMRGLITAIDRFEPKRKFRLSTYGLFWIRHAIIRSMTTSNFTRVPFGLESVRVEIYKAKTELWFEMGRPPTEDEVVERLKITPERYREVLRAAKPVLSLNSKHSVTQEEFINGITDVDGVGANNSRQPALLRLALDDVLDSLKPKESLVIRQRYGLDGKGDRTLGEIAGNLNISREMVRKHEVKALMKLKHQARVDYLRQYIV

SEQ ID NO: 78025 - protein, 360 aa, Arabidopsis thaliana; identical to SEQ ID NO: 48598
  peptide (1)..(360): Ceres Seq. ID no. 12600916
  misc_feature (202)..(283): Pfam Name: Sigma-70 region 3 Pfam Description: Sigma-70 region 3
  misc_feature (1)..(360): Homolog of NCBI NO: 15237896 NR Description: sigma-like factor (emb CAA77213.1); protein id: [Arabidopsis thaliana] >gi|11358895|pir||T51328 transcription
  misc_feature (1)..(124): Homolog of NCBI NO: 15010718 NR Description: AT5g24120/MLE8_4 [Arabidopsis thaliana]
  misc_feature (1)..(359): Homolog of NCBI NO: 30698488 NR Description: Sig5 [Oryza sativa (japonica cultivar-group)]
  misc_feature (16)..(359): Homolog of NCBI NO: 17232755 NR Description: transcription initiation factor sigma [Nostoc sp.
  misc_feature (23)..(359): Homolog of NCBI NO: 23128093 NR Description: hypothetical protein [Nostoc punctiforme]
  misc_feature (19)..(359): Homolog of NCBI NO: 217140 NR Description: principal sigma factor [Synechococcus sp.]
  misc_feature (19)..(359): Homolog of NCBI NO: 97628 NR Description: transcription initiation factor sigma A -
  misc_feature (62)..(359): Homolog of NCBI NO: 23041419 NR Description: hypothetical protein [Trichodesmium erythraeum
  misc_feature (1)..(359): Homolog of NCBI NO: 16332132 NR Description: RNA polymerase sigma factor [Synechocystis sp.
  misc_feature (24)..(359): Homolog of NCBI NO: 558881 NR Description: SigA [Synechococcus sp. PCC 7002]

SEQ ID NO: 78026 - DNA, 989 bp, Arabidopsis thaliana
  misc_feature (1)..(989): Ceres Seq. ID no. 12600917
  misc_feature: MA Experiment ID: 20000171 Result: Down-regulated in Transcription
  misc_feature: MA Experiment 20000171 PARAMETER Experiment Name: At_42deg_Heat_P Parameter: Age (day) Value: 14
  misc_feature: MA Experiment 20000171 PARAMETER Experiment Name: At_42deg_Heat_P Parameter: Organism Value: A. thaliana
  misc_feature: MA Experiment 20000171 PARAMETER Experiment Name: At_42deg_Heat_P Parameter: Plant Line Value: WS
  misc_feature: MA Experiment 20000171 PARAMETER Experiment Name: At_42deg_Heat_P Parameter: Temperature (deg C) Value: 42 vs. 22
  misc_feature: MA Experiment 20000171 PARAMETER Experiment Name: At_42deg_Heat_P Parameter: Timepoint (hr) Value: 1
  misc_feature: MA Experiment 20000171 PARAMETER Experiment Name: At_42deg_Heat_P Parameter: Tissue Value: Aerial
  misc_feature: MA Experiment ID: 20000173 Result: Down-regulated in Transcription
  misc_feature: MA Experiment 20000173 PARAMETER Experiment Name: At_42deg_Heat_P Parameter: Age (day) Value: 14
  misc_feature: MA Experiment 20000173 PARAMETER Experiment Name: At_42deg_Heat_P Parameter: Organism Value: A. thaliana
  misc_feature: MA Experiment 20000173 PARAMETER Experiment Name: At_42deg_Heat_P Parameter: Plant Line Value: WS
  misc_feature: MA Experiment 20000173 PARAMETER Experiment Name: At_42deg_Heat_P Parameter: Temperature (deg C) Value: 42 vs. 22
  misc_feature: MA Experiment 20000173 PARAMETER Experiment Name: At_42deg_Heat_P Parameter: Timepoint (hr) Value: 6
  misc_feature: MA Experiment 20000173 PARAMETER Experiment Name: At_42deg_Heat_P Parameter: Tissue Value: Aerial
  misc_feature: MA Experiment ID: 20000184 Result: Up-regulated in Transcription
  misc_feature: MA Experiment 20000184 PARAMETER Experiment Name: At_Shoots__P Parameter: Age (day) Value: 7
  misc_feature: MA Experiment 20000184 PARAMETER Experiment Name: At_Shoots__P Parameter: Tissue Value: Shoots vs. Whole Plant
  misc_feature: MA Experiment ID: 20000227 Result: Up-regulated in Transcription
  misc_feature: MA Experiment 20000227 PARAMETER Experiment Name: At_Root-Tips-vs-Tops_P Parameter: Tissue Value: Root Tips vs. Root Tops
  misc_feature: MA Experiment ID: 20000264 Result: Down-regulated in Transcription
  misc_feature: MA Experiment 20000264 PARAMETER Experiment Name: At_Open_Flower_P Parameter: Age (day) Value: 21
  misc_feature: MA Experiment 20000264 PARAMETER Experiment Name: At_Open_Flower_P Parameter: Plant Line Value: WS
  misc_feature: MA Experiment 20000264 PARAMETER Experiment Name: At_Open_Flower_P Parameter: Tissue Value: Open Flower vs. Whole Plant
  misc_feature: MA Experiment ID: 20000437 Result: Down-regulated in Transcription
  misc_feature: MA Experiment 20000437 PARAMETER Experiment Name: At_Drought_P Parameter: Age (day) Value: 8
  misc_feature: MA Experiment 20000437 PARAMETER Experiment Name: At_Drought_P Parameter: Organism Value: A. thaliana
  misc_feature: MA Experiment 20000437 PARAMETER Experiment Name: At_Drought_P Parameter: Plant Line Value: WS
  misc_feature: MA Experiment 20000437 PARAMETER Experiment Name: At_Drought_P Parameter: Timepoint (hr) Value: 24
  misc_feature: MA Experiment 20000437 PARAMETER Experiment Name: At_Drought_P Parameter: Tissue Value: Whole Plant
  misc_feature: MA Experiment 20000437 PARAMETER Experiment Name: At_Drought_P Parameter: Treatment Value: Drought vs. No Drought
  misc_feature: MA Experiment ID: 20000438 Result: Up-regulated in Transcription
  misc_feature: MA Experiment 20000438 PARAMETER Experiment Name: At_Shoots__P Parameter: Age (day) Value: 14
  misc_feature: MA Experiment 20000438 PARAMETER Experiment Name: At_Shoots__P Parameter: Tissue Value: Shoots vs. Whole Plant
  misc_feature: MA Experiment ID: 20000439 Result: Down-regulated in Transcription
  misc_feature: MA Experiment 20000439 PARAMETER Experiment Name: At_Roots__P Parameter: Age (day) Value: 14 vs. 21
  misc_feature: MA Experiment 20000439 PARAMETER Experiment Name: At_Roots__P Parameter: Organism Value: A. thaliana
  misc_feature: MA Experiment 20000439 PARAMETER Experiment Name: At_Roots__P Parameter: Tissue Value: Roots vs. Whole Plant
  misc_feature: MA Experiment ID: 20000794 Result: Down-regulated in Transcription
  misc_feature: MA Experiment 20000794 PARAMETER Experiment Name: At_Petals_P Parameter: Age (day) Value: 23-25 days
  misc_feature: MA Experiment 20000794 PARAMETER Experiment Name: At_Petals_P Parameter: Plant Line Value: WS
  misc_feature: MA Experiment 20000794 PARAMETER Experiment Name: At_Petals_P Parameter: Tissue Value: Petals vs. Whole plant
  misc_feature: MA Experiment ID: 20001248 Result: Up-regulated in Transcription
  misc_feature: MA Experiment 20001248 PARAMETER Experiment Name: At_Far-red-induction_P Parameter: Age (day) Value: 7
  misc_feature: MA Experiment 20001248 PARAMETER Experiment Name: At_Far-red-induction_P Parameter: Light Value: Far-red vs. White
  misc_feature: MA Experiment 20001248 PARAMETER Experiment Name: At_Far-red-induction_P Parameter: Organism Value: A. thaliana
  misc_feature: MA Experiment 20001248 PARAMETER Experiment Name: At_Far-red-induction_P Parameter: Plant Line Value: Columbia
  misc_feature: MA Experiment 20001248 PARAMETER Experiment Name: At_Far-red-induction_P Parameter: Timepoint (hr) Value: 4
  misc_feature: MA Experiment 20001248 PARAMETER Experiment Name: At_Far-red-induction_P Parameter: Tissue Value: Whole Plant
  misc_feature: MA Experiment ID: 20001450 Result: Up-regulated in Transcription
  misc_feature: MA Experiment 20001450 PARAMETER Experiment Name: At_Far-red-induction_P Parameter: Age (day) Value: 7
  misc_feature: MA Experiment 20001450 PARAMETER Experiment Name: At_Far-red-induction_P Parameter: Light Value: Far-red vs. White
  misc_feature: MA Experiment 20001450 PARAMETER Experiment Name: At_Far-red-induction_P Parameter: Organism Value: A. thaliana
  misc_feature: MA Experiment 20001450 PARAMETER Experiment Name: At_Far-red-induction_P Parameter: Plant Line Value: Columbia
  misc_feature: MA Experiment 20001450 PARAMETER Experiment Name: At_Far-red-induction_P Parameter: Timepoint (hr) Value: 8
  misc_feature: MA Experiment 20001450 PARAMETER Experiment Name: At_Far-red-induction_P Parameter: Tissue Value: Whole Plant
  misc_feature: MA Experiment ID: 20001451 Result: Up-regulated in Transcription
  misc_feature: MA Experiment 20001451 PARAMETER Experiment Name: At_Far-red-induction_P Parameter: Age (day) Value: 7
  misc_feature: MA Experiment 20001451 PARAMETER Experiment Name: At_Far-red-induction_P Parameter: Light Value: Far-red vs. White
  misc_feature: MA Experiment 20001451 PARAMETER Experiment Name: At_Far-red-induction_P Parameter: Organism Value: A. thaliana
  misc_feature: MA Experiment 20001451 PARAMETER Experiment Name: At_Far-red-induction_P Parameter: Plant Line Value: Columbia
  misc_feature: MA Experiment 20001451 PARAMETER Experiment Name: At_Far-red-induction_P Parameter: Timepoint (hr) Value: 24
  misc_feature: MA Experiment 20001451 PARAMETER Experiment Name: At_Far-red-induction_P Parameter: Tissue Value: Whole Plant
  misc_feature: MA Experiment ID: 20001556 Result: Up-regulated in Transcription
  misc_feature: MA Experiment 20001556 PARAMETER Experiment Name: At_Drought_Soil_Dry_P Parameter: Age (day) Value: 26
  misc_feature: MA Experiment 20001556 PARAMETER Experiment Name: At_Drought_Soil_Dry_P Parameter: Organism Value: A. thaliana
  misc_feature: MA Experiment 20001556 PARAMETER Experiment Name: At_Drought_Soil_Dry_P Parameter: Plant Line Value: WS
  misc_feature: MA Experiment 20001556 PARAMETER Experiment Name: At_Drought_Soil_Dry_P Parameter: Post Timepoint (hr) Value: None
  misc_feature: MA Experiment 20001556 PARAMETER Experiment Name: At_Drought_Soil_Dry_P Parameter: Post-Treatment Value: None
  misc_feature: MA Experiment 20001556 PARAMETER Experiment Name: At_Drought_Soil_Dry_P Parameter: Timepoint (day) Value: 12
  misc_feature: MA Experiment 20001556 PARAMETER Experiment Name: At_Drought_Soil_Dry_P Parameter: Treatment Value: Drought vs. No Drought
  misc_feature: MA Experiment ID: 20001559 Result: Up-regulated in Transcription
  misc_feature: MA Experiment 20001559 PARAMETER Experiment Name: At_Drought_Soil_Dry_P Parameter: Age (day) Value: 28
  misc_feature: MA Experiment 20001559 PARAMETER Experiment Name: At_Drought_Soil_Dry_P Parameter: Organism Value: A. thaliana
  misc_feature: MA Experiment 20001559 PARAMETER Experiment Name: At_Drought_Soil_Dry_P Parameter: Plant Line Value: WS
  misc_feature: MA Experiment 20001559 PARAMETER Experiment Name: At_Drought_Soil_Dry_P Parameter: Post Timepoint (hr) Value: 29
  misc_feature: MA Experiment 20001559 PARAMETER Experiment Name: At_Drought_Soil_Dry_P Parameter: Post-Treatment Value: Re-Water vs. No Drought
  misc_feature: MA Experiment 20001559 PARAMETER Experiment Name: At_Drought_Soil_Dry_P Parameter: Timepoint (day) Value: 14
  misc_feature: MA Experiment 20001559 PARAMETER Experiment Name: At_Drought_Soil_Dry_P Parameter: Treatment Value: Drought vs. No Drought
acatactcagtaagcgagtccgagtcaacaatggacgtctacggcatgtcttcaccggacttgcttcgtatcgacgaccttctcgatttctccaacgacgaaatcttctcttcctcttccaccgtcacttcctccgccgcttcctccgccgcttcttccgaaaaccctttcagctttccttcttccacctacacttctcctactctcctcaccgacttcactcacgatctctgcgttcccagtgacgacgcagctcatctcgaatggttatcgcgattcgttgacgattcattctccgatttcccagcaaatcctttaaccatgaccgttagacccgagatttcattcaccggaaaacctagaagtcgccgatcaagagcaccagcaccttccgtagctggaacttgggctccgatgtctgaatcagagctttgtcactccgtcgctaaacctaaaccgaagaaagtctacaacgctgaatcggttacggcggatggagcgaggcggtgcacgcactgtgcctcggagaaaacgccacagtggagaactggaccgcttggacctaaaacactttgtaacgcttgtggagttcgttacaaatcagggaggcttgtaccggaatacagaccggcgtcgagtccgacgtttgtattgactcagcattcgaactctcatcggaaagttatggagctccggcgacagaaggaacaacaagaatcttgcgttcgaattccgccgtttcagccgcagtaaatttgggggttttcttttcaagggtttttgtgatttggtgacgtgtcgtaatcttaacggtgatgatcacgtgaccgacgggaggggttaaggacttaattatcagtattagtttaaagtttgcaaatctctgctaattaatttgttggtaatttctattgatttttttcttgcttttgtttattggtctcacggctctccttaaagttatatcattaaatgatttcattggcggc

SEQ ID NO: 78027 - protein, 250 aa, Arabidopsis thaliana
  peptide (1)..(250): Ceres Seq. ID no. 12600918
  misc_feature (11)..(250): Homolog of NCBI NO: 15232355 NR Description: GATA zinc finger protein; protein id: supported by cDNA: gi_14190406, supported by cDNA: gi_14517394, by cDNA: gi_15215890 [Arabidopsis thaliana]
  misc_feature (11)..(250): Homolog of NCBI NO: 37572447 NR Description: AG-motif binding protein-3 [Nicotiana tabacum]
  misc_feature (120)..(236): Homolog of NCBI NO: 37536778 NR Description: putative transcription factor [Oryza sativa
  misc_feature (14)..(102): Homolog of NCBI NO: 37536778 NR Description: putative transcription factor [Oryza sativa
  misc_feature (93)..(236): Homolog of NCBI NO: 15225399 NR Description: GATA zinc finger protein; protein id: At2g45050.1
  misc_feature (127)..(239): Homolog of NCBI NO: 37572449 NR Description: AG-motif binding protein-4 [Nicotiana tabacum]
  misc_feature (20)..(101): Homolog of NCBI NO: 37572449 NR Description: AG-motif binding protein-4 [Nicotiana tabacum]
  misc_feature (11)..(178): Homolog of NCBI NO: 15225399 NR Description: GATA zinc finger protein; protein id: At2g45050.1
  misc_feature (24)..(235): Homolog of NCBI NO: 15234336 NR Description: GATA zinc finger protein; protein id: supported by cDNA: gi_18252998 [Arabidopsis thaliana]
  misc_feature (102)..(232): Homolog of NCBI NO: 37572451 NR Description: AG-motif binding protein-5 [Nicotiana tabacum]
TYSVSESESTMDVYGMSSPDLLRIDDLLDFSNDEIFSSSSTVTSSAASSAASSENPFSFPSSTYTSPTLLTDFTHDLCVPSDDAAHLEWLSRFVDDSFSDFPANPLTMTVRPEISFTGKPRSRRSRAPAPSVAGTWAPMSESELCHSVAKPKPKKVYNAESVTADGARRCTHCASEKTPQWRTGPLGPKTLCNACGVRYKSGRLVPEYRPASSPTFVLTQHSNSHRKVMELRRQKEQQESCVRIPPFQPQ

SEQ ID NO: 78028 - protein, 240 aa, Arabidopsis thaliana
  peptide (1)..(240): Ceres Seq. ID no. 12600919
  misc_feature (1)..(240): Homolog of NCBI NO: 15232355 NR Description: GATA zinc finger protein; protein id: supported by cDNA: gi_14190406, supported by cDNA: gi_14517394, by cDNA: gi_15215890 [Arabidopsis thaliana]
  misc_feature (1)..(240): Homolog of NCBI NO: 37572447 NR Description: AG-motif binding protein-3 [Nicotiana tabacum]
  misc_feature (110)..(226): Homolog of NCBI NO: 37536778 NR Description: putative transcription factor [Oryza sativa
  misc_feature (4)..(92): Homolog of NCBI NO: 37536778 NR Description: putative transcription factor [Oryza sativa
  misc_feature (83)..(226): Homolog of NCBI NO: 15225399 NR Description: GATA zinc finger protein; protein id: At2g45050.1
  misc_feature (117)..(229): Homolog of NCBI NO: 37572449 NR Description: AG-motif binding protein-4 [Nicotiana tabacum]
  misc_feature (10)..(91): Homolog of NCBI NO: 37572449 NR Description: AG-motif binding protein-4 [Nicotiana tabacum]
  misc_feature (1)..(168): Homolog of NCBI NO: 15225399 NR Description: GATA zinc finger protein; protein id: At2g45050.1
  misc_feature (14)..(225): Homolog of NCBI NO: 15234336 NR Description: GATA zinc finger protein; protein id: supported by cDNA: gi_18252998 [Arabidopsis thaliana]
  misc_feature (92)..(222): Homolog of NCBI NO: 37572451 NR Description: AG-motif binding protein-5 [Nicotiana tabacum]
MDVYGMSSPDLLRIDDLLDFSNDEIFSSSSTVTSSAASSAASSENPFSFPSSTYTSPTLLTDFTHDLCVPSDDAAHLEWLSRFVDDSFSDFPANPLTMTVRPEISFTGKPRSRRSRAPAPSVAGTWAPMSESELCHSVAKPKPKKVYNAESVTADGARRCTHCASEKTPQWRTGPLGPKTLCNACGVRYKSGRLVPEYRPASSPTFVLTQHSNSHRKVMELRRQKEQQESCVRIPPFQPQ

SEQ ID NO: 78029 - protein, 235 aa, Arabidopsis thaliana
  peptide (1)..(235): Ceres Seq. ID no. 12600920
  misc_feature (1)..(235): Homolog of NCBI NO: 15232355 NR Description: GATA zinc finger protein; protein id: supported by cDNA: gi_14190406, supported by cDNA: gi_14517394, by cDNA: gi_15215890 [Arabidopsis thaliana]
  misc_feature (1)..(235): Homolog of NCBI NO: 37572447 NR Description: AG-motif binding protein-3 [Nicotiana tabacum]
  misc_feature (105)..(221): Homolog of NCBI NO: 37536778 NR Description: putative transcription factor [Oryza sativa
  misc_feature (1)..(87): Homolog of NCBI NO: 37536778 NR Description: putative transcription factor [Oryza sativa
  misc_feature (78)..(221): Homolog of NCBI NO: 15225399 NR Description: GATA zinc finger protein; protein id: At2g45050.1
  misc_feature (112)..(224): Homolog of NCBI NO: 37572449 NR Description: AG-motif binding protein-4 [Nicotiana tabacum]
  misc_feature (5)..(86): Homolog of NCBI NO: 37572449 NR Description: AG-motif binding protein-4 [Nicotiana tabacum]
  misc_feature (1)..(163): Homolog of NCBI NO: 15225399 NR Description: GATA zinc finger protein; protein id: At2g45050.1
  misc_feature (9)..(220): Homolog of NCBI NO: 15234336 NR Description: GATA zinc finger protein; protein id: supported by cDNA: gi_18252998 [Arabidopsis thaliana]
  misc_feature (87)..(217): Homolog of NCBI NO: 37572451 NR Description: AG-motif binding protein-5 [Nicotiana tabacum]
MSSPDLLRIDDLLDFSNDEIFSSSSTVTSSAASSAASSENPFSFPSSTYTSPTLLTDFTHDLCVPSDDAAHLEWLSRFVDDSFSDFPANPLTMTVRPEISFTGKPRSRRSRAPAPSVAGTWAPMSESELCHSVAKPKPKKVYNAESVTADGARRCTHCASEKTPQWRTGPLGPKTLCNACGVRYKSGRLVPEYRPASSPTFVLTQHSNSHRKVMELRRQKEQQESCVRIPPFQPQ

SEQ ID NO: 78030 - DNA, 2128 bp, Arabidopsis thaliana
  misc_feature (1)..(2128): Ceres Seq. ID no. 12600921
  misc_feature: MA Experiment ID: 20000182 Result: Up-regulated in Transcription
  misc_feature: MA Experiment 20000182 PARAMETER Experiment Name: At_2mM_SA_P Parameter: Age (day) Value: 14
  misc_feature: MA Experiment 20000182 PARAMETER Experiment Name: At_2mM_SA_P Parameter: Organism Value: A. thaliana
  misc_feature: MA Experiment 20000182 PARAMETER Experiment Name: At_2mM_SA_P Parameter: Plant Line Value: WS
  misc_feature: MA Experiment 20000182 PARAMETER Experiment Name: At_2mM_SA_P Parameter: Timepoint (hr) Value: 6
  misc_feature: MA Experiment 20000182 PARAMETER Experiment Name: At_2mM_SA_P Parameter: Tissue Value: Aerial
  misc_feature: MA Experiment 20000182 PARAMETER Experiment Name: At_2mM_SA_P Parameter: Treatment Value: 2mM SA vs. No Treatment
  misc_feature: MA Experiment ID: 20000184 Result: Down-regulated in Transcription
  misc_feature: MA Experiment 20000184 PARAMETER Experiment Name: At_Shoots__P Parameter: Age (day) Value: 7
  misc_feature: MA Experiment 20000184 PARAMETER Experiment Name: At_Shoots__P Parameter: Tissue Value: Shoots vs. Whole Plant
  misc_feature: MA Experiment ID: 20001248 Result: Up-regulated in Transcription
  misc_feature: MA Experiment 20001248 PARAMETER Experiment Name: At_Far-red-induction_P Parameter: Age (day) Value: 7
  misc_feature: MA Experiment 20001248 PARAMETER Experiment Name: At_Far-red-induction_P Parameter: Light Value: Far-red vs. White
  misc_feature: MA Experiment 20001248 PARAMETER Experiment Name: At_Far-red-induction_P Parameter: Organism Value: A. thaliana
  misc_feature: MA Experiment 20001248 PARAMETER Experiment Name: At_Far-red-induction_P Parameter: Plant Line Value: Columbia
  misc_feature: MA Experiment 20001248 PARAMETER Experiment Name: At_Far-red-induction_P Parameter: Timepoint (hr) Value: 4
  misc_feature: MA Experiment 20001248 PARAMETER Experiment Name: At_Far-red-induction_P Parameter: Tissue Value: Whole Plant
  misc_feature: MA Experiment ID: 20001450 Result: Up-regulated in Transcription
  misc_feature: MA Experiment 20001450 PARAMETER Experiment Name: At_Far-red-induction_P Parameter: Age (day) Value: 7
  misc_feature: MA Experiment 20001450 PARAMETER Experiment Name: At_Far-red-induction_P Parameter: Light Value: Far-red vs. White
  misc_feature: MA Experiment 20001450 PARAMETER Experiment Name: At_Far-red-induction_P Parameter: Organism Value: A. thaliana
  misc_feature: MA Experiment 20001450 PARAMETER Experiment Name: At_Far-red-induction_P Parameter: Plant Line Value: Columbia
  misc_feature: MA Experiment 20001450 PARAMETER Experiment Name: At_Far-red-induction_P Parameter: Timepoint (hr) Value: 8
  misc_feature: MA Experiment 20001450 PARAMETER Experiment Name: At_Far-red-induction_P Parameter: Tissue Value: Whole Plant
tctacatttgtttttgattagttcgcgattcatttctatcttgtctccggtcaatatttttgttcgatccgtcgatcggatattttgactggaggtttaagaagtctgaaattgttagatcgcagctatgtcgtactctgactccgattcgtcgtctcatggtggcgagtacaagaatttccgacagattacgcgtgaacgactcttgtatgagatgcttagatctgcaaagacagggagctcaaaatccacctggaaggtactaatcatggacaaacttactgtcaagataatgtcgtacgcctgcaaaatggctgatatcacacaagaaggagtttcattggttgaagacatatttagacgaagacaaccacttccttcaatggatgcaatatacttcatccagccaactaaagagaatgtcatcatgttcttgtcagacatgtctgggaaatcacccttgtacaagaaggcattcgttttcttcagttcaccggtttccaaggaactggttggtcacatcaagaaagattcgagtgtattacctcggattggagcattgagagagatgaatttggagttttttgccattgatagccagggtttcataaccgatcatgagcgagctttagaggatctttttggtgatgaggaaacttctcgaaaaggcgatgcgtgcttgaatgtgatggcttctcgaattgctacagtctttgcttcgttgcgggaattcccagcagtacgataccgagctgcaaagtcacttgatgcatcgacaatgacaactttgcgcgatttaattccaacaaagcttgcagctggaatctggaattgtctggcaaaacataagcagtcgattgaaaattttcctcaaactgaaacatgcgagctactcatccttgacagatccatagaccagattgcccctgttatacatgagtggacatatgatgctatgtgccatgatttactgaacatggaaggaaacaaatatgtacatgtgattccaagcaaatcaggcggacaaccagagaagaaagatgtgctcttagaggaacatgatcctatttggctagagcttcgacatgcacatatagcagatgctagtgaaagattgcatgacaagatgaccaatttcttatcgaaaaacaaagctgctcagcttcagggtaagagagatggagctgagctttctacaagagatttgcagaagatggttcaagcattgccacagtacagtgaacaaattgacaagctctctctccacgtagagattgctagaaaactcaacgaccttatcagagagcaaggacttcgggagcttggacaacttgaacaagaccttgtttttggtgatgctggaatgaaggatgtgattaaatatttgagtactcaagaggaggcaagccgtgaaggtaagttacgcctgttgatgatcctcgcaacaatttaccctgaaaagtttgaaggtgaaaaaggtcaaaatctaatgaagttggccaaactctcatctgatgacatgaccgctgtaaataatatgagcttacttggttcagccgtcgatgctaaaaagaataccccgggaggtttcactttgaaatttgaccttcacaagaaaaaacgagctgtcaggaaagagcgccaagaggaagcagcatggcagttatctcgtttttaccccatgattgaggaactcatcgaaaaacttagcaaaggagaattgccaaaagaggatttcccatgtatgaacgacccaagcccaagtttccacggatcaacctcactttcatcagcagcaagtagtagtcaaggtcaagctgctcagtccatgagatcaagacgcacaccaacatgggctaaacctcgaggttcagatgatggatattcaagtgattcggtattgagacatgcgtcaagcgatttcaggaagatgggacagcgaatatttgtgttcatcgtcggtggagcgactagatcagagttaaaagtatgccacaaactatccacaaaactcaaaagagaagtaatcctcggttccacgagcctggacgatcctccacagttcataacgaaattgaagcttttgactgcaaatgatgatttatctttagacgatctccaaatatga

SEQ ID NO: 78031 - protein, 666 aa, Arabidopsis thaliana
  peptide (1)..(666): Ceres Seq. ID no. 12600922
  misc_feature (1)..(666): Homolog of NCBI NO: 38345989 NR Description: OSJNBa0032B23.7 [Oryza sativa (japonica
  misc_feature (1)..(666): Homolog of NCBI NO: 18413751 NR Description: putative protein; protein id: At4g12120.1,
  misc_feature (1)..(666): Homolog of NCBI NO: 28201893 NR Description: Protein transport Sec1b (AtSec1b)
  misc_feature (21)..(648): Homolog of NCBI NO: 7485573 NR Description: hypothetical protein F16J13.190 - Arabidopsis >gi|4586117|emb|CAB40953.1| putative protein [Arabidopsis >gi|7267913|emb|CAB78255.1| putative protein [Arabidopsis
  misc_feature (1)..(575): Homolog of NCBI NO: 18378910 NR Description: hypothetical protein; protein id: At1g02010.1
  misc_feature (158)..(648): Homolog of NCBI NO: 13195580 NR Description: AtSec1a [Arabidopsis thaliana]
  misc_feature (158)..(648): Homolog of NCBI NO: 28201892 NR Description: Protein transport Sec1a (AtSec1a)
  misc_feature (1)..(107): Homolog of NCBI NO: 13195580 NR Description: AtSec1a [Arabidopsis thaliana]
  misc_feature (1)..(107): Homolog of NCBI NO: 28201892 NR Description: Protein transport Sec1a (AtSec1a)
  misc_feature (350)..(657): Homolog of NCBI NO: 18378910 NR Description: hypothetical protein; protein id: At1g02010.1
MSYSDSDSSSHGGEYKNFRQITRERLLYEMLRSAKTGSSKSTWKVLIMDKLTVKIMSYACKMADITQEGVSLVEDIFRRRQPLPSMDAIYFIQPTKENVIMFLSDMSGKSPLYKKAFVFFSSPVSKELVGHIKKDSSVLPRIGALREMNLEFFAIDSQGFITDHERALEDLFGDEETSRKGDACLNVMASRIATVFASLREFPAVRYRAAKSLDASTMTTLRDLIPTKLAAGIWNCLAKHKQSIENFPQTETCELLILDRSIDQIAPVIHEWTYDAMCHDLLNMEGNKYVHVIPSKSGGQPEKKDVLLEEHDPIWLELRHAHIADASERLHDKMTNFLSKNKAAQLQGKRDGAELSTRDLQKMVQALPQYSEQIDKLSLHVEIARKLNDLIREQGLRELGQLEQDLVFGDAGMKDVIKYLSTQEEASREGKLRLLMILATIYPEKFEGEKGQNLMKLAKLSSDDMTAVNNMSLLGSAVDAKKNTPGGFTLKFDLHKKKRAVRKERQEEAAWQLSRFYPMIEELIEKLSKGELPKEDFPCMNDPSPSFHGSTSLSSAASSSQGQAAQSMRSRRTPTWAKPRGSDDGYSSDSVLRHASSDFRKMGQRIFVFIVGGATRSELKVCHKLSTKLKREVILGSTSLDDPPQFITKLKLLTANDDLSLDDLQI

SEQ ID NO: 78032 - protein, 637 aa, Arabidopsis thaliana
  peptide (1)..(637): Ceres Seq. ID no. 12600923
  misc_feature (1)..(637): Homolog of NCBI NO: 38345989 NR Description: OSJNBa0032B23.7 [Oryza sativa (japonica
  misc_feature (1)..(637): Homolog of NCBI NO: 18413751 NR Description: putative protein; protein id: At4g12120.1,
  misc_feature (1)..(637): Homolog of NCBI NO: 28201893 NR Description: Protein transport Sec1b (AtSec1b)
  misc_feature (1)..(619): Homolog of NCBI NO: 7485573 NR Description: hypothetical protein F16J13.190 - Arabidopsis >gi|4586117|emb|CAB40953.1| putative protein [Arabidopsis >gi|7267913|emb|CAB78255.1| putative protein [Arabidopsis
  misc_feature (1)..(546): Homolog of NCBI NO: 18378910 NR Description: hypothetical protein; protein id: At1g02010.1
  misc_feature (129)..(619): Homolog of NCBI NO: 13195580 NR Description: AtSec1a [Arabidopsis thaliana]
  misc_feature (129)..(619): Homolog of NCBI NO: 28201892 NR Description: Protein transport Sec1a (AtSec1a)
  misc_feature (1)..(78): Homolog of NCBI NO: 13195580 NR Description: AtSec1a [Arabidopsis thaliana]
  misc_feature (1)..(78): Homolog of NCBI NO: 28201892 NR Description: Protein transport Sec1a (AtSec1a)
  misc_feature (321)..(628): Homolog of NCBI NO: 18378910 NR Description: hypothetical protein; protein id: At1g02010.1
MLRSAKTGSSKSTWKVLIMDKLTVKIMSYACKMADITQEGVSLVEDIFRRRQPLPSMDAIYFIQPTKENVIMFLSDMSGKSPLYKKAFVFFSSPVSKELVGHIKKDSSVLPRIGALREMNLEFFAIDSQGFITDHERALEDLFGDEETSRKGDACLNVMASRIATVFASLREFPAVRYRAAKSLDASTMTTLRDLIPTKLAAGIWNCLAKHKQSIENFPQTETCELLILDRSIDQIAPVIHEWTYDAMCHDLLNMEGNKYVHVIPSKSGGQPEKKDVLLEEHDPIWLELRHAHIADASERLHDKMTNFLSKNKAAQLQGKRDGAELSTRDLQKMVQALPQYSEQIDKLSLHVEIARKLNDLIREQGLRELGQLEQDLVFGDAGMKDVIKYLSTQEEASREGKLRLLMILATIYPEKFEGEKGQNLMKLAKLSSDDMTAVNNMSLLGSAVDAKKNTPGGFTLKFDLHKKKRAVRKERQEEAAWQLSRFYPMIEELIEKLSKGELPKEDFPCMNDPSPSFHGSTSLSSAASSSQGQAAQSMRSRRTPTWAKPRGSDDGYSSDSVLRHASSDFRKMGQRIFVFIVGGATRSELKVCHKLSTKLKREVILGSTSLDDPPQFITKLKLLTANDDLSLDDLQI

SEQ ID NO: 78033 - protein, 619 aa, Arabidopsis thaliana
  peptide (1)..(619): Ceres Seq. ID no. 12600924
  misc_feature (1)..(619): Homolog of NCBI NO: 38345989 NR Description: OSJNBa0032B23.7 [Oryza sativa (japonica
  misc_feature (1)..(619): Homolog of NCBI NO: 18413751 NR Description: putative protein; protein id: At4g12120.1,
  misc_feature (1)..(619): Homolog of NCBI NO: 28201893 NR Description: Protein transport Sec1b (AtSec1b)
  misc_feature (1)..(601): Homolog of NCBI NO: 7485573 NR Description: hypothetical protein F16J13.190 - Arabidopsis >gi|4586117|emb|CAB40953.1| putative protein [Arabidopsis >gi|7267913|emb|CAB78255.1| putative protein [Arabidopsis
  misc_feature (1)..(528): Homolog of NCBI NO: 18378910 NR Description: hypothetical protein; protein id: At1g02010.1
  misc_feature (111)..(601): Homolog of NCBI NO: 13195580 NR Description: AtSec1a [Arabidopsis thaliana]
  misc_feature (111)..(601): Homolog of NCBI NO: 28201892 NR Description: Protein transport Sec1a (AtSec1a)
  misc_feature (1)..(60): Homolog of NCBI NO: 13195580 NR Description: AtSec1a [Arabidopsis thaliana]
  misc_feature (1)..(60): Homolog of NCBI NO: 28201892 NR Description: Protein transport Sec1a (AtSec1a)
  misc_feature (303)..(610): Homolog of NCBI NO: 18378910 NR Description: hypothetical protein; protein id: At1g02010.1
MDKLTVKIMSYACKMADITQEGVSLVEDIFRRRQPLPSMDAIYFIQPTKENVIMFLSDMSGKSPLYKKAFVFFSSPVSKELVGHIKKDSSVLPRIGALREMNLEFFAIDSQGFITDHERALEDLFGDEETSRKGDACLNVMASRIATVFASLREFPAVRYRAAKSLDASTMTTLRDLIPTKLAAGIWNCLAKHKQSIENFPQTETCELLILDRSIDQIAPVIHEWTYDAMCHDLLNMEGNKYVHVIPSKSGGQPEKKDVLLEEHDPIWLELRHAHIADASERLHDKMTNFLSKNKAAQLQGKRDGAELSTRDLQKMVQALPQYSEQIDKLSLHVEIARKLNDLIREQGLRELGQLEQDLVFGDAGMKDVIKYLSTQEEASREGKLRLLMILATIYPEKFEGEKGQNLMKLAKLSSDDMTAVNNMSLLGSAVDAKKNTPGGFTLKFDLHKKKRAVRKERQEEAAWQLSRFYPMIEELIEKLSKGELPKEDFPCMNDPSPSFHGSTSLSSAASSSQGQAAQSMRSRRTPTWAKPRGSDDGYSSDSVLRHASSDFRKMGQRIFVFIVGGATRSELKVCHKLSTKLKREVILGSTSLDDPPQFITKLKLLTANDDLSLDDLQI

SEQ ID NO: 78034 - DNA, 1192 bp, Arabidopsis thaliana
  misc_feature (1)..(1192): Ceres Seq. ID no. 12600941
  misc_feature: MA Experiment ID: 20000179 Result: Down-regulated in Transcription
  misc_feature: MA Experiment 20000179 PARAMETER Experiment Name: At_Germinating_Seeds_P Parameter: Age (hr) Value: 6 vs. 0
  misc_feature: MA Experiment 20000179 PARAMETER Experiment Name: At_Germinating_Seeds_P Parameter: Tissue Value: Germinating Seeds
  misc_feature: MA Experiment ID: 20000709 Result: Up-regulated in Transcription
  misc_feature: MA Experiment 20000709 PARAMETER Experiment Name: At_15mM_NH4NO3_L-to-H_P Parameter: Age (hr) Value: 14
  misc_feature: MA Experiment 20000709 PARAMETER Experiment Name: At_15mM_NH4NO3_L-to-H_P Parameter: Organism Value: A. thaliana
  misc_feature: MA Experiment 20000709 PARAMETER Experiment Name: At_15mM_NH4NO3_L-to-H_P Parameter: Plant Line Value: WS
  misc_feature: MA Experiment 20000709 PARAMETER Experiment Name: At_15mM_NH4NO3_L-to-H_P Parameter: Timepoint (hr) Value: 4
  misc_feature: MA Experiment 20000709 PARAMETER Experiment Name: At_15mM_NH4NO3_L-to-H_P Parameter: Tissue Value: Aerial
  misc_feature: MA Experiment 20000709 PARAMETER Experiment Name: At_15mM_NH4NO3_L-to-H_P Parameter: Treatment Value: 15mM NH4NO3 vs. 30mM Mannitol
  misc_feature: MA Experiment ID: 20001247 Result: Down-regulated in Transcription
  misc_feature: MA Experiment 20001247 PARAMETER Experiment Name: At_Far-red-induction_P Parameter: Age (day) Value: 7
  misc_feature: MA Experiment 20001247 PARAMETER Experiment Name: At_Far-red-induction_P Parameter: Light Value: Far-red vs. White
  misc_feature: MA Experiment 20001247 PARAMETER Experiment Name: At_Far-red-induction_P Parameter: Organism Value: A. thaliana
  misc_feature: MA Experiment 20001247 PARAMETER Experiment Name: At_Far-red-induction_P Parameter: Plant Line Value: Columbia
  misc_feature: MA Experiment 20001247 PARAMETER Experiment Name: At_Far-red-induction_P Parameter: Timepoint (hr) Value: 1
  misc_feature: MA Experiment 20001247 PARAMETER Experiment Name: At_Far-red-induction_P Parameter: Tissue Value: Whole Plant
  misc_feature: MA Experiment ID: 20001451 Result: Down-regulated in Transcription
  misc_feature: MA Experiment 20001451 PARAMETER Experiment Name: At_Far-red-induction_P Parameter: Age (day) Value: 7
  misc_feature: MA Experiment 20001451 PARAMETER Experiment Name: At_Far-red-induction_P Parameter: Light Value: Far-red vs. White
  misc_feature: MA Experiment 20001451 PARAMETER Experiment Name: At_Far-red-induction_P Parameter: Organism Value: A. thaliana
  misc_feature: MA Experiment 20001451 PARAMETER Experiment Name: At_Far-red-induction_P Parameter: Plant Line Value: Columbia
  misc_feature: MA Experiment 20001451 PARAMETER Experiment Name: At_Far-red-induction_P Parameter: Timepoint (hr) Value: 24
  misc_feature: MA Experiment 20001451 PARAMETER Experiment Name: At_Far-red-induction_P Parameter: Tissue Value: Whole Plant
  misc_feature: MA Experiment ID: 20001458 Result: Up-regulated in Transcription
  misc_feature: MA Experiment 20001458 PARAMETER Experiment Name: At_50mM_NH4NO3_L-to-H_P Parameter: Age (day) Value: Undefined
  misc_feature: MA Experiment 20001458 PARAMETER Experiment Name: At_50mM_NH4NO3_L-to-H_P Parameter: Organism Value: Undefined
  misc_feature: MA Experiment 20001458 PARAMETER Experiment Name: At_50mM_NH4NO3_L-to-H_P Parameter: Plant Line Value: Undefined
  misc_feature: MA Experiment 20001458 PARAMETER Experiment Name: At_50mM_NH4NO3_L-to-H_P Parameter: Timepoint (hr) Value: 2
  misc_feature: MA Experiment 20001458 PARAMETER Experiment Name: At_50mM_NH4NO3_L-to-H_P Parameter: Tissue Value: Siliques
  misc_feature: MA Experiment 20001458 PARAMETER Experiment Name: At_50mM_NH4NO3_L-to-H_P Parameter: Treatment Value: 50mM NH4NO3 vs. 100mM Manitol
  misc_feature: MA Experiment ID: 20001557 Result: Up-regulated in Transcription
  misc_feature: MA Experiment 20001557 PARAMETER Experiment Name: At_Drought_Soil_Dry_P Parameter: Age (day) Value: 27
  misc_feature: MA Experiment 20001557 PARAMETER Experiment Name: At_Drought_Soil_Dry_P Parameter: Organism Value: A. thaliana
  misc_feature: MA Experiment 20001557 PARAMETER Experiment Name: At_Drought_Soil_Dry_P Parameter: Plant Line Value: WS
  misc_feature: MA Experiment 20001557 PARAMETER Experiment Name: At_Drought_Soil_Dry_P Parameter: Post Timepoint (hr) Value: 3
  misc_feature: MA Experiment 20001557 PARAMETER Experiment Name: At_Drought_Soil_Dry_P Parameter: Post-Treatment Value: Re-Water vs. No Drought
  misc_feature: MA Experiment 20001557 PARAMETER Experiment Name: At_Drought_Soil_Dry_P Parameter: Timepoint (day) Value: 13
  misc_feature: MA Experiment 20001557 PARAMETER Experiment Name: At_Drought_Soil_Dry_P Parameter: Treatment Value: Drought vs. No Drought
  misc_feature: MA Experiment ID: 20001558 Result: Up-regulated in Transcription
  misc_feature: MA Experiment 20001558 PARAMETER Experiment Name: At_Drought_Soil_Dry_P Parameter: Age (day) Value: 27
  misc_feature: MA Experiment 20001558 PARAMETER Experiment Name: At_Drought_Soil_Dry_P Parameter: Organism Value: A. thaliana
  misc_feature: MA Experiment 20001558 PARAMETER Experiment Name: At_Drought_Soil_Dry_P Parameter: Plant Line Value: WS
  misc_feature: MA Experiment 20001558 PARAMETER Experiment Name: At_Drought_Soil_Dry_P Parameter: Post Timepoint (hr) Value: 6
  misc_feature: MA Experiment 20001558 PARAMETER Experiment Name: At_Drought_Soil_Dry_P Parameter: Post-Treatment Value: Re-Water vs. No Drought
  misc_feature: MA Experiment 20001558 PARAMETER Experiment Name: At_Drought_Soil_Dry_P Parameter: Timepoint (day) Value: 13
  misc_feature: MA Experiment 20001558 PARAMETER Experiment Name: At_Drought_Soil_Dry_P Parameter: Treatment Value: Drought vs. No Drought
  misc_feature: MA Experiment ID: 20001560 Result: Up-regulated in Transcription
  misc_feature: MA Experiment 20001560 PARAMETER Experiment Name: At_Drought_Soil_Dry_P Parameter: Age (day) Value: 28
  misc_feature: MA Experiment 20001560 PARAMETER Experiment Name: At_Drought_Soil_Dry_P Parameter: Organism Value: A. thaliana
  misc_feature: MA Experiment 20001560 PARAMETER Experiment Name: At_Drought_Soil_Dry_P Parameter: Plant Line Value: WS
  misc_feature: MA Experiment 20001560 PARAMETER Experiment Name: At_Drought_Soil_Dry_P Parameter: Post Timepoint (hr) Value: None
  misc_feature: MA Experiment 20001560 PARAMETER Experiment Name: At_Drought_Soil_Dry_P Parameter: Post-Treatment Value: None
  misc_feature: MA Experiment 20001560 PARAMETER Experiment Name: At_Drought_Soil_Dry_P Parameter: Timepoint (day) Value: 14
  misc_feature: MA Experiment 20001560 PARAMETER Experiment Name: At_Drought_Soil_Dry_P Parameter: Treatment Value: Drought vs. No Drought
  misc_feature: MA Experiment ID: 20001757 Result: Up-regulated in Transcription
  misc_feature: MA Experiment 20001757 PARAMETER Experiment Name: At_50mM_NH4NO3_L-to-H_P Parameter: Timepoint (hr) Value: 6
  misc_feature: MA Experiment 20001757 PARAMETER Experiment Name: At_50mM_NH4NO3_L-to-H_P Parameter: Tissue Value: Leaf
  misc_feature: MA Experiment 20001757 PARAMETER Experiment Name: At_50mM_NH4NO3_L-to-H_P Parameter: Treatment Value: 50mM NH4NO3 vs 100mM Mannitol
actttcgaaacctctcaccgaagctacaatgagtatcatcgcaggctcctacgagagattcatttggggtttcaagcttaaacccacgaagcacgacgccgaatctcaaaccctaactctctcccctctcttctcctacccttcccacatctccccaatcaccaccgtcgcttgttccggtcccgccgcagcttccggcggctccgacgatacaatccacctctacgaccttccctccgcttcttccctcggctctctccttgaccacaatcacgcagcttcaatcaccgctctctccttctacacaccttcttcactctccttccctcgtaatctaatctccgccgccgcagatggctccgttgctatattcgatactgatccttttgttttgcttaagtcgtttcgtcctcataagaaagcggttaatgatttagcgattcatccttcagggaagcttgctttagctgtttatcgtgatgagttctttgcgatgttgaatttagttagaggaaagaggagtttttgttgtaggttaggtcatgaagctagtcttgtgaaatttgatcctagtggtgaaaggttttacatggttgtgagtaataaagttggagttcatcagtctgaagatgctaagcttcttcttgagctcgagaatccgagccgcaagcgtattctctgtgctactcctggagagagtggaactctgttcacaggtggtgaggatcgggctataacagcttgggatacaaatagtgggaagcttgcatattccatagaagatgctcacccagctcgaatcaaaggtattgttgtgcttaccaggaatgatagtgacggctccttggaagatccatacttgattggttctgcatcgtctgatgggatcatacgtgtttgggacgtgcgaatggcggctaaagaaaatacaaaaccattagccgagacaaatactaaatcaaggcttacttgtcttgccgggtcagctcttaaatctatgagacggccacagattggaaagcaggaacctcagaaggtagacgaagagcatgaggactcagaataagagctgatttttagtgtttattgaaaaattgtgagctgacattaattttgatgcaagttttggtagaatccagtagattcttgtcgaattataattataaacattgtcttaaaccatagattttgt

SEQ ID NO: 78035 - protein, 354 aa, Arabidopsis thaliana
  peptide (1)..(354): Ceres Seq. ID no. 12600942
  misc_feature (10)..(354): Homolog of NCBI NO: 15217832 NR Description: G-protein beta-subunit (transducin) family;
  misc_feature (10)..(354): Homolog of NCBI NO: 23306444 NR Description: Unknown protein [Arabidopsis thaliana]
  misc_feature (10)..(232): Homolog of NCBI NO: 25404514 NR Description: hypothetical protein F16G16.2 [imported] -
  misc_feature (213)..(354): Homolog of NCBI NO: 25404514 NR Description: hypothetical protein F16G16.2 [imported] -
  misc_feature (10)..(325): Homolog of NCBI NO: 8923577 NR Description: hypothetical protein FLJ20624 [Homo sapiens]
  misc_feature (10)..(325): Homolog of NCBI NO: 37362258 NR Description: PAK1 interacting protein 1 [Danio rerio]
  misc_feature (10)..(349): Homolog of NCBI NO: 14211689 NR Description: PAK/PLC-interacting protein 1 [Homo sapiens]
  misc_feature (10)..(349): Homolog of NCBI NO: 15012024 NR Description: Unknown (protein for MGC:13426) [Homo sapiens]
  misc_feature (7)..(325): Homolog of NCBI NO: 29436537 NR Description: Similar to hypothetical protein FLJ20624 [Danio
  misc_feature (10)..(325): Homolog of NCBI NO: 21311951 NR Description: RIKEN cDNA 5930415H02 [Mus musculus]
LSKPLTEATMSIIAGSYERFIWGFKLKPTKHDAESQTLTLSPLFSYPSHISPITTVACSGPAAASGGSDDTIHLYDLPSASSLGSLLDHNHAASITALSFYTPSSLSFPRNLISAAADGSVAIFDTDPFVLLKSFRPHKKAVNDLAIHPSGKLALAVYRDEFFAMLNLVRGKRSFCCRLGHEASLVKFDPSGERFYMVVSNKVGVHQSEDAKLLLELENPSRKRILCATPGESGTLFTGGEDRAITAWDTNSGKLAYSIEDAHPARIKGIVVLTRNDSDGSLEDPYLIGSASSDGIIRVWDVRMAAKENTKPLAETNTKSRLTCLAGSALKSMRRPQIGKQEPQKVDEEHEDSE

SEQ ID NO: 78036 - protein, 345 aa, Arabidopsis thaliana
  peptide (1)..(345): Ceres Seq. ID no. 12600943
  misc_feature (1)..(345): Homolog of NCBI NO: 15217832 NR Description: G-protein beta-subunit (transducin) family;
  misc_feature (1)..(345): Homolog of NCBI NO: 23306444 NR Description: Unknown protein [Arabidopsis thaliana]
  misc_feature (1)..(223): Homolog of NCBI NO: 25404514 NR Description: hypothetical protein F16G16.2 [imported] -
  misc_feature (204)..(345): Homolog of NCBI NO: 25404514 NR Description: hypothetical protein F16G16.2 [imported] -
  misc_feature (1)..(316): Homolog of NCBI NO: 8923577 NR Description: hypothetical protein FLJ20624 [Homo sapiens]
  misc_feature (1)..(316): Homolog of NCBI NO: 37362258 NR Description: PAK1 interacting protein 1 [Danio rerio]
  misc_feature (1)..(340): Homolog of NCBI NO: 14211689 NR Description: PAK/PLC-interacting protein 1 [Homo sapiens]
  misc_feature (1)..(340): Homolog of NCBI NO: 15012024 NR Description: Unknown (protein for MGC:13426) [Homo sapiens]
  misc_feature (1)..(316): Homolog of NCBI NO: 29436537 NR Description: Similar to hypothetical protein FLJ20624 [Danio
  misc_feature (1)..(316): Homolog of NCBI NO: 21311951 NR Description: RIKEN cDNA 5930415H02 [Mus musculus]
MSIIAGSYERFIWGFKLKPTKHDAESQTLTLSPLFSYPSHISPITTVACSGPAAASGGSDDTIHLYDLPSASSLGSLLDHNHAASITALSFYTPSSLSFPRNLISAAADGSVAIFDTDPFVLLKSFRPHKKAVNDLAIHPSGKLALAVYRDEFFAMLNLVRGKRSFCCRLGHEASLVKFDPSGERFYMVVSNKVGVHQSEDAKLLLELENPSRKRILCATPGESGTLFTGGEDRAITAWDTNSGKLAYSIEDAHPARIKGIVVLTRNDSDGSLEDPYLIGSASSDGIIRVWDVRMAAKENTKPLAETNTKSRLTCLAGSALKSMRRPQIGKQEPQKVDEEHEDSE

SEQ ID NO: 78037 - protein, 190 aa, Arabidopsis thaliana
  peptide (1)..(190): Ceres Seq. ID no. 12600944
  misc_feature (1)..(190): Homolog of NCBI NO: 15217832 NR Description: G-protein beta-subunit (transducin) family;
  misc_feature (1)..(190): Homolog of NCBI NO: 23306444 NR Description: Unknown protein [Arabidopsis thaliana]
  misc_feature (1)..(68): Homolog of NCBI NO: 25404514 NR Description: hypothetical protein F16G16.2 [imported] -
  misc_feature (49)..(190): Homolog of NCBI NO: 25404514 NR Description: hypothetical protein F16G16.2 [imported] -
  misc_feature (1)..(161): Homolog of NCBI NO: 8923577 NR Description: hypothetical protein FLJ20624 [Homo sapiens]
  misc_feature (1)..(161): Homolog of NCBI NO: 37362258 NR Description: PAK1 interacting protein 1 [Danio rerio]
  misc_feature (1)..(185): Homolog of NCBI NO: 14211689 NR Description: PAK/PLC-interacting protein 1 [Homo sapiens]
  misc_feature (1)..(185): Homolog of NCBI NO: 15012024 NR Description: Unknown (protein for MGC:13426) [Homo sapiens]
  misc_feature (1)..(161): Homolog of NCBI NO: 29436537 NR Description: Similar to hypothetical protein FLJ20624 [Danio
  misc_feature (1)..(161): Homolog of NCBI NO: 21311951 NR Description: RIKEN cDNA 5930415H02 [Mus musculus]
MLNLVRGKRSFCCRLGHEASLVKFDPSGERFYMVVSNKVGVHQSEDAKLLLELENPSRKRILCATPGESGTLFTGGEDRAITAWDTNSGKLAYSIEDAHPARIKGIVVLTRNDSDGSLEDPYLIGSASSDGIIRVWDVRMAAKENTKPLAETNTKSRLTCLAGSALKSMRRPQIGKQEPQKVDEEHEDSE

SEQ ID NO: 78038 - DNA, 1714 bp, Arabidopsis thaliana
  misc_feature (1)..(1714): Ceres Seq. ID no. 12600945
  misc_feature: MA Experiment ID: 20000171 Result: Down-regulated in Transcription
  misc_feature: MA Experiment 20000171 PARAMETER Experiment Name: At_42deg_Heat_P Parameter: Age (day) Value: 14
  misc_feature: MA Experiment 20000171 PARAMETER Experiment Name: At_42deg_Heat_P Parameter: Organism Value: A. thaliana
  misc_feature: MA Experiment 20000171 PARAMETER Experiment Name: At_42deg_Heat_P Parameter: Plant Line Value: WS
  misc_feature: MA Experiment 20000171 PARAMETER Experiment Name: At_42deg_Heat_P Parameter: Temperature (deg C) Value: 42 vs. 22
  misc_feature: MA Experiment 20000171 PARAMETER Experiment Name: At_42deg_Heat_P Parameter: Timepoint (hr) Value: 1
  misc_feature: MA Experiment 20000171 PARAMETER Experiment Name: At_42deg_Heat_P Parameter: Tissue Value: Aerial
  misc_feature: MA Experiment ID: 20000173 Result: Down-regulated in Transcription
  misc_feature: MA Experiment 20000173 PARAMETER Experiment Name: At_42deg_Heat_P Parameter: Age (day) Value: 14
  misc_feature: MA Experiment 20000173 PARAMETER Experiment Name: At_42deg_Heat_P Parameter: Organism Value: A. thaliana
  misc_feature: MA Experiment 20000173 PARAMETER Experiment Name: At_42deg_Heat_P Parameter: Plant Line Value: WS
  misc_feature: MA Experiment 20000173 PARAMETER Experiment Name: At_42deg_Heat_P Parameter: Temperature (deg C) Value: 42 vs. 22
  misc_feature: MA Experiment 20000173 PARAMETER Experiment Name: At_42deg_Heat_P Parameter: Timepoint (hr) Value: 6
  misc_feature: MA Experiment 20000173 PARAMETER Experiment Name: At_42deg_Heat_P Parameter: Tissue Value: Aerial
  misc_feature: MA Experiment ID: 20000182 Result: Up-regulated in Transcription
  misc_feature: MA Experiment 20000182 PARAMETER Experiment Name: At_2mM_SA_P Parameter: Age (day) Value: 14
  misc_feature: MA Experiment 20000182 PARAMETER Experiment Name: At_2mM_SA_P Parameter: Organism Value: A. thaliana
  misc_feature: MA Experiment 20000182 PARAMETER Experiment Name: At_2mM_SA_P Parameter: Plant Line Value: WS
  misc_feature: MA Experiment 20000182 PARAMETER Experiment Name: At_2mM_SA_P Parameter: Timepoint (hr) Value: 6
  misc_feature: MA Experiment 20000182 PARAMETER Experiment Name: At_2mM_SA_P Parameter: Tissue Value: Aerial
  misc_feature: MA Experiment 20000182 PARAMETER Experiment Name: At_2mM_SA_P Parameter: Treatment Value: 2mM SA vs. No Treatment
  misc_feature: MA Experiment ID: 20000184 Result: Down-regulated in Transcription
  misc_feature: MA Experiment 20000184 PARAMETER Experiment Name: At_Shoots__P Parameter: Age (day) Value: 7
  misc_feature: MA Experiment 20000184 PARAMETER Experiment Name: At_Shoots__P Parameter: Tissue Value: Shoots vs. Whole Plant
  misc_feature: MA Experiment ID: 20000227 Result: Down-regulated in Transcription
  misc_feature: MA Experiment 20000227 PARAMETER Experiment Name: At_Root-Tips-vs-Tops_P Parameter: Tissue Value: Root Tips vs. Root Tops
  misc_feature: MA Experiment ID: 20000234 Result: Down-regulated in Transcription
  misc_feature: MA Experiment 20000234 PARAMETER Experiment Name: At_Siliques_P Parameter: Age (day) Value: 21
  misc_feature: MA Experiment 20000234 PARAMETER Experiment Name: At_Siliques_P Parameter: Organism Value: A. thaliana
  misc_feature: MA Experiment 20000234 PARAMETER Experiment Name: At_Siliques_P Parameter: Plant Line Value: WS
  misc_feature: MA Experiment 20000234 PARAMETER Experiment Name: At_Siliques_P Parameter: Tissue Value: Less Than 5mm Siliques vs. Whole Plant
  misc_feature: MA Experiment ID: 20000235 Result: Down-regulated in Transcription
  misc_feature: MA Experiment 20000235 PARAMETER Experiment Name: At_Siliques_P Parameter: Age (day) Value: 21
  misc_feature: MA Experiment 20000235 PARAMETER Experiment Name: At_Siliques_P Parameter: Organism Value: A. thaliana
  misc_feature: MA Experiment 20000235 PARAMETER Experiment Name: At_Siliques_P Parameter: Plant Line Value: WS
  misc_feature: MA Experiment 20000235 PARAMETER Experiment Name: At_Siliques_P Parameter: Tissue Value: 5-10mm Siliques vs. Whole Plant
  misc_feature: MA Experiment ID: 20000265 Result: Down-regulated in Transcription
  misc_feature: MA Experiment 20000265 PARAMETER Experiment Name: At_Open_Flower_P Parameter: Age (day) Value: 21
  misc_feature: MA Experiment 20000265 PARAMETER Experiment Name: At_Open_Flower_P Parameter: Plant Line Value: WS
  misc_feature: MA Experiment 20000265 PARAMETER Experiment Name: At_Open_Flower_P Parameter: Tissue Value: Closed Flower vs. Whole Plant
  misc_feature: MA Experiment ID: 20000286 Result: Down-regulated in Transcription
  misc_feature: MA Experiment 20000286 PARAMETER Experiment Name: At_Open_Flower_P Parameter: Age (day) Value: 21
  misc_feature: MA Experiment 20000286 PARAMETER Experiment Name: At_Open_Flower_P Parameter: Plant Line Value: WS
  misc_feature: MA Experiment 20000286 PARAMETER Experiment Name: At_Open_Flower_P Parameter: Tissue Value: Half Open vs. Whole Plant
  misc_feature: MA Experiment ID: 20000438 Result: Down-regulated in Transcription
  misc_feature: MA Experiment 20000438 PARAMETER Experiment Name: At_Shoots__P Parameter: Age (day) Value: 14
  misc_feature: MA Experiment 20000438 PARAMETER Experiment Name: At_Shoots__P Parameter: Tissue Value: Shoots vs. Whole Plant
  misc_feature: MA Experiment ID: 20000495 Result: Down-regulated in Transcription
  misc_feature: MA Experiment 20000495 PARAMETER Experiment Name: At_Guard_Cells_P Parameter: Harvest Date Value: 8/2/2002
  misc_feature: MA Experiment 20000495 PARAMETER Experiment Name: At_Guard_Cells_P Parameter: Organism Value: A. thaliana
  misc_feature: MA Experiment 20000495 PARAMETER Experiment Name: At_Guard_Cells_P Parameter: Tissue Value: Guard Cells vs. Leaves
aacaccaaacccaaaactcccttctctttcttccttcctctccgatctccgttcacatctctctctcatctttatcttcttctttttttgccttgtgggttgaaagtttctatattttctctttctcttctgtttacataatccattttcagctcaagcagctgaagaataacgatcaagaaccaaaaaagaagaaaacgaatctgttcttagctttgatgggttcttgcttcagttctcgagtcaaagcagacatcttccacaatggtaagagcagcgatctttatggtctaagtctctcaagtcggaaatcgtcttcgactgtagcggcggctcagaagacggaaggggagatattgagttcgacccctgtcaaaagcttcacctttaacgaactcaaactcgccacaagaaacttcagaccagatagtgtgatcggagaaggtggctttggttgtgtctttaaaggctggttagatgagtccactctcactccgactaaacctggaaccggtttggtcatcgccgttaaaaagcttaaccaagaaggttttcaaggtcaccgtgaatggctgacagagatcaattacttggggcaactgagtcacccaaatctagttaaactgatcggttattgcttagaagatgaacaccgtcttctagtctacgagtttatgcaaaaaggaagtcttgagaatcatctattcagaagaggtgcatattttaagccactcccatggtttctacgggtcaatgttgcgcttgatgcagcaaaggggcttgcttttcttcacagcgatcccgtcaaagtgatataccgagacattaaagcctcgaacatcttacttgatgcggactacaacgcaaaactttctgactttggactagctagagacggtccaatgggtgatttgagttatgttagtacaagggtcatgggtacttatgggtacgccgcgcctgagtacatgtcatcaggtcacttgaatgcaagaagcgatgtgtacagtttcggagttttgcttctagagattttatctggtaagcgagcgttggatcataacagaccggctaaagaagaaaaccttgtggattgggctcgaccgtacctcacaagcaaacgtaaggttctcctaatcgtggacaatcggctagacacacagtacctacctgaagaagccgtgagaatggcaagcgtggcggtgcagtgtctctcatttgaacccaagtcgcgcccgaccatggaccaagtggtccgtgccttacaacaacttcaggacaacttgggaaaaccgagtcagaccaatccggttaaggataccaagaaacttggttttaaaactggtactactaagtcatccgaaaaacggtttacacaaaaaccttttggcaggcaccttgtgtaggtcaagttgataactgaattccaggatggacatttttccggcggtttacttgaaactgccgatatccgttttcgacggattgaatgcggttctggacaaaccgtgcaggtcaagactaataaaggatacattaaattttccggttacatgtcccatacccaaccttagagaacatgtgtagcctttagcttaggcttccttgtgtgctgttatattgagtatatatgaggtaatttttgcctcttgtgttgtaacacttgtatttttgttcctttaacatttgatgtagagatttttcctatatcttc

SEQ ID NO: 78039 - protein, 467 aa, Arabidopsis thaliana
  peptide (1)..(467): Ceres Seq. ID no. 12600946
  misc_feature (73)..(467): Homolog of NCBI NO: 15225520 NR Description: putative protein kinase; protein id: At2g39660.1, by cDNA: gi_13272430, supported by cDNA: gi_17064833, supported cDNA: gi_18086423, supported by cDNA: gi_20259859, supported by
  misc_feature (73)..(447): Homolog of NCBI NO: 30694253 NR Description: serine/threonine-specific protein kinase -related
  misc_feature (73)..(447): Homolog of NCBI NO: 28058890 NR Description: serine/threonine-specific protein kinase -like
  misc_feature (91)..(447): Homolog of NCBI NO: 11259786 NR Description: serine/threonine-specific protein kinase-like -
  misc_feature (70)..(426): Homolog of NCBI NO: 34906046 NR Description: putative serine/threonine-specific protein kinase
  misc_feature (73)..(436): Homolog of NCBI NO: 166809 NR Description: protein kinase
  misc_feature (73)..(436): Homolog of NCBI NO: 15241749 NR Description: serine/threonine-specific protein kinase NAK; id: At5g02290.1, supported by cDNA: 27477., supported by cDNA:
  misc_feature (73)..(467): Homolog of NCBI NO: 14719339 NR Description: putative protein kinase [Oryza sativa]
  misc_feature (73)..(425): Homolog of NCBI NO: 15222437 NR Description: protein kinase APK1A; protein id: At1g07570.1
  misc_feature (73)..(425): Homolog of NCBI NO: 15227001 NR Description: putative protein kinase; protein id: At2g28930.1
HQTQNSLLFLPSSPISVHISLSSLSSSFFALWVESFYIFSFSSVYIIHFQLKQLKNNDQEPKKKKTNLFLALMGSCFSSRVKADIFHNGKSSDLYGLSLSSRKSSSTVAAAQKTEGEILSSTPVKSFTFNELKLATRNFRPDSVIGEGGFGCVFKGWLDESTLTPTKPGTGLVIAVKKLNQEGFQGHREWLTEINYLGQLSHPNLVKLIGYCLEDEHRLLVYEFMQKGSLENHLFRRGAYFKPLPWFLRVNVALDAAKGLAFLHSDPVKVIYRDIKASNILLDADYNAKLSDFGLARDGPMGDLSYVSTRVMGTYGYAAPEYMSSGHLNARSDVYSFGVLLLEILSGKRALDHNRPAKEENLVDWARPYLTSKRKVLLIVDNRLDTQYLPEEAVRMASVAVQCLSFEPKSRPTMDQVVRALQQLQDNLGKPSQTNPVKDTKKLGFKTGTTKSSEKRFTQKPFGRHLV

SEQ ID NO: 78040 - protein, 395 aa, Arabidopsis thaliana; identical to SEQ ID NO: 48890
  peptide (1)..(395): Ceres Seq. ID no. 12600947
  misc_feature (1)..(395): Homolog of NCBI NO: 15225520 NR Description: putative protein kinase; protein id: At2g39660.1, by cDNA: gi_13272430, supported by cDNA: gi_17064833, supported cDNA: gi_18086423, supported by cDNA: gi_20259859, supported by
  misc_feature (1)..(375): Homolog of NCBI NO: 30694253 NR Description: serine/threonine-specific protein kinase -related
  misc_feature (1)..(375): Homolog of NCBI NO: 28058890 NR Description: serine/threonine-specific protein kinase -like
  misc_feature (19)..(375): Homolog of NCBI NO: 11259786 NR Description: serine/threonine-specific protein kinase-like -
  misc_feature (1)..(354): Homolog of NCBI NO: 34906046 NR Description: putative serine/threonine-specific protein kinase
  misc_feature (1)..(364): Homolog of NCBI NO: 166809 NR Description: protein kinase
  misc_feature (1)..(364): Homolog of NCBI NO: 15241749 NR Description: serine/threonine-specific protein kinase NAK; id: At5g02290.1, supported by cDNA: 27477., supported by cDNA:
  misc_feature (1)..(395): Homolog of NCBI NO: 14719339 NR Description: putative protein kinase [Oryza sativa]
  misc_feature (1)..(353): Homolog of NCBI NO: 15222437 NR Description: protein kinase APK1A; protein id: At1g07570.1
  misc_feature (1)..(353): Homolog of NCBI NO: 15227001 NR Description: putative protein kinase; protein id: At2g28930.1

SEQ ID NO: 78041 - protein, 243 aa, Arabidopsis thaliana; identical to SEQ ID NO: 48891
  peptide (1)..(243): Ceres Seq. ID no. 12600948
  misc_feature (1)..(243): Homolog of NCBI NO: 15225520 NR Description: putative protein kinase; protein id: At2g39660.1, by cDNA: gi_13272430, supported by cDNA: gi_17064833, supported cDNA: gi_18086423, supported by cDNA: gi_20259859, supported by
  misc_feature (1)..(223): Homolog of NCBI NO: 30694253 NR Description: serine/threonine-specific protein kinase -related
  misc_feature (1)..(223): Homolog of NCBI NO: 28058890 NR Description: serine/threonine-specific protein kinase -like
  misc_feature (1)..(223): Homolog of NCBI NO: 11259786 NR Description: serine/threonine-specific protein kinase-like -
  misc_feature (1)..(202): Homolog of NCBI NO: 34906046 NR Description: putative serine/threonine-specific protein kinase
  misc_feature (1)..(212): Homolog of NCBI NO: 166809 NR Description: protein kinase
  misc_feature (1)..(212): Homolog of NCBI NO: 15241749 NR Description: serine/threonine-specific protein kinase NAK; id: At5g02290.1, supported by cDNA: 27477., supported by cDNA:
  misc_feature (1)..(243): Homolog of NCBI NO: 14719339 NR Description: putative protein kinase [Oryza sativa]
  misc_feature (1)..(201): Homolog of NCBI NO: 15222437 NR Description: protein kinase APK1A; protein id: At1g07570.1
  misc_feature (1)..(201): Homolog of NCBI NO: 15227001 NR Description: putative protein kinase; protein id: At2g28930.1

SEQ ID NO: 78042 - DNA, 1406 bp, Arabidopsis thaliana
  misc_feature (1)..(1406): Ceres Seq. ID no. 12601225
  misc_feature: MA Experiment ID: 20000496 Result: Up-regulated in Transcription
  misc_feature: MA Experiment 20000496 PARAMETER Experiment Name: At_Guard_Cells_P Parameter: Harvest Date Value: 7/19/2002
  misc_feature: MA Experiment 20000496 PARAMETER Experiment Name: At_Guard_Cells_P Parameter: Organism Value: Canola
  misc_feature: MA Experiment 20000496 PARAMETER Experiment Name: At_Guard_Cells_P Parameter: Tissue Value: Guard Cells vs. Leaves
gaacaaaaaacaaatcaagcaaatttatttatcttggtcaagagacattgattctcttaaatttctgcaaaattaagctcagagattcacaccgcatctgaaattgtgctcagaggggttccaaatattaccagtcgttaggaagcaatcacgagttgttttaggaattagtgaacgtgataatggctagcaatgagatggaaaaatcgagtaaagagaaggaacctaaaacacctcctccttcttctactgcccctccctcttcacaggaaccttcatcggctgtgagtgctggcatggctactccagattggtctggttttcaggcatattctcctatgccgccgcctcatggttatgtggcatctagtccccaacctcacccttatatgtggggagttcagcatatgatgcctccttatggaactccgcctcatccttatgttgcaatgtatcccccaggtggcatgtacgcacatccttcaatgcctccgggttcttatccctatagcccttatgctatgccttctccaaatggaatgactgaagtttctggcaatactacaggcggcactgatggtgatgctaaacaatctgaagtgaaggaaaaattgcccatcaaaagatcaagaggaagcttgggaagtttgaacatgattacaggaaagaacaatgaacctgggaaaaactcaggagcatcagctaatggagcttactccaaaagtggggagagtgcttctgatggttcaagtgaaggaagtgatgggaactctcaaaatagttctttattgtttttccattcagctgaagcagcatcagagaatggtggttctgccaatggtccgcaaaatggaagtgctggtacacctattctaccggtgagccagaccgtaccaatcatgccaatgacagctgcaggtgttcctggcccaccaacaaatttaaatattgggatggattactggggtgctccaacttcagctggtatccctggaatgcatgggaaagtatctacaccagttcctggagttgttgctccaggctcgcgagatggtggccattcacaaccctggttacaggacgatagagaacttaagcgacagagacggaagcagtccaatagggagtctgctcgaagatcaaggttgcgtaaacaggccgaatgtgatgagctggcccaacgcgctgaggtgttgaacgaagaaaacacaaatctcagagcagaaatcaacaagctcaaaagccaatgcgaagagcttaccaccgagaacacctctctcaaggaccaactttcattattccctccacttgaaggcataagcatggacaatgaccaccaagaaccagacaccaatcaaacaggtgccgcagagagaaaggttgattcatacaaagactcaacgtga

SEQ ID NO: 78043 - protein, 407 aa, Arabidopsis thaliana
  peptide (1)..(407): Ceres Seq. ID no. 12601226
  misc_feature (301)..(365): Pfam Name: bZIP transcription factor Pfam Description: bZIP transcription factor
  misc_feature (1)..(407): Homolog of NCBI NO: 30686443 NR Description: G-box binding bZIP transcription factor -related
  misc_feature (1)..(367): Homolog of NCBI NO: 25344493 NR Description: hypothetical protein At2g35530 [imported] -
  misc_feature (1)..(388): Homolog of NCBI NO: 15222576 NR Description: G-Box binding protein, putative; protein id:
  misc_feature (1)..(388): Homolog of NCBI NO: 28393494 NR Description: putative G-Box binding protein [Arabidopsis
  misc_feature (1)..(397): Homolog of NCBI NO: 13775109 NR Description: bZIP transcription factor 3 [Phaseolus vulgaris]
  misc_feature (1)..(374): Homolog of NCBI NO: 13775107 NR Description: bZIP transcription factor 2 [Phaseolus vulgaris]
  misc_feature (1)..(397): Homolog of NCBI NO: 7488942 NR Description: bZIP DNA-binding protein - parsley
  misc_feature (1)..(370): Homolog of NCBI NO: 5381313 NR Description: G-Box binding protein 2 [Catharanthus roseus]
  misc_feature (1)..(370): Homolog of NCBI NO: 7488943 NR Description: bZIP DNA-binding protein - parsley
  misc_feature (10)..(394): Homolog of NCBI NO: 7489475 NR Description: G-box binding factor 1A - rice
MASNEMEKSSKEKEPKTPPPSSTAPPSSQEPSSAVSAGMATPDWSGFQAYSPMPPPHGYVASSPQPHPYMWGVQHMMPPYGTPPHPYVAMYPPGGMYAHPSMPPGSYPYSPYAMPSPNGMTEVSGNTTGGTDGDAKQSEVKEKLPIKRSRGSLGSLNMITGKNNEPGKNSGASANGAYSKSGESASDGSSEGSDGNSQNSSLLFFHSAEAASENGGSANGPQNGSAGTPILPVSQTVPIMPMTAAGVPGPPTNLNIGMDYWGAPTSAGIPGMHGKVSTPVPGVVAPGSRDGGHSQPWLQDDRELKRQRRKQSNRESARRSRLRKQAECDELAQRAEVLNEENTNLRAEINKLKSQCEELTTENTSLKDQLSLFPPLEGISMDNDHQEPDTNQTGAAERKVDSYKDST

SEQ ID NO: 78044 - protein, 402 aa, Arabidopsis thaliana
  peptide (1)..(402): Ceres Seq. ID no. 12601227
  misc_feature (296)..(360): Pfam Name: bZIP transcription factor Pfam Description: bZIP transcription factor
  misc_feature (1)..(402): Homolog of NCBI NO: 30686443 NR Description: G-box binding bZIP transcription factor -related
  misc_feature (1)..(362): Homolog of NCBI NO: 25344493 NR Description: hypothetical protein At2g35530 [imported] -
  misc_feature (1)..(383): Homolog of NCBI NO: 15222576 NR Description: G-Box binding protein, putative; protein id:
  misc_feature (1)..(383): Homolog of NCBI NO: 28393494 NR Description: putative G-Box binding protein [Arabidopsis
  misc_feature (1)..(392): Homolog of NCBI NO: 13775109 NR Description: bZIP transcription factor 3 [Phaseolus vulgaris]
  misc_feature (1)..(369): Homolog of NCBI NO: 13775107 NR Description: bZIP transcription factor 2 [Phaseolus vulgaris]
  misc_feature (1)..(392): Homolog of NCBI NO: 7488942 NR Description: bZIP DNA-binding protein - parsley
  misc_feature (1)..(365): Homolog of NCBI NO: 5381313 NR Description: G-Box binding protein 2 [Catharanthus roseus]
  misc_feature (1)..(365): Homolog of NCBI NO: 7488943 NR Description: bZIP DNA-binding protein - parsley
  misc_feature (5)..(389): Homolog of NCBI NO: 7489475 NR Description: G-box binding factor 1A - rice
MEKSSKEKEPKTPPPSSTAPPSSQEPSSAVSAGMATPDWSGFQAYSPMPPPHGYVASSPQPHPYMWGVQHMMPPYGTPPHPYVAMYPPGGMYAHPSMPPGSYPYSPYAMPSPNGMTEVSGNTTGGTDGDAKQSEVKEKLPIKRSRGSLGSLNMITGKNNEPGKNSGASANGAYSKSGESASDGSSEGSDGNSQNSSLLFFHSAEAASENGGSANGPQNGSAGTPILPVSQTVPIMPMTAAGVPGPPTNLNIGMDYWGAPTSAGIPGMHGKVSTPVPGVVAPGSRDGGHSQPWLQDDRELKRQRRKQSNRESARRSRLRKQAECDELAQRAEVLNEENTNLRAEINKLKSQCEELTTENTSLKDQLSLFPPLEGISMDNDHQEPDTNQTGAAERKVDSYKDST

SEQ ID NO: 78045 - protein, 369 aa, Arabidopsis thaliana
  peptide (1)..(369): Ceres Seq. ID no. 12601228
  misc_feature (263)..(327): Pfam Name: bZIP transcription factor Pfam Description: bZIP transcription factor
  misc_feature (1)..(369): Homolog of NCBI NO: 30686443 NR Description: G-box binding bZIP transcription factor -related
  misc_feature (1)..(329): Homolog of NCBI NO: 25344493 NR Description: hypothetical protein At2g35530 [imported] -
  misc_feature (1)..(350): Homolog of NCBI NO: 15222576 NR Description: G-Box binding protein, putative; protein id:
  misc_feature (1)..(350): Homolog of NCBI NO: 28393494 NR Description: putative G-Box binding protein [Arabidopsis
  misc_feature (1)..(359): Homolog of NCBI NO: 13775109 NR Description: bZIP transcription factor 3 [Phaseolus vulgaris]
  misc_feature (1)..(336): Homolog of NCBI NO: 13775107 NR Description: bZIP transcription factor 2 [Phaseolus vulgaris]
  misc_feature (1)..(359): Homolog of NCBI NO: 7488942 NR Description: bZIP DNA-binding protein - parsley
  misc_feature (1)..(332): Homolog of NCBI NO: 5381313 NR Description: G-Box binding protein 2 [Catharanthus roseus]
  misc_feature (1)..(332): Homolog of NCBI NO: 7488943 NR Description: bZIP DNA-binding protein - parsley
  misc_feature (1)..(356): Homolog of NCBI NO: 7489475 NR Description: G-box binding factor 1A - rice
MATPDWSGFQAYSPMPPPHGYVASSPQPHPYMWGVQHMMPPYGTPPHPYVAMYPPGGMYAHPSMPPGSYPYSPYAMPSPNGMTEVSGNTTGGTDGDAKQSEVKEKLPIKRSRGSLGSLNMITGKNNEPGKNSGASANGAYSKSGESASDGSSEGSDGNSQNSSLLFFHSAEAASENGGSANGPQNGSAGTPILPVSQTVPIMPMTAAGVPGPPTNLNIGMDYWGAPTSAGIPGMHGKVSTPVPGVVAPGSRDGGHSQPWLQDDRELKRQRRKQSNRESARRSRLRKQAECDELAQRAEVLNEENTNLRAEINKLKSQCEELTTENTSLKDQLSLFPPLEGISMDNDHQEPDTNQTGAAERKVDSYKDST

SEQ ID NO: 78046 - DNA, 2264 bp, Arabidopsis thaliana
  misc_feature (1)..(2264): Ceres Seq. ID no. 12601237
  misc_feature: MA Experiment ID: 20000794 Result: Up-regulated in Transcription
  misc_feature: MA Experiment 20000794 PARAMETER Experiment Name: At_Petals_P Parameter: Age (day) Value: 23-25 days
  misc_feature: MA Experiment 20000794 PARAMETER Experiment Name: At_Petals_P Parameter: Plant Line Value: WS
  misc_feature: MA Experiment 20000794 PARAMETER Experiment Name: At_Petals_P Parameter: Tissue Value: Petals vs. Whole plant
  misc_feature: MA Experiment ID: 20001248 Result: Up-regulated in Transcription
  misc_feature: MA Experiment 20001248 PARAMETER Experiment Name: At_Far-red-induction_P Parameter: Age (day) Value: 7
  misc_feature: MA Experiment 20001248 PARAMETER Experiment Name: At_Far-red-induction_P Parameter: Light Value: Far-red vs. White
  misc_feature: MA Experiment 20001248 PARAMETER Experiment Name: At_Far-red-induction_P Parameter: Organism Value: A. thaliana
  misc_feature: MA Experiment 20001248 PARAMETER Experiment Name: At_Far-red-induction_P Parameter: Plant Line Value: Columbia
  misc_feature: MA Experiment 20001248 PARAMETER Experiment Name: At_Far-red-induction_P Parameter: Timepoint (hr) Value: 4
  misc_feature: MA Experiment 20001248 PARAMETER Experiment Name: At_Far-red-induction_P Parameter: Tissue Value: Whole Plant
  misc_feature: MA Experiment ID: 20001451 Result: Up-regulated in Transcription
  misc_feature: MA Experiment 20001451 PARAMETER Experiment Name: At_Far-red-induction_P Parameter: Age (day) Value: 7
  misc_feature: MA Experiment 20001451 PARAMETER Experiment Name: At_Far-red-induction_P Parameter: Light Value: Far-red vs. White
  misc_feature: MA Experiment 20001451 PARAMETER Experiment Name: At_Far-red-induction_P Parameter: Organism Value: A. thaliana
  misc_feature: MA Experiment 20001451 PARAMETER Experiment Name: At_Far-red-induction_P Parameter: Plant Line Value: Columbia
  misc_feature: MA Experiment 20001451 PARAMETER Experiment Name: At_Far-red-induction_P Parameter: Timepoint (hr) Value: 24
  misc_feature: MA Experiment 20001451 PARAMETER Experiment Name: At_Far-red-induction_P Parameter: Tissue Value: Whole Plant
  misc_feature: MA Experiment ID: 20001911 Result: Up-regulated in Transcription
  misc_feature: MA Experiment 20001911 PARAMETER Experiment Name: At_Drought_Reproduction_P Parameter: Age (day) Value: 40
  misc_feature: MA Experiment 20001911 PARAMETER Experiment Name: At_Drought_Reproduction_P Parameter: Organism Value: A. thaliana
  misc_feature: MA Experiment 20001911 PARAMETER Experiment Name: At_Drought_Reproduction_P Parameter: Plant Line Value: WS
  misc_feature: MA Experiment 20001911 PARAMETER Experiment Name: At_Drought_Reproduction_P Parameter: Timepoint (day) Value: 10
  misc_feature: MA Experiment 20001911 PARAMETER Experiment Name: At_Drought_Reproduction_P Parameter: Tissue Value: Flowers
  misc_feature: MA Experiment 20001911 PARAMETER Experiment Name: At_Drought_Reproduction_P Parameter: Treatment Value: Drought vs. No Drought
ggacatccttgcttttggtctaactttctctctcttgcttctacgcttcttcttgtggcgtagattgttatagagagggaaaccaaaaaagggaatctcaaaagctcgagttcacagatttgacccgagtctttaatccaatctgctggttcgttttccacattcaaactcgactcttgaatatcaaatcagaagtctttgctatggctgctaccgctgctgcttctgttgtccgttacgcacctgaggatcatactcttcccaagccctggaaaggccttatcgatgatagaactggttacttgtacttttggaatcctgagaccaatgttactcagtacgagaaaccaaccccctctctacctcctaagttttctcccgccgtttctgttagctcttccgttcaggttcaacaaactgatgcctatgctcctcccaaggatgacgataagtactccagaggctctgaacgtgtgtccaggttttctgagggtggcaggagtggaccgccttattcgaacggtgctgctaatggagttggggattctgcttatggtgcagcatctaccagagttcctcttccttcatcagctccagcaagtgaactatcccctgaggcctattcccgccgtcatgaaattactgtcagtgggggccaagtaccaccacctctaatgtcctttgaagctactggttttccacctgagcttctgcgggaggtactcagtgcaggtttctctgctccaactccaattcaagctcagtcatggcccattgctatgcaaggtagggacatagtagccattgctaaaactggctcgggaaaaactttgggttacttgattcctggatttttgcatcttcaacgtatccgaaatgattcgcgaatgggcccaacaatcttggtattgtctccaacgagagagctggccacacaaatccaagaagaagctgttaaatttgggaggtcatcaagaatttcgtgtacgtgtttgtatggtggtgcaccaaagggccctcagttgagggatttagaaagaggagcagatatcgtggttgcaactcctgggagattgaatgatatccttgaaatgaggaggattagtctgcgtcagatatcttatcttgtgctagatgaggcagatagaatgttggacatgggttttgaacctcagataaggaagattgtgaaagaaattcccactaagcgtcaaacccttatgtacacagctacatggccaaagggagttaggaaaattgcagctgacttgcttgttaaccctgctcaagtcaacattggcaatgttgacgagcttgtggctaacaagtcaatcacacagcatattgaagtggtagcaccaatggagaaacagaggaggttagagcagatcttgcggtctcaggaaccaggctcaaaggtgataatattctgctcaaccaaaaggatgtgtgatcaactaacacgcaatctaacccgccaatttggagctgctgctatacatggagacaagtcccagcctgagagagacaatgttcttaatcaattccgcagtggcagaactccggttcttgtagcaaccgatgttgctgctcgtggtctggacgttaaggacatcagggcggtcgtaaactatgatttccccaatggagtggaagactatgttcatagaatcggaagaacaggaagagctggagcgactggtcaggcattcacattctttggtgatcaagattcgaaacatgcttcggatctgatcaagattttggaaggagcaaaccagcgagttcctcctcagatccgcgaaatggctacacgtggtggtgggggaatgaacaaattcagtcgttggggacctccttccggcggccgtggtcgtggtggcgactctggttatggtggcagaggtagctttgcttcccgtgacagtagaagcagcaatggatggggaagagagcgagaaaggagccgtagccctgagagattcaacagagctccaccaccgtcttccaccggatctcctcctcgcagcttccacgagacgatgatgatgaaacacagatgaaaagagagatacaaagctctgataaagccaagtgacagaagattgtgttgtgggggatttcccttatcattgtgacattatatattttttggccgatgaagaaacaaaagaaaaaaaaacaagaccaagaagactgttccctcccattggaaatttacgctcaaaactacaattgatatcttacagtttgtatttcatctt

SEQ ID NO: 78047 - protein, 619 aa, Arabidopsis thaliana
  peptide (1)..(619): Ceres Seq. ID no. 12601238
  misc_feature (171)..(380): Pfam Name: DEAD/DEAH box helicase Pfam Description: DEAD/DEAH box helicase
  misc_feature (155)..(605): Homolog of NCBI NO: 15241445 NR Description: DRH1 DEAD box protein - like; protein id:
  misc_feature (1)..(172): Homolog of NCBI NO: 15241445 NR Description: DRH1 DEAD box protein - like; protein id:
  misc_feature (196)..(619): Homolog of NCBI NO: 23397305 NR Description: putative RNA helicase, DRH1 [Arabidopsis thaliana]
  misc_feature (4)..(601): Homolog of NCBI NO: 1169228 NR Description: RNA helicase-like protein DB10
  misc_feature (21)..(584): Homolog of NCBI NO: 6137207 NR Description: P72 DEAD box protein [Pisum sativum]
  misc_feature (115)..(580): Homolog of NCBI NO: 15528719 NR Description: putative RNA helicase, DRH1 [Oryza sativa
  misc_feature (1)..(59): Homolog of NCBI NO: 15528719 NR Description: putative RNA helicase, DRH1 [Oryza sativa
  misc_feature (1)..(619): Homolog of NCBI NO: 34913856 NR Description: putative RNA helicase, DRH1 [Oryza sativa
  misc_feature (101)..(584): Homolog of NCBI NO: 15230730 NR Description: putative RNA helicase; protein id: At3g06480.1 thaliana] >gi|6437557|gb|AAF08584.1|AC011623_17 putative RNA
  misc_feature (4)..(69): Homolog of NCBI NO: 15230730 NR Description: putative RNA helicase; protein id: At3g06480.1 thaliana] >gi|6437557|gb|AAF08584.1|AC011623_17 putative RNA
MAATAAASVVRYAPEDHTLPKPWKGLIDDRTGYLYFWNPETNVTQYEKPTPSLPPKFSPAVSVSSSVQVQQTDAYAPPKDDDKYSRGSERVSRFSEGGRSGPPYSNGAANGVGDSAYGAASTRVPLPSSAPASELSPEAYSRRHEITVSGGQVPPPLMSFEATGFPPELLREVLSAGFSAPTPIQAQSWPIAMQGRDIVAIAKTGSGKTLGYLIPGFLHLQRIRNDSRMGPTILVLSPTRELATQIQEEAVKFGRSSRISCTCLYGGAPKGPQLRDLERGADIVVATPGRLNDILEMRRISLRQISYLVLDEADRMLDMGFEPQIRKIVKEIPTKRQTLMYTATWPKGVRKIAADLLVNPAQVNIGNVDELVANKSITQHIEVVAPMEKQRRLEQILRSQEPGSKVIIFCSTKRMCDQLTRNLTRQFGAAAIHGDKSQPERDNVLNQFRSGRTPVLVATDVAARGLDVKDIRAVVNYDFPNGVEDYVHRIGRTGRAGATGQAFTFFGDQDSKHASDLIKILEGANQRVPPQIREMATRGGGGMNKFSRWGPPSGGRGRGGDSGYGGRGSFASRDSRSSNGWGRERERSRSPERFNRAPPPSSTGSPPRSFHETMMMKHR

SEQ ID NO: 78048 - protein, 462 aa, Arabidopsis thaliana
  peptide (1)..(462): Ceres Seq. ID no. 12601239
  misc_feature (14)..(223): Pfam Name: DEAD/DEAH box helicase Pfam Description: DEAD/DEAH box helicase
  misc_feature (1)..(448): Homolog of NCBI NO: 15241445 NR Description: DRH1 DEAD box protein - like; protein id:
  misc_feature (1)..(15): Homolog of NCBI NO: 15241445 NR Description: DRH1 DEAD box protein - like; protein id:
  misc_feature (39)..(462): Homolog of NCBI NO: 23397305 NR Description: putative RNA helicase, DRH1 [Arabidopsis thaliana]
  misc_feature (1)..(444): Homolog of NCBI NO: 1169228 NR Description: RNA helicase-like protein DB10
  misc_feature (1)..(427): Homolog of NCBI NO: 6137207 NR Description: P72 DEAD box protein [Pisum sativum]
  misc_feature (1)..(423): Homolog of NCBI NO: 15528719 NR Description: putative RNA helicase, DRH1 [Oryza sativa
  misc_feature (1)..(462): Homolog of NCBI NO: 34913856 NR Description: putative RNA helicase, DRH1 [Oryza sativa
  misc_feature (1)..(427): Homolog of NCBI NO: 15230730 NR Description: putative RNA helicase; protein id: At3g06480.1 thaliana] >gi|6437557|gb|AAF08584.1|AC011623_17 putative RNA
  misc_feature (1)..(436): Homolog of NCBI NO: 6137207 NR Description: P72 DEAD box protein [Pisum sativum]
  misc_feature (1)..(431): Homolog of NCBI NO: 6324217 NR Description: ATP-dependent RNA helicase of DEAD box family;
MSFEATGFPPELLREVLSAGFSAPTPIQAQSWPIAMQGRDIVAIAKTGSGKTLGYLIPGFLHLQRIRNDSRMGPTILVLSPTRELATQIQEEAVKFGRSSRISCTCLYGGAPKGPQLRDLERGADIVVATPGRLNDILEMRRISLRQISYLVLDEADRMLDMGFEPQIRKIVKEIPTKRQTLMYTATWPKGVRKIAADLLVNPAQVNIGNVDELVANKSITQHIEVVAPMEKQRRLEQILRSQEPGSKVIIFCSTKRMCDQLTRNLTRQFGAAAIHGDKSQPERDNVLNQFRSGRTPVLVATDVAARGLDVKDIRAVVNYDFPNGVEDYVHRIGRTGRAGATGQAFTFFGDQDSKHASDLIKILEGANQRVPPQIREMATRGGGGMNKFSRWGPPSGGRGRGGDSGYGGRGSFASRDSRSSNGWGRERERSRSPERFNRAPPPSSTGSPPRSFHETMMMKHR

SEQ ID NO: 78049 - protein, 427 aa, Arabidopsis thaliana
  peptide (1)..(427): Ceres Seq. ID no. 12601240
  misc_feature (1)..(188): Pfam Name: DEAD/DEAH box helicase Pfam Description: DEAD/DEAH box helicase
  misc_feature (1)..(413): Homolog of NCBI NO: 15241445 NR Description: DRH1 DEAD box protein - like; protein id:
  misc_feature (4)..(427): Homolog of NCBI NO: 23397305 NR Description: putative RNA helicase, DRH1 [Arabidopsis thaliana]
  misc_feature (1)..(409): Homolog of NCBI NO: 1169228 NR Description: RNA helicase-like protein DB10
  misc_feature (1)..(392): Homolog of NCBI NO: 6137207 NR Description: P72 DEAD box protein [Pisum sativum]
  misc_feature (1)..(388): Homolog of NCBI NO: 15528719 NR Description: putative RNA helicase, DRH1 [Oryza sativa
  misc_feature (1)..(427): Homolog of NCBI NO: 34913856 NR Description: putative RNA helicase, DRH1 [Oryza sativa
  misc_feature (1)..(392): Homolog of NCBI NO: 15230730 NR Description: putative RNA helicase; protein id: At3g06480.1 thaliana] >gi|6437557|gb|AAF08584.1|AC011623_17 putative RNA
  misc_feature (1)..(401): Homolog of NCBI NO: 6137207 NR Description: P72 DEAD box protein [Pisum sativum]
  misc_feature (1)..(396): Homolog of NCBI NO: 6324217 NR Description: ATP-dependent RNA helicase of DEAD box family;
  misc_feature (1)..(389): Homolog of NCBI NO: 10177293 NR Description: ATP-dependent RNA helicase-like protein
MQGRDIVAIAKTGSGKTLGYLIPGFLHLQRIRNDSRMGPTILVLSPTRELATQIQEEAVKFGRSSRISCTCLYGGAPKGPQLRDLERGADIVVATPGRLNDILEMRRISLRQISYLVLDEADRMLDMGFEPQIRKIVKEIPTKRQTLMYTATWPKGVRKIAADLLVNPAQVNIGNVDELVANKSITQHIEVVAPMEKQRRLEQILRSQEPGSKVIIFCSTKRMCDQLTRNLTRQFGAAAIHGDKSQPERDNVLNQFRSGRTPVLVATDVAARGLDVKDIRAVVNYDFPNGVEDYVHRIGRTGRAGATGQAFTFFGDQDSKHASDLIKILEGANQRVPPQIREMATRGGGGMNKFSRWGPPSGGRGRGGDSGYGGRGSFASRDSRSSNGWGRERERSRSPERFNRAPPPSSTGSPPRSFHETMMMKHR

SEQ ID NO: 78050 - DNA, 2638 bp, Arabidopsis thaliana
  misc_feature (1)..(2638): Ceres Seq. ID no. 12601269
  misc_feature: MA Experiment ID: 20000184 Result: Down-regulated in Transcription
  misc_feature: MA Experiment 20000184 PARAMETER Experiment Name: At_Shoots__P Parameter: Age (day) Value: 7
  misc_feature: MA Experiment 20000184 PARAMETER Experiment Name: At_Shoots__P Parameter: Tissue Value: Shoots vs. Whole Plant
agcttctctgattcgtctttctcctctgtctctgactcttcgcgaaaaccctaattagctttgtggtcttgttgttttcgccatggaagacgacggcaagagcagccccaagttaccgatccctggaaagagaaatatactaatcaccagtgctttgccttacgtcaacaacgttcctcatctcggaaacatcatcggatgtgttctgagcgctgatgtgtatgctagatactgtcgtctccgtggctataatgcgatttacatatgtggaaccgatgaatatgggactgcaactgagaccaaagctttggaggagaattgcacccccaaggaaatctgtgacaagtaccatgccattcataaagaagtttatgactggtttggtataagttttgacaagtttgggcgaacttcaactccagaacagactgaggtgtgccaagcaattttcaacaagttgtgggacaacaagtggctttcagagaacaccatgcagcagctttactgcgatacatgcaagaagttcttagctgaccggcttgttgagggttcttgtccgttcgaaggatgtaattatgattctgctcgtggagatcagtgcgaaaaatgtggaaagctcctgaatcctactgaacttaaagatccgaagtgcaaggtctgtcaaaacacaccccgaattcgcgacacagaccacctgtttattgagcttccgttactgaaagataggttggaagcgtatattaaaaagacctctgttactggatcttggagtcaaaatgctattcaaacgacaaatgcatggcttagggatgggcttagacagagatgcattacgagggatcttaagtggggagtgcctgtcccacatgagaaatacaaggacaaagtcttctatgtttggtttgatgctcctattggatacgtctcaataacgtcttgctacacatctgaatgggagaagtggtggaagaatcctgagaatgtggagctttatcagtttatggggaaagacaatgtgccatttcacactgtgatgtttccctctacccagcttggaactgaggaaaattggacactcatgaagacaatcagtgtgactgaatatttaaactatgaagacggaaagttctccaagagtaaaggtgttggagtgtttggtaatgatgtaaaagatacaaatatacctgtcgaagtgtggagatactacttgctgaccaacaggcctgaggtgtctgacacatcgttttcatggactgatttgcaagcaaaactgaatggcgagttgctgagcaacctaggcaactttgttaatcgagttctgagttttatagcaaagcctgataatgcaggttacgggtctgtcattcctgatgctcatgatgctgaatctcattctttaacaaaatcactggcggaaaaggttgaaaagtttgtggcagagtatgttgaagccatggaaaaggttaagctcaagcagggactgaaaactgctatgctgatttcaagcgaagggaactattacttgcaggcaagccaattttggaaactttacaaggaagataaacctttgtgtgcagttgttataagaactgctgctggtttagtacaccttcttgctcaattgttagaacctttcatgccatccttttcttgtgaggtatttaaacagctaaatttgcctccacaattttctctctccgacgagaggggagaggtattactagcaagtagaccatgggatattctgcctcctagccacaggataggcacccctcaacctttgttcaaggagttggaaaacgacgaagtggcacggtacagagaaaagtttgctggaagtcagtctgatagacgtgctagggatgaagcagcaaatttggcggatcaacttaataaaacaaaactttcagatgccaagaaacaaaaggcatcatcaaaaggcggaggaaaacccaaacctcaaccagctgctgatcgtgaaataactatggcaagacttgatatccgagttggtaaaattgtgaaggctgagaaacatcccaaggcagatgcattgtatgtagaagaaattgatgttgggggtggtgaaattcgcactgttgtcagtggactggtcaaatatatacctcttgaggaaatgcagaatcgtatggtttgtgttctttgcaacttgaaaccggcgaaaatgagggatattgtgtcacaagcaatggttcttgcagcttccagtagtgatggaagcaaggtggagttagttgagccccctaaaactgctaatattggagagcgagttacatttcccgggtttgaaggcgagccagacgatgtcttaaacccaaagaagaaagtatgggagacgcttttggttgatctaaacacaaaagagaatctagttgcttgctacaaagatgtgcccttcactacatctgcaggtgtatgcaaagtttcatccatcagcaatggcacgatccggtaaaagcttacttgagccataagcaaactaatattctccatttctatctttctctgtaagagaaacgaaattcggagattttcatttgaaaatttgattctaattacaaacatgttcttgtaaacttaaagcttggtacaattgttgttattgattgatgttgtg

SEQ ID NO: 78051 - protein, 797 aa, Arabidopsis thaliana
  peptide (1)..(797): Ceres Seq. ID no. 12601270
  misc_feature (9)..(389): Pfam Name: tRNA synthetases class I (I, L, M and V) Pfam Description: tRNA synthetases class I (I, L, M and V)
  misc_feature (11)..(608): Homolog of NCBI NO: 37534108 NR Description: putative methionyl-tRNA synthetase [Oryza sativa
  misc_feature (6)..(618): Homolog of NCBI NO: 17540794 NR Description: Methionyl tRNA Synthetase MRS-1 (101.7 kD) (mrs-1)
  misc_feature (609)..(778): Homolog of NCBI NO: 17540794 NR Description: Methionyl tRNA Synthetase MRS-1 (101.7 kD) (mrs-1)
  misc_feature (6)..(655): Homolog of NCBI NO: 14043022 NR Description: methionine-tRNA synthetase; methionine tRNA
  misc_feature (6)..(655): Homolog of NCBI NO: 15929104 NR Description: methionine-tRNA synthetase [Homo sapiens]
  misc_feature (6)..(655): Homolog of NCBI NO: 2135628 NR Description: methionine-tRNA ligase (EC 6.1.1.10) - human
  misc_feature (1)..(588): Homolog of NCBI NO: 34785759 NR Description: Unknown (protein for MGC:66122) [Danio rerio]
  misc_feature (11)..(589): Homolog of NCBI NO: 2257528 NR Description: methionyl-tRNA synthetase [Schizosaccharomyces
  misc_feature (11)..(589): Homolog of NCBI NO: 19112378 NR Description: putative methionyl-tRNA synthetase, similar to S. cerevisiae MES1 [Schizosaccharomyces pombe]
  misc_feature (11)..(737): Homolog of NCBI NO: 24655311 NR Description: CG15100-PA [Drosophila melanogaster]
MEDDGKSSPKLPIPGKRNILITSALPYVNNVPHLGNIIGCVLSADVYARYCRLRGYNAIYICGTDEYGTATETKALEENCTPKEICDKYHAIHKEVYDWFGISFDKFGRTSTPEQTEVCQAIFNKLWDNKWLSENTMQQLYCDTCKKFLADRLVEGSCPFEGCNYDSARGDQCEKCGKLLNPTELKDPKCKVCQNTPRIRDTDHLFIELPLLKDRLEAYIKKTSVTGSWSQNAIQTTNAWLRDGLRQRCITRDLKWGVPVPHEKYKDKVFYVWFDAPIGYVSITSCYTSEWEKWWKNPENVELYQFMGKDNVPFHTVMFPSTQLGTEENWTLMKTISVTEYLNYEDGKFSKSKGVGVFGNDVKDTNIPVEVWRYYLLTNRPEVSDTSFSWTDLQAKLNGELLSNLGNFVNRVLSFIAKPDNAGYGSVIPDAHDAESHSLTKSLAEKVEKFVAEYVEAMEKVKLKQGLKTAMLISSEGNYYLQASQFWKLYKEDKPLCAVVIRTAAGLVHLLAQLLEPFMPSFSCEVFKQLNLPPQFSLSDERGEVLLASRPWDILPPSHRIGTPQPLFKELENDEVARYREKFAGSQSDRRARDEAANLADQLNKTKLSDAKKQKASSKGGGKPKPQPAADREITMARLDIRVGKIVKAEKHPKADALYVEEIDVGGGEIRTVVSGLVKYIPLEEMQNRMVCVLCNLKPAKMRDIVSQAMVLAASSSDGSKVELVEPPKTANIGERVTFPGFEGEPDDVLNPKKKVWETLLVDLNTKENLVACYKDVPFTTSAGVCKVSSISNGTIR

SEQ ID NO: 78052 - protein, 661 aa, Arabidopsis thaliana
  peptide (1)..(661): Ceres Seq. ID no. 12601271
  misc_feature (1)..(253): Pfam Name: tRNA synthetases class I (I, L, M and V) Pfam Description: tRNA synthetases class I (I, L, M and V)
  misc_feature (1)..(472): Homolog of NCBI NO: 37534108 NR Description: putative methionyl-tRNA synthetase [Oryza sativa
  misc_feature (1)..(482): Homolog of NCBI NO: 17540794 NR Description: Methionyl tRNA Synthetase MRS-1 (101.7 kD) (mrs-1)
  misc_feature (473)..(642): Homolog of NCBI NO: 17540794 NR Description: Methionyl tRNA Synthetase MRS-1 (101.7 kD) (mrs-1)
  misc_feature (1)..(519): Homolog of NCBI NO: 14043022 NR Description: methionine-tRNA synthetase; methionine tRNA
  misc_feature (1)..(519): Homolog of NCBI NO: 15929104 NR Description: methionine-tRNA synthetase [Homo sapiens]
  misc_feature (1)..(519): Homolog of NCBI NO: 2135628 NR Description: methionine-tRNA ligase (EC 6.1.1.10) - human
  misc_feature (1)..(452): Homolog of NCBI NO: 34785759 NR Description: Unknown (protein for MGC:66122) [Danio rerio]
  misc_feature (1)..(453): Homolog of NCBI NO: 2257528 NR Description: methionyl-tRNA synthetase [Schizosaccharomyces
  misc_feature (1)..(453): Homolog of NCBI NO: 19112378 NR Description: putative methionyl-tRNA synthetase, similar to S. cerevisiae MES1 [Schizosaccharomyces pombe]
  misc_feature (1)..(601): Homolog of NCBI NO: 24655311 NR Description: CG15100-PA [Drosophila melanogaster]
MQQLYCDTCKKFLADRLVEGSCPFEGCNYDSARGDQCEKCGKLLNPTELKDPKCKVCQNTPRIRDTDHLFIELPLLKDRLEAYIKKTSVTGSWSQNAIQTTNAWLRDGLRQRCITRDLKWGVPVPHEKYKDKVFYVWFDAPIGYVSITSCYTSEWEKWWKNPENVELYQFMGKDNVPFHTVMFPSTQLGTEENWTLMKTISVTEYLNYEDGKFSKSKGVGVFGNDVKDTNIPVEVWRYYLLTNRPEVSDTSFSWTDLQAKLNGELLSNLGNFVNRVLSFIAKPDNAGYGSVIPDAHDAESHSLTKSLAEKVEKFVAEYVEAMEKVKLKQGLKTAMLISSEGNYYLQASQFWKLYKEDKPLCAVVIRTAAGLVHLLAQLLEPFMPSFSCEVFKQLNLPPQFSLSDERGEVLLASRPWDILPPSHRIGTPQPLFKELENDEVARYREKFAGSQSDRRARDEAANLADQLNKTKLSDAKKQKASSKGGGKPKPQPAADREITMARLDIRVGKIVKAEKHPKADALYVEEIDVGGGEIRTVVSGLVKYIPLEEMQNRMVCVLCNLKPAKMRDIVSQAMVLAASSSDGSKVELVEPPKTANIGERVTFPGFEGEPDDVLNPKKKVWETLLVDLNTKENLVACYKDVPFTTSAGVCKVSSISNGTIR

SEQ ID NO: 78053 - protein, 491 aa, Arabidopsis thaliana
  peptide (1)..(491): Ceres Seq. ID no. 12601272
  misc_feature (1)..(83): Pfam Name: tRNA synthetases class I (I, L, M and V) Pfam Description: tRNA synthetases class I (I, L, M and V)
  misc_feature (1)..(302): Homolog of NCBI NO: 37534108 NR Description: putative methionyl-tRNA synthetase [Oryza sativa
  misc_feature (1)..(312): Homolog of NCBI NO: 17540794 NR Description: Methionyl tRNA Synthetase MRS-1 (101.7 kD) (mrs-1)
  misc_feature (303)..(472): Homolog of NCBI NO: 17540794 NR Description: Methionyl tRNA Synthetase MRS-1 (101.7 kD) (mrs-1)
  misc_feature (1)..(349): Homolog of NCBI NO: 14043022 NR Description: methionine-tRNA synthetase; methionine tRNA
  misc_feature (1)..(349): Homolog of NCBI NO: 15929104 NR Description: methionine-tRNA synthetase [Homo sapiens]
  misc_feature (1)..(349): Homolog of NCBI NO: 2135628 NR Description: methionine-tRNA ligase (EC 6.1.1.10) - human
  misc_feature (1)..(282): Homolog of NCBI NO: 34785759 NR Description: Unknown (protein for MGC:66122) [Danio rerio]
  misc_feature (1)..(283): Homolog of NCBI NO: 2257528 NR Description: methionyl-tRNA synthetase [Schizosaccharomyces
  misc_feature (1)..(283): Homolog of NCBI NO: 19112378 NR Description: putative methionyl-tRNA synthetase, similar to S. cerevisiae MES1 [Schizosaccharomyces pombe]
  misc_feature (1)..(431): Homolog of NCBI NO: 24655311 NR Description: CG15100-PA [Drosophila melanogaster]
MGKDNVPFHTVMFPSTQLGTEENWTLMKTISVTEYLNYEDGKFSKSKGVGVFGNDVKDTNIPVEVWRYYLLTNRPEVSDTSFSWTDLQAKLNGELLSNLGNFVNRVLSFIAKPDNAGYGSVIPDAHDAESHSLTKSLAEKVEKFVAEYVEAMEKVKLKQGLKTAMLISSEGNYYLQASQFWKLYKEDKPLCAVVIRTAAGLVHLLAQLLEPFMPSFSCEVFKQLNLPPQFSLSDERGEVLLASRPWDILPPSHRIGTPQPLFKELENDEVARYREKFAGSQSDRRARDEAANLADQLNKTKLSDAKKQKASSKGGGKPKPQPAADREITMARLDIRVGKIVKAEKHPKADALYVEEIDVGGGEIRTVVSGLVKYIPLEEMQNRMVCVLCNLKPAKMRDIVSQAMVLAASSSDGSKVELVEPPKTANIGERVTFPGFEGEPDDVLNPKKKVWETLLVDLNTKENLVACYKDVPFTTSAGVCKVSSISNGTIR

SEQ ID NO: 78054 - DNA, 1266 bp, Arabidopsis thaliana
  misc_feature (1)..(1266): Ceres Seq. ID no. 12601362
  misc_feature: MA Experiment ID: 20000179 Result: Up-regulated in Transcription
  misc_feature: MA Experiment 20000179 PARAMETER Experiment Name: At_Germinating_Seeds_P Parameter: Age (hr) Value: 6 vs. 0
  misc_feature: MA Experiment 20000179 PARAMETER Experiment Name: At_Germinating_Seeds_P Parameter: Tissue Value: Germinating Seeds
  misc_feature: MA Experiment ID: 20000180 Result: Up-regulated in Transcription
  misc_feature: MA Experiment 20000180 PARAMETER Experiment Name: At_Germinating_Seeds_P Parameter: Age (hr) Value: 24 vs. 0
  misc_feature: MA Experiment 20000180 PARAMETER Experiment Name: At_Germinating_Seeds_P Parameter: Tissue Value: Germinating Seeds
  misc_feature: MA Experiment ID: 20000227 Result: Up-regulated in Transcription
  misc_feature: MA Experiment 20000227 PARAMETER Experiment Name: At_Root-Tips-vs-Tops_P Parameter: Tissue Value: Root Tips vs. Root Tops
  misc_feature: MA Experiment ID: 20000265 Result: Up-regulated in Transcription
  misc_feature: MA Experiment 20000265 PARAMETER Experiment Name: At_Open_Flower_P Parameter: Age (day) Value: 21
  misc_feature: MA Experiment 20000265 PARAMETER Experiment Name: At_Open_Flower_P Parameter: Plant Line Value: WS
  misc_feature: MA Experiment 20000265 PARAMETER Experiment Name: At_Open_Flower_P Parameter: Tissue Value: Closed Flower vs. Whole Plant
  misc_feature: MA Experiment ID: 20000794 Result: Down-regulated in Transcription
  misc_feature: MA Experiment 20000794 PARAMETER Experiment Name: At_Petals_P Parameter: Age (day) Value: 23-25 days
  misc_feature: MA Experiment 20000794 PARAMETER Experiment Name: At_Petals_P Parameter: Plant Line Value: WS
  misc_feature: MA Experiment 20000794 PARAMETER Experiment Name: At_Petals_P Parameter: Tissue Value: Petals vs. Whole plant
  misc_feature: MA Experiment ID: 20001911 Result: Down-regulated in Transcription
  misc_feature: MA Experiment 20001911 PARAMETER Experiment Name: At_Drought_Reproduction_P Parameter: Age (day) Value: 40
  misc_feature: MA Experiment 20001911 PARAMETER Experiment Name: At_Drought_Reproduction_P Parameter: Organism Value: A. thaliana
  misc_feature: MA Experiment 20001911 PARAMETER Experiment Name: At_Drought_Reproduction_P Parameter: Plant Line Value: WS
  misc_feature: MA Experiment 20001911 PARAMETER Experiment Name: At_Drought_Reproduction_P Parameter: Timepoint (day) Value: 10
  misc_feature: MA Experiment 20001911 PARAMETER Experiment Name: At_Drought_Reproduction_P Parameter: Tissue Value: Flowers
  misc_feature: MA Experiment 20001911 PARAMETER Experiment Name: At_Drought_Reproduction_P Parameter: Treatment Value: Drought vs. No Drought
aatcaggttccacatttggctttgcacaccttccttgatcctatcaatggcggatctgaaatcaaccttcctcgacgtttactctgttctcaagtctgatctgcttcaagatccttcctttgaattcacccacgaatctcgtcaatggcttgaacggatgcttgactacaatgtacgcggagggaagctaaatcgtggtctctctgtggttgatagctacaagctgttgaagcaaggtcaagacttgacggagaaagagactttcctctcatgtgctcttggttggtgcattgaatggcttcaagcttatttccttgtgcttgatgacatcatggacaactctgtcacacgccgtggccagccttgttggtttagaaagccaaaggttggtatgattgccattaacgatgggattctacttcgcaatcatatccacaggattctcaaaaagcacttcagggaaatgccttactatgttgacctcgttgatttgtttaacgaggtagagtttcaaacagcttgcggccagatgattgatttgatcaccacctttgatggagaaaaagatttgtctaagtactccttgcaaatccatcggcgtattgttgagtacaaaacagcttattactcattttatcttcctgttgcttgcgcattgctcatggcgggagaaaatttggaaaaccatactgatgtgaagactgttcttgttgacatgggaatttactttcaagtacaggatgattatctggactgttttgctgatcctgagacacttggcaagatagggacagacatagaagatttcaaatgctcctggttggtagttaaggcattggaacgctgcagtgaagaacaaactaagatactatacgagaactatggtaaagccgaaccatcaaacgttgctaaggtgaaagctctctacaaagagcttgatctcgagggagcgttcatggaatatgagaaggaaagctatgagaagctgacaaagttgatcgaagctcaccagagtaaagcaattcaagcagtgctaaaatctttcttggctaagatctacaagaggcagaagtagagacatactcgggcctctctccgttttattcttctgacatttatgtattggtgcatgacttcttttgccttagatcttatgttcccttccgaaaatagaatttgagattcttgttcatgcttatagtatagagacttagaaaatgtctatgtttcttttaatttctgaataaaaaatgtgcaatcagtgat

SEQ ID NO: 78055 - protein, 357 aa, Arabidopsis thaliana
  peptide (1)..(357): Ceres Seq. ID no. 12601363
  misc_feature (49)..(320): Pfam Name: Polyprenyl synthetase Pfam Description: Polyprenyl synthetase
  misc_feature (16)..(357): Homolog of NCBI NO: 15236002 NR Description: farnesyl pyrophosphate synthetase 2 (FPS2) diphosphate synthase 2); protein id: At4g17190.1, supported by gi_1146162, supported by cDNA: gi_18176349 [Arabidopsis
  misc_feature (18)..(357): Homolog of NCBI NO: 1146159 NR Description: farnesyl diphosphate synthase short form
  misc_feature (18)..(357): Homolog of NCBI NO: 15238801 NR Description: farnesyl pyrophosphate synthetase 1 (FPS1) diphosphate synthase 1); protein id: At5g47770.1, supported by gi_17104794, supported by cDNA: gi_1872499 [Arabidopsis
  misc_feature (18)..(357): Homolog of NCBI NO: 1076319 NR Description: farnesyl-pyrophosphate synthetase FPS1 - thaliana >gi|414611|emb|CAA53433.1| dimethylallyltransferase; pyrophosphate synthetase; geranyltranstransferase [Arabidopsis
  misc_feature (16)..(357): Homolog of NCBI NO: 7433992 NR Description: farnesyl-pyrophosphate synthetase - Para rubber >gi|22676905|gb|AAM98379.1| farnesyl diphosphate synthase [Hevea
  misc_feature (16)..(357): Homolog of NCBI NO: 20135548 NR Description: farnesyl pyrophosphate synthase [Malus x
  misc_feature (16)..(357): Homolog of NCBI NO: 1922251 NR Description: farnesyl pyrophosphate synthase [Gossypium
  misc_feature (16)..(357): Homolog of NCBI NO: 1346028 NR Description: Farnesyl pyrophosphate synthetase 1 (FPP
  misc_feature (16)..(357): Homolog of NCBI NO: 1346029 NR Description: Farnesyl pyrophosphate synthetase 2 (FPP
  misc_feature (16)..(357): Homolog of NCBI NO: 14573639 NR Description: farnesyldiphosphate synthase [x Citrofortunella
IRFHIWLCTPSLILSMADLKSTFLDVYSVLKSDLLQDPSFEFTHESRQWLERMLDYNVRGGKLNRGLSVVDSYKLLKQGQDLTEKETFLSCALGWCIEWLQAYFLVLDDIMDNSVTRRGQPCWFRKPKVGMIAINDGILLRNHIHRILKKHFREMPYYVDLVDLFNEVEFQTACGQMIDLITTFDGEKDLSKYSLQIHRRIVEYKTAYYSFYLPVACALLMAGENLENHTDVKTVLVDMGIYFQVQDDYLDCFADPETLGKIGTDIEDFKCSWLVVKALERCSEEQTKILYENYGKAEPSNVAKVKALYKELDLEGAFMEYEKESYEKLTKLIEAHQSKAIQAVLKSFLAKIYKRQK

SEQ ID NO: 78056 - protein, 342 aa, Arabidopsis thaliana
  peptide (1)..(342): Ceres Seq. ID no. 12601364
  misc_feature (34)..(305): Pfam Name: Polyprenyl synthetase Pfam Description: Polyprenyl synthetase
  misc_feature (1)..(342): Homolog of NCBI NO: 15236002 NR Description: farnesyl pyrophosphate synthetase 2 (FPS2) diphosphate synthase 2); protein id: At4g17190.1, supported by gi_1146162, supported by cDNA: gi_18176349 [Arabidopsis
  misc_feature (3)..(342): Homolog of NCBI NO: 1146159 NR Description: farnesyl diphosphate synthase short form
  misc_feature (3)..(342): Homolog of NCBI NO: 15238801 NR Description: farnesyl pyrophosphate synthetase 1 (FPS1) diphosphate synthase 1); protein id: At5g47770.1, supported by gi_17104794, supported by cDNA: gi_1872499 [Arabidopsis
  misc_feature (3)..(342): Homolog of NCBI NO: 1076319 NR Description: farnesyl-pyrophosphate synthetase FPS1 - thaliana >gi|414611|emb|CAA53433.1| dimethylallyltransferase; pyrophosphate synthetase; geranyltranstransferase [Arabidopsis
  misc_feature (1)..(342): Homolog of NCBI NO: 7433992 NR Description: farnesyl-pyrophosphate synthetase - Para rubber >gi|22676905|gb|AAM98379.1| farnesyl diphosphate synthase [Hevea
  misc_feature (1)..(342): Homolog of NCBI NO: 20135548 NR Description: farnesyl pyrophosphate synthase [Malus x
  misc_feature (1)..(342): Homolog of NCBI NO: 1922251 NR Description: farnesyl pyrophosphate synthase [Gossypium
  misc_feature (1)..(342): Homolog of NCBI NO: 1346028 NR Description: Farnesyl pyrophosphate synthetase 1 (FPP
  misc_feature (1)..(342): Homolog of NCBI NO: 1346029 NR Description: Farnesyl pyrophosphate synthetase 2 (FPP
  misc_feature (1)..(342): Homolog of NCBI NO: 14573639 NR Description: farnesyldiphosphate synthase [x Citrofortunella
MADLKSTFLDVYSVLKSDLLQDPSFEFTHESRQWLERMLDYNVRGGKLNRGLSVVDSYKLLKQGQDLTEKETFLSCALGWCIEWLQAYFLVLDDIMDNSVTRRGQPCWFRKPKVGMIAINDGILLRNHIHRILKKHFREMPYYVDLVDLFNEVEFQTACGQMIDLITTFDGEKDLSKYSLQIHRRIVEYKTAYYSFYLPVACALLMAGENLENHTDVKTVLVDMGIYFQVQDDYLDCFADPETLGKIGTDIEDFKCSWLVVKALERCSEEQTKILYENYGKAEPSNVAKVKALYKELDLEGAFMEYEKESYEKLTKLIEAHQSKAIQAVLKSFLAKIYKRQK

SEQ ID NO: 78057 - protein, 305 aa, Arabidopsis thaliana
  peptide (1)..(305): Ceres Seq. ID no. 12601365
  misc_feature (1)..(268): Pfam Name: Polyprenyl synthetase Pfam Description: Polyprenyl synthetase
  misc_feature (1)..(305): Homolog of NCBI NO: 15236002 NR Description: farnesyl pyrophosphate synthetase 2 (FPS2) diphosphate synthase 2); protein id: At4g17190.1, supported by gi_1146162, supported by cDNA: gi_18176349 [Arabidopsis
  misc_feature (1)..(305): Homolog of NCBI NO: 1146159 NR Description: farnesyl diphosphate synthase short form
  misc_feature (1)..(305): Homolog of NCBI NO: 15238801 NR Description: farnesyl pyrophosphate synthetase 1 (FPS1) diphosphate synthase 1); protein id: At5g47770.1, supported by gi_17104794, supported by cDNA: gi_1872499 [Arabidopsis
  misc_feature (1)..(305): Homolog of NCBI NO: 1076319 NR Description: farnesyl-pyrophosphate synthetase FPS1 - thaliana >gi|414611|emb|CAA53433.1| dimethylallyltransferase; pyrophosphate synthetase; geranyltranstransferase [Arabidopsis
  misc_feature (1)..(305): Homolog of NCBI NO: 7433992 NR Description: farnesyl-pyrophosphate synthetase - Para rubber >gi|22676905|gb|AAM98379.1| farnesyl diphosphate synthase [Hevea
  misc_feature (1)..(305): Homolog of NCBI NO: 20135548 NR Description: farnesyl pyrophosphate synthase [Malus x
  misc_feature (1)..(305): Homolog of NCBI NO: 1922251 NR Description: farnesyl pyrophosphate synthase [Gossypium
  misc_feature (1)..(305): Homolog of NCBI NO: 1346028 NR Description: Farnesyl pyrophosphate synthetase 1 (FPP
  misc_feature (1)..(305): Homolog of NCBI NO: 1346029 NR Description: Farnesyl pyrophosphate synthetase 2 (FPP
  misc_feature (1)..(305): Homolog of NCBI NO: 14573639 NR Description: farnesyldiphosphate synthase [x Citrofortunella
MLDYNVRGGKLNRGLSVVDSYKLLKQGQDLTEKETFLSCALGWCIEWLQAYFLVLDDIMDNSVTRRGQPCWFRKPKVGMIAINDGILLRNHIHRILKKHFREMPYYVDLVDLFNEVEFQTACGQMIDLITTFDGEKDLSKYSLQIHRRIVEYKTAYYSFYLPVACALLMAGENLENHTDVKTVLVDMGIYFQVQDDYLDCFADPETLGKIGTDIEDFKCSWLVVKALERCSEEQTKILYENYGKAEPSNVAKVKALYKELDLEGAFMEYEKESYEKLTKLIEAHQSKAIQAVLKSFLAKIYKRQK

SEQ ID NO: 78058 - DNA, 2048 bp, Arabidopsis thaliana
  misc_feature (1)..(2048): Ceres Seq. ID no. 12601663
  misc_feature: MA Experiment ID: 20000166 Result: Up-regulated in Transcription
  misc_feature: MA Experiment 20000166 PARAMETER Experiment Name: At_100uM_ABA_P Parameter: Age (day) Value: 14
  misc_feature: MA Experiment 20000166 PARAMETER Experiment Name: At_100uM_ABA_P Parameter: Organism Value: A. thaliana
  misc_feature: MA Experiment 20000166 PARAMETER Experiment Name: At_100uM_ABA_P Parameter: Plant Line Value: WS
  misc_feature: MA Experiment 20000166 PARAMETER Experiment Name: At_100uM_ABA_P Parameter: Timepoint (hr) Value: 1
  misc_feature: MA Experiment 20000166 PARAMETER Experiment Name: At_100uM_ABA_P Parameter: Tissue Value: Aerial
  misc_feature: MA Experiment 20000166 PARAMETER Experiment Name: At_100uM_ABA_P Parameter: Treatment Value: 100uM ABA vs. No Treatment
  misc_feature: MA Experiment ID: 20000169 Result: Up-regulated in Transcription
  misc_feature: MA Experiment 20000169 PARAMETER Experiment Name: At_100uM_ABA_P Parameter: Age (day) Value: 14
  misc_feature: MA Experiment 20000169 PARAMETER Experiment Name: At_100uM_ABA_P Parameter: Organism Value: A. thaliana
  misc_feature: MA Experiment 20000169 PARAMETER Experiment Name: At_100uM_ABA_P Parameter: Plant Line Value: WS
  misc_feature: MA Experiment 20000169 PARAMETER Experiment Name: At_100uM_ABA_P Parameter: Timepoint (hr) Value: 6
  misc_feature: MA Experiment 20000169 PARAMETER Experiment Name: At_100uM_ABA_P Parameter: Tissue Value: Aerial
  misc_feature: MA Experiment 20000169 PARAMETER Experiment Name: At_100uM_ABA_P Parameter: Treatment Value: 100uM ABA vs. No Treatment
  misc_feature: MA Experiment ID: 20000184 Result: Down-regulated in Transcription
  misc_feature: MA Experiment 20000184 PARAMETER Experiment Name: At_Shoots__P Parameter: Age (day) Value: 7
  misc_feature: MA Experiment 20000184 PARAMETER Experiment Name: At_Shoots__P Parameter: Tissue Value: Shoots vs. Whole Plant
  misc_feature: MA Experiment ID: 20000185 Result: Up-regulated in Transcription
  misc_feature: MA Experiment 20000185 PARAMETER Experiment Name: At_Roots__P Parameter: Age (day) Value: 7 vs. 21
  misc_feature: MA Experiment 20000185 PARAMETER Experiment Name: At_Roots__P Parameter: Organism Value: A. thaliana
  misc_feature: MA Experiment 20000185 PARAMETER Experiment Name: At_Roots__P Parameter: Tissue Value: Roots vs. Whole Plant
  misc_feature: MA Experiment ID: 20000439 Result: Up-regulated in Transcription
  misc_feature: MA Experiment 20000439 PARAMETER Experiment Name: At_Roots__P Parameter: Age (day) Value: 14 vs. 21
  misc_feature: MA Experiment 20000439 PARAMETER Experiment Name: At_Roots__P Parameter: Organism Value: A. thaliana
  misc_feature: MA Experiment 20000439 PARAMETER Experiment Name: At_Roots__P Parameter: Tissue Value: Roots vs. Whole Plant
  misc_feature: MA Experiment ID: 20001905 Result: Up-regulated in Transcription
  misc_feature: MA Experiment 20001905 PARAMETER Experiment Name: At_Drought_Reproduction_P Parameter: Age (day) Value: 40
  misc_feature: MA Experiment 20001905 PARAMETER Experiment Name: At_Drought_Reproduction_P Parameter: Organism Value: A. thaliana
  misc_feature: MA Experiment 20001905 PARAMETER Experiment Name: At_Drought_Reproduction_P Parameter: Plant Line Value: WS
  misc_feature: MA Experiment 20001905 PARAMETER Experiment Name: At_Drought_Reproduction_P Parameter: Timepoint (day) Value: 10
  misc_feature: MA Experiment 20001905 PARAMETER Experiment Name: At_Drought_Reproduction_P Parameter: Tissue Value: Rosettes
  misc_feature: MA Experiment 20001905 PARAMETER Experiment Name: At_Drought_Reproduction_P Parameter: Treatment Value: Drought vs. No Drought
atgtgggagtcaaatatatgttgtgatccgttaacttcaaagcaaattactgtttattcacagaagcttggacgcgtacggcttcgatttccttatatatatatattacacataaatctgccgtcttggagattggaaacatatctcaagcttcttcttcgtgttacgcactttcttcttcttcttctctctctctctttcttcttcgtcttcgatcacagaagacagaattcaatgtcgtcgacctacaagctcaatcacactgattcatttgcaaatggagatgcaaagagtttgttgccgaacccagagaatggtttcactcatttgacttcacttgctcaatcagagaaggctgttcaggagcttcttcttcaacagactcctatgcaggctactgacgaccatctcgttgagttctctgaggctttgagaactgttgcaaaggcactaaggggagctgctgaaggaaaggcgttggctcaagctgaggctgctgaatggaagcgtagatacgagttagagaggtctaagaacgtggagttgcagcataaagaactgtcaaatggagtgtgtgccgatgaatctaatggtcaaaggatggagcacttagcaaagtctccgcggctttatgctcaggaaatcagttctaatggcatggagactatttgctctcatgaagtgctccaagatggtggatttaacagttttaataacaaattgaagaggaaggcatcatttaaactttcatggggatgtaaggggatggctaatgatcaacacaaaaaagaaattgtttcgtttgagagagggaatatcagcacagcagagcgcagtagtaaacagatttcactgacatgggagtctgatccacaaactgtacttattatcactaagcctaattcaacttccgtgcgagttctctctgtggatatggtcagatggttgagaacgcaaaaaggactaaatatttatgtggaacctcgagtaaaggaagaactcttatcagaatcaagttccttcaacttcgtacaaacttgggaagatgacaaggaaatttcacttctacacacaaaggttgaccttcttataactcttggtggggatggcacagtgctatgggctgcatcgatgtttaaaggaccagtgcctccaattgttccattctccatgggatctcttggatttatgactccttttcacagcgaacaataccgagattgtcttgaagcgattttgaagggtcctatcagtataacactacgacacaggttgcagtgtcacatcatcagagataaagcaacacatgaatatgaaccagaggagactatgcttgttctgaatgaagtcaccattgaccgtggaatatcttcttacctcacaaaccttgaatgctactgtgacaactcattcgtcacatgtgtgcaaggcgatggacttatactgtctacaacatctggtagcaccgcgtattcacttgctgctggagggtcaatggtccatcctcaggttcctgggatcttattcacgcctatctgtccgcattctctatcattccgcccactaatattaccggaacacgtgacagtgagagtccaagtgccattcaacagcagaagctccgcttgggtctcctttgatgggaaagaccggaaacagcttgaagcaggggatgcactagtgtgtagcatggcaccatggcccgtctcaaccgcttgtcaagttgaatccactaacgacttcttacgcagcatccacgatggtcttcactggaacctaagaaagactcaatctgctgatggaccttagaaacaaattcctccagcttttttctctttcattcttaaccaataaccatatatagtctcgacgtctatctatctatctatatgcatatagataaatgtgaaatggaaagtgatgggttctgtgatagaatgtggtctgtatccattgttgtgtagagaatgtaataatgtagctgctatgacccataattctgttgatgtgataatcactcaaagttaatgaatcaaagatatttctgc

SEQ ID NO: 78059 - protein, 602 aa, Arabidopsis thaliana
  peptide (1)..(602): Ceres Seq. ID no. 12601664
  misc_feature (46)..(602): Homolog of NCBI NO: 20259322 NR Description: unknown protein [Arabidopsis thaliana]
  misc_feature (79)..(602): Homolog of NCBI NO: 39843359 NR Description: NADK1 [Arabidopsis thaliana]
  misc_feature (130)..(602): Homolog of NCBI NO: 11994267 NR Description: contains similarity to unknown
  misc_feature (402)..(602): Homolog of NCBI NO: 34905734 NR Description: putative inorganic polyphosphate/ATP-NAD kinase
  misc_feature (112)..(282): Homolog of NCBI NO: 34905734 NR Description: putative inorganic polyphosphate/ATP-NAD kinase
  misc_feature (350)..(374): Homolog of NCBI NO: 34905734 NR Description: putative inorganic polyphosphate/ATP-NAD kinase
  misc_feature (285)..(597): Homolog of NCBI NO: 31201153 NR Description: ENSANGP00000012587 [Anopheles gambiae]
  misc_feature (285)..(597): Homolog of NCBI NO: 28573826 NR Description: CG33156-PC [Drosophila melanogaster]
  misc_feature (285)..(597): Homolog of NCBI NO: 28573832 NR Description: CG33156-PB [Drosophila melanogaster]
  misc_feature (285)..(597): Homolog of NCBI NO: 28573830 NR Description: CG33156-PE [Drosophila melanogaster]
MWESNICCDPLTSKQITVYSQKLGRVRLRFPYIYILHINLPSWRLETYLKLLLRVTHFLLLLLSLSFFFVFDHRRQNSMSSTYKLNHTDSFANGDAKSLLPNPENGFTHLTSLAQSEKAVQELLLQQTPMQATDDHLVEFSEALRTVAKALRGAAEGKALAQAEAAEWKRRYELERSKNVELQHKELSNGVCADESNGQRMEHLAKSPRLYAQEISSNGMETICSHEVLQDGGFNSFNNKLKRKASFKLSWGCKGMANDQHKKEIVSFERGNISTAERSSKQISLTWESDPQTVLIITKPNSTSVRVLSVDMVRWLRTQKGLNIYVEPRVKEELLSESSSFNFVQTWEDDKEISLLHTKVDLLITLGGDGTVLWAASMFKGPVPPIVPFSMGSLGFMTPFHSEQYRDCLEAILKGPISITLRHRLQCHIIRDKATHEYEPEETMLVLNEVTIDRGISSYLTNLECYCDNSFVTCVQGDGLILSTTSGSTAYSLAAGGSMVHPQVPGILFTPICPHSLSFRPLILPEHVTVRVQVPFNSRSSAWVSFDGKDRKQLEAGDALVCSMAPWPVSTACQVESTNDFLRSIHDGLHWNLRKTQSADGP

SEQ ID NO: 78060 - protein, 524 aa, Arabidopsis thaliana; identical to SEQ ID NO: 48902
  peptide (1)..(524): Ceres Seq. ID no. 12601665
  misc_feature (1)..(524): Homolog of NCBI NO: 20259322 NR Description: unknown protein [Arabidopsis thaliana]
  misc_feature (1)..(524): Homolog of NCBI NO: 39843359 NR Description: NADK1 [Arabidopsis thaliana]
  misc_feature (52)..(524): Homolog of NCBI NO: 11994267 NR Description: contains similarity to unknown
  misc_feature (324)..(524): Homolog of NCBI NO: 34905734 NR Description: putative inorganic polyphosphate/ATP-NAD kinase
  misc_feature (34)..(204): Homolog of NCBI NO: 34905734 NR Description: putative inorganic polyphosphate/ATP-NAD kinase
  misc_feature (272)..(296): Homolog of NCBI NO: 34905734 NR Description: putative inorganic polyphosphate/ATP-NAD kinase
  misc_feature (207)..(519): Homolog of NCBI NO: 31201153 NR Description: ENSANGP00000012587 [Anopheles gambiae]
  misc_feature (207)..(519): Homolog of NCBI NO: 28573826 NR Description: CG33156-PC [Drosophila melanogaster]
  misc_feature (207)..(519): Homolog of NCBI NO: 28573828 NR Description: CG33156-PA [Drosophila melanogaster]
  misc_feature (207)..(519): Homolog of NCBI NO: 28573832 NR Description: CG33156-PB [Drosophila melanogaster]

SEQ ID NO: 78061 - protein, 473 aa, Arabidopsis thaliana; identical to SEQ ID NO: 48903
  peptide (1)..(473): Ceres Seq. ID no. 12601666
  misc_feature (1)..(473): Homolog of NCBI NO: 20259322 NR Description: unknown protein [Arabidopsis thaliana]
  misc_feature (1)..(473): Homolog of NCBI NO: 39843359 NR Description: NADK1 [Arabidopsis thaliana]
  misc_feature (1)..(473): Homolog of NCBI NO: 11994267 NR Description: contains similarity to unknown
  misc_feature (273)..(473): Homolog of NCBI NO: 34905734 NR Description: putative inorganic polyphosphate/ATP-NAD kinase
  misc_feature (1)..(153): Homolog of NCBI NO: 34905734 NR Description: putative inorganic polyphosphate/ATP-NAD kinase
  misc_feature (221)..(245): Homolog of NCBI NO: 34905734 NR Description: putative inorganic polyphosphate/ATP-NAD kinase
  misc_feature (156)..(468): Homolog of NCBI NO: 31201153 NR Description: ENSANGP00000012587 [Anopheles gambiae]
  misc_feature (156)..(468): Homolog of NCBI NO: 28573826 NR Description: CG33156-PC [Drosophila melanogaster]
  misc_feature (156)..(468): Homolog of NCBI NO: 28573828 NR Description: CG33156-PA [Drosophila melanogaster]
  misc_feature (156)..(468): Homolog of NCBI NO: 28573830 NR Description: CG33156-PE [Drosophila melanogaster]

SEQ ID NO: 78062 - DNA, 1395 bp, Arabidopsis thaliana
  misc_feature (1)..(1395): Ceres Seq. ID no. 12602443
  misc_feature: MA Experiment ID: 108434 Result: Down-regulated in Transcription
  misc_feature: MA Experiment 108434 PARAMETER Experiment Name: At_Root_Tips_cDNA_P Parameter: Tissue Value: Root Tips
  misc_feature: MA Experiment ID: 108464 Result: Up-regulated in Transcription
  misc_feature: MA Experiment 108464 PARAMETER Experiment Name: At_Germinating_Seeds_cDNA_P Parameter: Age (day) Value: 4 vs. 0
  misc_feature: MA Experiment 108464 PARAMETER Experiment Name: At_Germinating_Seeds_cDNA_P Parameter: Tissue Value: Germinating Seeds
  misc_feature: MA Experiment ID: 108574 Result: Up-regulated in Transcription
  misc_feature: MA Experiment 108574 PARAMETER Experiment Name: At_Wounding__cDNA_P Parameter: Timepoint (hr) Value: 1
  misc_feature: MA Experiment 108574 PARAMETER Experiment Name: At_Wounding__cDNA_P Parameter: Tissue Value: Aerial
  misc_feature: MA Experiment 108574 PARAMETER Experiment Name: At_Wounding__cDNA_P Parameter: Treatment Value: Wounding vs. No Wounding
  misc_feature: MA Experiment ID: 108595 Result: Up-regulated in Transcription
  misc_feature: MA Experiment 108595 PARAMETER Experiment Name: At_Ler-pi_Ovule_cDNA_P Parameter: Plant Line Value: null
accaagttcatacatggtacaaagctttagcaagttgtcgaatttcatcctacaattgaattttctctttactatttcaaagtttgaatgctcctctgttttcttcgttggttcattgagaaaaaaggaacagactttttacttgtgccattgaccaagaaccacaaagaggaggaaatcaaatggtttttgggagtttgatggattgattgattattcagcaaatcccacagaagaaatcagaagctgcttcttattttttggtcacgaccagtcttaatcaaagtagttcgtctcctacttgttattaaaagtgtatatttctgttgggagtttctgttctcctaccacctcattgacctttaatgatggactcatagtttggtgccaagtgacccaaaaaaaaaaaaaaaaaagtcgatcttgaagatttcatactttttctggcaattctgtttggtttcagaggaaggagtcaaaacaatggggatcgtttcagaagaagccattgatgaattccaagagctgatggatcaagttgaggagccactgaagaaaacttatgagagagtccatcagggatatctaagggagaatttgggtcgttttctgaaagcacgagactggaacgtatgcaaagctcacacaatgctggttgagtgtttgcgttggagggtggataatgaaattgacagtatcctatctaaaccaattgttcctactgagttgtatagggatgtacgagattctcaactcataggaatgtcaggttacaccaaagagggcttgccggtctttgctattggcgtcggcctcagcacatttgacaaagcttctgttcactactatgtccaatctcacatacaaatcaatgaatatagagaccgtgttttactgccttctatttctaagaagaatgggaggccaatcaccacctgcgtcaaggttctagacatgacggggttgaagctttcagctctaagccaaatcaagttagtgactatcatatcgaccattgatgatctcaactatccagagaagacaaacacgtactatgttgtgaacgctccatatatattttccgcatgttggaagggttgtaaaacctcttttacaagagaggacaaggaaaaaagttcatgtcttatccggttgcggaagggatgaattattgaagtgaatgcttctgagggaattccttcagtgcctccacaactgagatatatattttacaggtgagctagcaattcaaatgagtaagggagtactgagctgtgtccgctccctagccatgcaaatgtaaagcgaaaagaagagaataaatcttgaactgaatgcacttctggttttatgtatagtattatttgatcctctaatgtagcaaatttatttgtg

SEQ ID NO: 78063 - protein, 227 aa, Arabidopsis thaliana
  peptide (1)..(227): Ceres Seq. ID no. 12602444
  misc_feature (135)..(217): Pfam Name: CRAL/TRIO domain Pfam Description: CRAL/TRIO domain
  misc_feature (1)..(217): Homolog of NCBI NO: 15238794 NR Description: putative protein; protein id: At5g47730.1 thaliana] >gi|10177909|dbj|BAB11320.1|
  misc_feature (1)..(227): Homolog of NCBI NO: 14532536 NR Description: AT5g47730/MCA23_5 [Arabidopsis thaliana]
MGIVSEEAIDEFQELMDQVEEPLKKTYERVHQGYLRENLGRFLKARDWNVCKAHTMLVECLRWRVDNEIDSILSKPIVPTELYRDVRDSQLIGMSGYTKEGLPVFAIGVGLSTFDKASVHYYVQSHIQINEYRDRVLLPSISKKNGRPITTCVKVLDMTGLKLSALSQIKLVTIISTIDDLNYPEKTNTYYVVNAPYIFSACWKGCKTSFTREDKEKSSCLIRLRKG

SEQ ID NO: 78064 - protein, 212 aa, Arabidopsis thaliana
  peptide (1)..(212): Ceres Seq. ID no. 12602445
  misc_feature (120)..(202): Pfam Name: CRAL/TRIO domain Pfam Description: CRAL/TRIO domain
  misc_feature (1)..(202): Homolog of NCBI NO: 15238794 NR Description: putative protein; protein id: At5g47730.1 thaliana] >gi|10177909|dbj|BAB11320.1|
  misc_feature (1)..(212): Homolog of NCBI NO: 14532536 NR Description: AT5g47730/MCA23_5 [Arabidopsis thaliana]
MDQVEEPLKKTYERVHQGYLRENLGRFLKARDWNVCKAHTMLVECLRWRVDNEIDSILSKPIVPTELYRDVRDSQLIGMSGYTKEGLPVFAIGVGLSTFDKASVHYYVQSHIQINEYRDRVLLPSISKKNGRPITTCVKVLDMTGLKLSALSQIKLVTIISTIDDLNYPEKTNTYYVVNAPYIFSACWKGCKTSFTREDKEKSSCLIRLRKG

SEQ ID NO: 78065 - protein, 172 aa, Arabidopsis thaliana
  peptide (1)..(172): Ceres Seq. ID no. 12602446
  misc_feature (80)..(162): Pfam Name: CRAL/TRIO domain Pfam Description: CRAL/TRIO domain
  misc_feature (1)..(162): Homolog of NCBI NO: 15238794 NR Description: putative protein; protein id: At5g47730.1 thaliana] >gi|10177909|dbj|BAB11320.1|
  misc_feature (1)..(172): Homolog of NCBI NO: 14532536 NR Description: AT5g47730/MCA23_5 [Arabidopsis thaliana]
MLVECLRWRVDNEIDSILSKPIVPTELYRDVRDSQLIGMSGYTKEGLPVFAIGVGLSTFDKASVHYYVQSHIQINEYRDRVLLPSISKKNGRPITTCVKVLDMTGLKLSALSQIKLVTIISTIDDLNYPEKTNTYYVVNAPYIFSACWKGCKTSFTREDKEKSSCLIRLRKG

SEQ ID NO: 78066 - DNA, 2864 bp, Arabidopsis thaliana
  misc_feature (1)..(2864): Ceres Seq. ID no. 12602467
  misc_feature: MA Experiment ID: 20000171 Result: Up-regulated in Transcription
  misc_feature: MA Experiment 20000171 PARAMETER Experiment Name: At_42deg_Heat_P Parameter: Age (day) Value: 14
  misc_feature: MA Experiment 20000171 PARAMETER Experiment Name: At_42deg_Heat_P Parameter: Organism Value: A. thaliana
  misc_feature: MA Experiment 20000171 PARAMETER Experiment Name: At_42deg_Heat_P Parameter: Plant Line Value: WS
  misc_feature: MA Experiment 20000171 PARAMETER Experiment Name: At_42deg_Heat_P Parameter: Temperature (deg C) Value: 42 vs. 22
  misc_feature: MA Experiment 20000171 PARAMETER Experiment Name: At_42deg_Heat_P Parameter: Timepoint (hr) Value: 1
  misc_feature: MA Experiment 20000171 PARAMETER Experiment Name: At_42deg_Heat_P Parameter: Tissue Value: Aerial
  misc_feature: MA Experiment ID: 20000173 Result: Up-regulated in Transcription
  misc_feature: MA Experiment 20000173 PARAMETER Experiment Name: At_42deg_Heat_P Parameter: Age (day) Value: 14
  misc_feature: MA Experiment 20000173 PARAMETER Experiment Name: At_42deg_Heat_P Parameter: Organism Value: A. thaliana
  misc_feature: MA Experiment 20000173 PARAMETER Experiment Name: At_42deg_Heat_P Parameter: Plant Line Value: WS
  misc_feature: MA Experiment 20000173 PARAMETER Experiment Name: At_42deg_Heat_P Parameter: Temperature (deg C) Value: 42 vs. 22
  misc_feature: MA Experiment 20000173 PARAMETER Experiment Name: At_42deg_Heat_P Parameter: Timepoint (hr) Value: 6
  misc_feature: MA Experiment 20000173 PARAMETER Experiment Name: At_42deg_Heat_P Parameter: Tissue Value: Aerial
  misc_feature: MA Experiment ID: 20000495 Result: Down-regulated in Transcription
  misc_feature: MA Experiment 20000495 PARAMETER Experiment Name: At_Guard_Cells_P Parameter: Harvest Date Value: 8/2/2002
  misc_feature: MA Experiment 20000495 PARAMETER Experiment Name: At_Guard_Cells_P Parameter: Organism Value: A. thaliana
  misc_feature: MA Experiment 20000495 PARAMETER Experiment Name: At_Guard_Cells_P Parameter: Tissue Value: Guard Cells vs. Leaves
  misc_feature: MA Experiment ID: 20001451 Result: Down-regulated in Transcription
  misc_feature: MA Experiment 20001451 PARAMETER Experiment Name: At_Far-red-induction_P Parameter: Age (day) Value: 7
  misc_feature: MA Experiment 20001451 PARAMETER Experiment Name: At_Far-red-induction_P Parameter: Light Value: Far-red vs. White
  misc_feature: MA Experiment 20001451 PARAMETER Experiment Name: At_Far-red-induction_P Parameter: Organism Value: A. thaliana
  misc_feature: MA Experiment 20001451 PARAMETER Experiment Name: At_Far-red-induction_P Parameter: Plant Line Value: Columbia
  misc_feature: MA Experiment 20001451 PARAMETER Experiment Name: At_Far-red-induction_P Parameter: Timepoint (hr) Value: 24
  misc_feature: MA Experiment 20001451 PARAMETER Experiment Name: At_Far-red-induction_P Parameter: Tissue Value: Whole Plant
  misc_feature: MA Experiment ID: 20001557 Result: Up-regulated in Transcription
  misc_feature: MA Experiment 20001557 PARAMETER Experiment Name: At_Drought_Soil_Dry_P Parameter: Age (day) Value: 27
  misc_feature: MA Experiment 20001557 PARAMETER Experiment Name: At_Drought_Soil_Dry_P Parameter: Organism Value: A. thaliana
  misc_feature: MA Experiment 20001557 PARAMETER Experiment Name: At_Drought_Soil_Dry_P Parameter: Plant Line Value: WS
  misc_feature: MA Experiment 20001557 PARAMETER Experiment Name: At_Drought_Soil_Dry_P Parameter: Post Timepoint (hr) Value: 3
  misc_feature: MA Experiment 20001557 PARAMETER Experiment Name: At_Drought_Soil_Dry_P Parameter: Post-Treatment Value: Re-Water vs. No Drought
  misc_feature: MA Experiment 20001557 PARAMETER Experiment Name: At_Drought_Soil_Dry_P Parameter: Timepoint (day) Value: 13
  misc_feature: MA Experiment 20001557 PARAMETER Experiment Name: At_Drought_Soil_Dry_P Parameter: Treatment Value: Drought vs. No Drought
cttacgacaacctctcctgctcttcgttttctctctacgacgataaaacccagatttgggttcaagcttccataactttaaacccctctcgcgatccaggttgctatcaaatacttgggagcccccagtattattgaataacacagcctgacaatgagtgtagtcgggtttgattttggaaacgagaattgccttgttgccgttgcgaggcaaagaggtatcgacgtcgtgcttaatgatgagtccaatcgtgagactcctgctattgtctgcttcggtgacaagcagcgcttcatcggcactgctggagctgcttctaccatgatgaaccctaaaaactccatctctcaaattaagcgcttaattggtcgccagttttccgaccctgagcttcaaagggatatcaaatcccttcccttttctgtcaccgaaggccctgatggctatcctttgatacatgctaattatttgggagagaagcgagcctttaccccgactcaagtcatgggcatgatgttgtctaacctgaaaggtattgccgagaagaatttgaatacagctgttgtcgactgctgtattggtattcctgtttactttaccgacctccagcgtagggctgttctcgatgctgccactattgctggcttgcatcccttgcgcttgatccacgagactacagctacggctttggcatatggtatttataagacagatttgccagagagtgaccagctcaatgttgcattcattgacattggacacgcaagcatgcaagtctgtattgcaggctttaaaaaaggacagctcaaaatcttgtctcacgctttcgatcgctcccttgggggaagggactttgatgaagttcttttcaatcattttgctgctaagttcaaggacgagtacaagattgacgtctcccagaatgctaaggcttctctcaggctccgtgctacatgcgagaaactgaaaaaggttctaagcgctaatcctctggcaccgttgaatatcgagtgtttgatggatgagaaagatgttaggggtgtcatcaagagggaagagtttgaagagatcagcatcccgattttggagcgtgtaaagaggcctctagagaaagctctctctgatgcaggcctcactgttgaagatgtacatatggttgaggttattggctctggctctcgtgtccctgctatgatcaagattctaactgagttttttggtaaggagcccaggcggacaatgaatgcaagtgagtgtgtgtcaaggggatgtgccttgcagtgtgccattctcagtccgacctttaaagttcgcgaattccaggttcatgagagcttccctttctcaatttctctcgcttggaaaggagcagcttctgaagctcaaaatggaggagctgagaatcagcagagcaccattgtttttcccaaaggaaatcccattcctagtgtcaaggctctaacgttttatcgttctggaacattctctgttgatgtgcagtacagtgatgtgaacgatttgcaagcacctccaaaaatcagcacatacacgattggtccgttccagtcatcaaaaggcgagagggcaaagcttaaagtgaaagtgagattgaaccttcatggaatcgtctcagttgaatctgcaactcttttggaagaggaagaagttgaagttccggtcacaaaagaacattcagaggaaactactaagatggactctgacaaagcttctgctgaggcagctcctgcttctggagactgtgatgtaaacatgcaggacgccaaagacaccagtgatgcaactggtactgacaatggtgttccagagtctgctgagaagccggtgcaaatggaaactgattcaaaggctgaggctccaaagaagaaggtgaagaaaacaaatgtaccactgtctgaattggtctatggtgccttgaaaactgtggaggtcgaaaaggcagtggagaaggaatttgagatggctttgcaagacagagttatggaagagaccaaggaccggaagaatgctgttgagtcttatgtttatgatatgcggaacaaactgagtgacaaataccaggaatatatcactgactcggagagggaagcattcctggcgaatctgcaggaagttgaggattggttgtatgaagatggggaagatgagaccaaaggtgtttatgttgcgaagctcgaggagctcaagaaggtgggtgaccctgttgaagtgcgttacaaggagtcattggaaagagggtcggtcattgatcagcttggttactgtattaacagctacagagaggcagctatgtctactgatcccaagtttgatcacattgaattggcagagaagcaaaaggttttgaacgagtgtgtggaagcagaagcatggctgcggggaaagcagcagcagcaggacacacttcccaagtatgccacaccggctctcttgtcagctgacgttaaaagcaaggcagaggcattggacaagttttgcaggcctataatgaccaaaccaaagccggtggctaaagcagaggcaccacaagccaagggaggtgagcaggcggatgagggcaagagtgagccagagcaaccagcttctgccgaaccaatggagactgagaatcccgcggaaggtagtacctaaatgaatgacgagagagagatggtgttgtatcgattttgttcttaactctttttgatttacctagtggaacctctttttctggtttcgctattattcccggaaaaaatctatattgttaattcttccttttcgaaaacaatttttaggaagcatcttttttcttattgttccttgtggttttgtttttaatttgaaagtcattttttctgctcctc

SEQ ID NO: 78067 - protein, 831 aa, Arabidopsis thaliana
  peptide (1)..(831): Ceres Seq. ID no. 12602468
  misc_feature (1)..(831): Homolog of NCBI NO: 34856875 NR Description: similar to osmotic stress protein [Rattus
  misc_feature (1)..(831): Homolog of NCBI NO: 39645395 NR Description: Unknown (protein for MGC:76295) [Silurana
  misc_feature (1)..(831): Homolog of NCBI NO: 28856138 NR Description: Similar to heat shock protein 4 [Danio rerio]
  misc_feature (1)..(831): Homolog of NCBI NO: 40254361 NR Description: osmotic stress protein; osmotic stress protein 94 [Mus musculus] >gi|31077176|sp|P48722|OS94_MOUSE Osmotic stress
  misc_feature (1)..(831): Homolog of NCBI NO: 1098541 NR Description: osmotic stress protein 94
  misc_feature (1)..(825): Homolog of NCBI NO: 40788905 NR Description: KIAA0201 [Homo sapiens]
  misc_feature (2)..(626): Homolog of NCBI NO: 7441858 NR Description: heat shock protein 70 - fission yeast pombe) >gi|3090716|gb|AAC18441.1| Pss1 [Schizosaccharomyces
  misc_feature (2)..(626): Homolog of NCBI NO: 12230134 NR Description: HEAT SHOCK PROTEIN HOMOLOG PSS1
  misc_feature (1)..(701): Homolog of NCBI NO: 40747009 NR Description: hypothetical protein AN1047.2 [Aspergillus
  misc_feature (1)..(695): Homolog of NCBI NO: 39591675 NR Description: Hypothetical protein CBG18133 [Caenorhabditis
MSVVGFDFGNENCLVAVARQRGIDVVLNDESNRETPAIVCFGDKQRFIGTAGAASTMMNPKNSISQIKRLIGRQFSDPELQRDIKSLPFSVTEGPDGYPLIHANYLGEKRAFTPTQVMGMMLSNLKGIAEKNLNTAVVDCCIGIPVYFTDLQRRAVLDAATIAGLHPLRLIHETTATALAYGIYKTDLPESDQLNVAFIDIGHASMQVCIAGFKKGQLKILSHAFDRSLGGRDFDEVLFNHFAAKFKDEYKIDVSQNAKASLRLRATCEKLKKVLSANPLAPLNIECLMDEKDVRGVIKREEFEEISIPILERVKRPLEKALSDAGLTVEDVHMVEVIGSGSRVPAMIKILTEFFGKEPRRTMNASECVSRGCALQCAILSPTFKVREFQVHESFPFSISLAWKGAASEAQNGGAENQQSTIVFPKGNPIPSVKALTFYRSGTFSVDVQYSDVNDLQAPPKISTYTIGPFQSSKGERAKLKVKVRLNLHGIVSVESATLLEEEEVEVPVTKEHSEETTKMDSDKASAEAAPASGDCDVNMQDAKDTSDATGTDNGVPESAEKPVQMETDSKAEAPKKKVKKTNVPLSELVYGALKTVEVEKAVEKEFEMALQDRVMEETKDRKNAVESYVYDMRNKLSDKYQEYITDSEREAFLANLQEVEDWLYEDGEDETKGVYVAKLEELKKVGDPVEVRYKESLERGSVIDQLGYCINSYREAAMSTDPKFDHIELAEKQKVLNECVEAEAWLRGKQQQQDTLPKYATPALLSADVKSKAEALDKFCRPIMTKPKPVAKAEAPQAKGGEQADEGKSEPEQPASAEPMETENPAEGST

SEQ ID NO: 78068 - protein, 775 aa, Arabidopsis thaliana
  peptide (1)..(775): Ceres Seq. ID no. 12602469
  misc_feature (1)..(775): Homolog of NCBI NO: 34856875 NR Description: similar to osmotic stress protein [Rattus
  misc_feature (1)..(775): Homolog of NCBI NO: 39645395 NR Description: Unknown (protein for MGC:76295) [Silurana
  misc_feature (1)..(775): Homolog of NCBI NO: 28856138 NR Description: Similar to heat shock protein 4 [Danio rerio]
  misc_feature (1)..(775): Homolog of NCBI NO: 40254361 NR Description: osmotic stress protein; osmotic stress protein 94 [Mus musculus] >gi|31077176|sp|P48722|OS94_MOUSE Osmotic stress
  misc_feature (1)..(775): Homolog of NCBI NO: 1098541 NR Description: osmotic stress protein 94
  misc_feature (1)..(769): Homolog of NCBI NO: 40788905 NR Description: KIAA0201 [Homo sapiens]
  misc_feature (1)..(570): Homolog of NCBI NO: 7441858 NR Description: heat shock protein 70 - fission yeast pombe) >gi|3090716|gb|AAC18441.1| Pss1 [Schizosaccharomyces
  misc_feature (1)..(570): Homolog of NCBI NO: 12230134 NR Description: HEAT SHOCK PROTEIN HOMOLOG PSS1
  misc_feature (1)..(645): Homolog of NCBI NO: 40747009 NR Description: hypothetical protein AN1047.2 [Aspergillus
  misc_feature (1)..(639): Homolog of NCBI NO: 39591675 NR Description: Hypothetical protein CBG18133 [Caenorhabditis
MMNPKNSISQIKRLIGRQFSDPELQRDIKSLPFSVTEGPDGYPLIHANYLGEKRAFTPTQVMGMMLSNLKGIAEKNLNTAVVDCCIGIPVYFTDLQRRAVLDAATIAGLHPLRLIHETTATALAYGIYKTDLPESDQLNVAFIDIGHASMQVCIAGFKKGQLKILSHAFDRSLGGRDFDEVLFNHFAAKFKDEYKIDVSQNAKASLRLRATCEKLKKVLSANPLAPLNIECLMDEKDVRGVIKREEFEEISIPILERVKRPLEKALSDAGLTVEDVHMVEVIGSGSRVPAMIKILTEFFGKEPRRTMNASECVSRGCALQCAILSPTFKVREFQVHESFPFSISLAWKGAASEAQNGGAENQQSTIVFPKGNPIPSVKALTFYRSGTFSVDVQYSDVNDLQAPPKISTYTIGPFQSSKGERAKLKVKVRLNLHGIVSVESATLLEEEEVEVPVTKEHSEETTKMDSDKASAEAAPASGDCDVNMQDAKDTSDATGTDNGVPESAEKPVQMETDSKAEAPKKKVKKTNVPLSELVYGALKTVEVEKAVEKEFEMALQDRVMEETKDRKNAVESYVYDMRNKLSDKYQEYITDSEREAFLANLQEVEDWLYEDGEDETKGVYVAKLEELKKVGDPVEVRYKESLERGSVIDQLGYCINSYREAAMSTDPKFDHIELAEKQKVLNECVEAEAWLRGKQQQQDTLPKYATPALLSADVKSKAEALDKFCRPIMTKPKPVAKAEAPQAKGGEQADEGKSEPEQPASAEPMETENPAEGST

SEQ ID NO: 78069 - protein, 774 aa, Arabidopsis thaliana
  peptide (1)..(774): Ceres Seq. ID no. 12602470
  misc_feature (1)..(774): Homolog of NCBI NO: 34856875 NR Description: similar to osmotic stress protein [Rattus
  misc_feature (1)..(774): Homolog of NCBI NO: 39645395 NR Description: Unknown (protein for MGC:76295) [Silurana
  misc_feature (1)..(774): Homolog of NCBI NO: 28856138 NR Description: Similar to heat shock protein 4 [Danio rerio]
  misc_feature (1)..(774): Homolog of NCBI NO: 40254361 NR Description: osmotic stress protein; osmotic stress protein 94 [Mus musculus] >gi|31077176|sp|P48722|OS94_MOUSE Osmotic stress
  misc_feature (1)..(774): Homolog of NCBI NO: 1098541 NR Description: osmotic stress protein 94
  misc_feature (1)..(768): Homolog of NCBI NO: 40788905 NR Description: KIAA0201 [Homo sapiens]
  misc_feature (1)..(569): Homolog of NCBI NO: 7441858 NR Description: heat shock protein 70 - fission yeast pombe) >gi|3090716|gb|AAC18441.1| Pss1 [Schizosaccharomyces
  misc_feature (1)..(569): Homolog of NCBI NO: 12230134 NR Description: HEAT SHOCK PROTEIN HOMOLOG PSS1
  misc_feature (1)..(644): Homolog of NCBI NO: 40747009 NR Description: hypothetical protein AN1047.2 [Aspergillus
  misc_feature (1)..(638): Homolog of NCBI NO: 39591675 NR Description: Hypothetical protein CBG18133 [Caenorhabditis
MNPKNSISQIKRLIGRQFSDPELQRDIKSLPFSVTEGPDGYPLIHANYLGEKRAFTPTQVMGMMLSNLKGIAEKNLNTAVVDCCIGIPVYFTDLQRRAVLDAATIAGLHPLRLIHETTATALAYGIYKTDLPESDQLNVAFIDIGHASMQVCIAGFKKGQLKILSHAFDRSLGGRDFDEVLFNHFAAKFKDEYKIDVSQNAKASLRLRATCEKLKKVLSANPLAPLNIECLMDEKDVRGVIKREEFEEISIPILERVKRPLEKALSDAGLTVEDVHMVEVIGSGSRVPAMIKILTEFFGKEPRRTMNASECVSRGCALQCAILSPTFKVREFQVHESFPFSISLAWKGAASEAQNGGAENQQSTIVFPKGNPIPSVKALTFYRSGTFSVDVQYSDVNDLQAPPKISTYTIGPFQSSKGERAKLKVKVRLNLHGIVSVESATLLEEEEVEVPVTKEHSEETTKMDSDKASAEAAPASGDCDVNMQDAKDTSDATGTDNGVPESAEKPVQMETDSKAEAPKKKVKKTNVPLSELVYGALKTVEVEKAVEKEFEMALQDRVMEETKDRKNAVESYVYDMRNKLSDKYQEYITDSEREAFLANLQEVEDWLYEDGEDETKGVYVAKLEELKKVGDPVEVRYKESLERGSVIDQLGYCINSYREAAMSTDPKFDHIELAEKQKVLNECVEAEAWLRGKQQQQDTLPKYATPALLSADVKSKAEALDKFCRPIMTKPKPVAKAEAPQAKGGEQADEGKSEPEQPASAEPMETENPAEGST

SEQ ID NO: 78070 - DNA, 1602 bp, Arabidopsis thaliana
  misc_feature (1)..(1602): Ceres Seq. ID no. 12602739
  misc_feature: MA Experiment ID: 20001905 Result: Up-regulated in Transcription
  misc_feature: MA Experiment 20001905 PARAMETER Experiment Name: At_Drought_Reproduction_P Parameter: Age (day) Value: 40
  misc_feature: MA Experiment 20001905 PARAMETER Experiment Name: At_Drought_Reproduction_P Parameter: Organism Value: A. thaliana
  misc_feature: MA Experiment 20001905 PARAMETER Experiment Name: At_Drought_Reproduction_P Parameter: Plant Line Value: WS
  misc_feature: MA Experiment 20001905 PARAMETER Experiment Name: At_Drought_Reproduction_P Parameter: Timepoint (day) Value: 10
  misc_feature: MA Experiment 20001905 PARAMETER Experiment Name: At_Drought_Reproduction_P Parameter: Tissue Value: Rosettes
  misc_feature: MA Experiment 20001905 PARAMETER Experiment Name: At_Drought_Reproduction_P Parameter: Treatment Value: Drought vs. No Drought
atttcacactttttctgtctgttacgattcttgcttgatttctttctaaacaaagcaaaagttgtctttttggagttgtgagcaactaattctctgaaattgaggaagagaaagcgagaaggtttttttggagtcagagacagaagaagaatttaacagattcttgtcggaaacatggatacgagtgaagcaaggaaccgtaaagttgttgcagttgaacaattcgatctcgaagtccctgagactgctcatcagattagcagcgattcatggtttcaggtagcttttgttctaacgaccggtataaacagtgcctatgtgttgggatattccgggacagtcatggttcctttgggttggattggtggtgtggttggtctcattcttgctaccgcaatctctctttacgcaaacactcttatcgccaaacttcatgagtttggtggcaaaagacacattcgttatagagatcttgcaggcttcatctatggtaaaaagatgtatcgtgttacatggggattgcaatatgtcaatcttttcatgattaattgtggcttcatcatacttgctggttcagccttaaaggctgtttatgtactttttagagatgatagtctcatgaaactgcctcacttcatcgccatcgcgggtgttgtatgcgcgattttcgcaatcggtattcctcatttatcagctcttggaatctggctaggagtttcaacaatcctcagcataatctacattattgttgcaatagttctatcagctaaagatggagtaaacaagcctgaaagagattacaacatacaaggatcatcaataaacaaactctttaccataacaggagcagctgcaaatctagttttcgcattcaacacgggaatgctcccggaaatacaggccacggtgaagcaaccggtcgttaaaaacatgatgaaggctctgtattttcaattcactgttggtgttttacctatgtacgcggttacattcatcggatattgggcttacgggtcctcgacatcgacttatctcttaaacagcgtcagtggacctgtttgggtcaaagcactcgctaacatttcagcttttctccaatctgttatctctttacatatttttgcaagtccgacttatgagtatatggacacaaagtatggagtcaaaggaagtccattggcaatgaagaatctgttgtttagaacagtagcaagaggaagctacattgcggtgagcactcttctctctgcgcttttaccgtttctcggagatttcatgagccttaccggagcgataagcacgttccctctcacattcatattagcgaatcacatgtatcttgttgctatgaatgatgagcttagtcttgtgcaaaagctatggcattggctcaatgtttgcttctttggattaatgtctcttgctgctgctattgctgctgttagactcatctctgttgactccaagaacttccatgtttttgctgatgtttgattaaaatgtcttcgacatttttaacgatgtaatctttataccaattagaaaaaatttgtaatccttttgttgttacttttattatttcaaatgaaagaaattttttat

SEQ ID NO: 78071 - protein, 439 aa, Arabidopsis thaliana; identical to SEQ ID NO: 41864
  peptide (1)..(439): Ceres Seq. ID no. 12602740
  misc_feature (1)..(439): Homolog of NCBI NO: 15228183 NR Description: proline transporter 2; protein id: At3g55740.1, by cDNA: gi_19698890 [Arabidopsis thaliana]
  misc_feature (1)..(439): Homolog of NCBI NO: 15225591 NR Description: proline transporter 1; protein id: At2g39890.1, by cDNA: 39048. [Arabidopsis thaliana] >gi|11358707|pir||T50692
  misc_feature (1)..(439): Homolog of NCBI NO: 21593453 NR Description: proline transporter 1 [Arabidopsis thaliana]
  misc_feature (6)..(439): Homolog of NCBI NO: 21554196 NR Description: putative proline transporter [Arabidopsis
  misc_feature (6)..(439): Homolog of NCBI NO: 15228000 NR Description: putative proline transporter; protein id: supported by cDNA: 20959. [Arabidopsis thaliana]
  misc_feature (18)..(439): Homolog of NCBI NO: 21069018 NR Description: betaine/proline transporter [Avicennia marina]
  misc_feature (8)..(439): Homolog of NCBI NO: 21069020 NR Description: betaine/proline transporter [Avicennia marina]
  misc_feature (21)..(439): Homolog of NCBI NO: 8571474 NR Description: proline/glycine betaine transporter [Atriplex
  misc_feature (15)..(439): Homolog of NCBI NO: 11358950 NR Description: proline transport protein 3 [imported] - tomato
  misc_feature (11)..(439): Homolog of NCBI NO: 11358949 NR Description: proline transport protein 2 [imported] - tomato

SEQ ID NO: 78072 - protein, 383 aa, Arabidopsis thaliana; identical to SEQ ID NO: 41865
  peptide (1)..(383): Ceres Seq. ID no. 12602741
  misc_feature (1)..(383): Homolog of NCBI NO: 15228183 NR Description: proline transporter 2; protein id: At3g55740.1, by cDNA: gi_19698890 [Arabidopsis thaliana]
  misc_feature (1)..(383): Homolog of NCBI NO: 15225591 NR Description: proline transporter 1; protein id: At2g39890.1, by cDNA: 39048. [Arabidopsis thaliana] >gi|11358707|pir||T50692
  misc_feature (1)..(383): Homolog of NCBI NO: 21593453 NR Description: proline transporter 1 [Arabidopsis thaliana]
  misc_feature (1)..(383): Homolog of NCBI NO: 21554196 NR Description: putative proline transporter [Arabidopsis
  misc_feature (1)..(383): Homolog of NCBI NO: 15228000 NR Description: putative proline transporter; protein id: supported by cDNA: 20959. [Arabidopsis thaliana]
  misc_feature (1)..(383): Homolog of NCBI NO: 21069018 NR Description: betaine/proline transporter [Avicennia marina]
  misc_feature (1)..(383): Homolog of NCBI NO: 21069020 NR Description: betaine/proline transporter [Avicennia marina]
  misc_feature (1)..(383): Homolog of NCBI NO: 8571474 NR Description: proline/glycine betaine transporter [Atriplex
  misc_feature (1)..(383): Homolog of NCBI NO: 11358950 NR Description: proline transport protein 3 [imported] - tomato
  misc_feature (1)..(383): Homolog of NCBI NO: 11358949 NR Description: proline transport protein 2 [imported] - tomato

SEQ ID NO: 78073 - protein, 331 aa, Arabidopsis thaliana; identical to SEQ ID NO: 41866
  peptide (1)..(331): Ceres Seq. ID no. 12602742
  misc_feature (1)..(331): Homolog of NCBI NO: 15228183 NR Description: proline transporter 2; protein id: At3g55740.1, by cDNA: gi_19698890 [Arabidopsis thaliana]
  misc_feature (1)..(331): Homolog of NCBI NO: 15225591 NR Description: proline transporter 1; protein id: At2g39890.1, by cDNA: 39048. [Arabidopsis thaliana] >gi|11358707|pir||T50692
  misc_feature (1)..(331): Homolog of NCBI NO: 21593453 NR Description: proline transporter 1 [Arabidopsis thaliana]
  misc_feature (1)..(331): Homolog of NCBI NO: 21554196 NR Description: putative proline transporter [Arabidopsis
  misc_feature (1)..(331): Homolog of NCBI NO: 15228000 NR Description: putative proline transporter; protein id: supported by cDNA: 20959. [Arabidopsis thaliana]
  misc_feature (1)..(331): Homolog of NCBI NO: 21069018 NR Description: betaine/proline transporter [Avicennia marina]
  misc_feature (1)..(331): Homolog of NCBI NO: 21069020 NR Description: betaine/proline transporter [Avicennia marina]
  misc_feature (1)..(331): Homolog of NCBI NO: 8571474 NR Description: proline/glycine betaine transporter [Atriplex
  misc_feature (1)..(331): Homolog of NCBI NO: 11358950 NR Description: proline transport protein 3 [imported] - tomato
  misc_feature (1)..(331): Homolog of NCBI NO: 11358949 NR Description: proline transport protein 2 [imported] - tomato

SEQ ID NO: 78074 - DNA, 1098 bp, Arabidopsis thaliana
  misc_feature (1)..(1098): Ceres Seq. ID no. 12603289
  misc_feature: MA Experiment ID: 20000173 Result: Down-regulated in Transcription
  misc_feature: MA Experiment 20000173 PARAMETER Experiment Name: At_42deg_Heat_P Parameter: Age (day) Value: 14
  misc_feature: MA Experiment 20000173 PARAMETER Experiment Name: At_42deg_Heat_P Parameter: Organism Value: A. thaliana
  misc_feature: MA Experiment 20000173 PARAMETER Experiment Name: At_42deg_Heat_P Parameter: Plant Line Value: WS
  misc_feature: MA Experiment 20000173 PARAMETER Experiment Name: At_42deg_Heat_P Parameter: Temperature (deg C) Value: 42 vs. 22
  misc_feature: MA Experiment 20000173 PARAMETER Experiment Name: At_42deg_Heat_P Parameter: Timepoint (hr) Value: 6
  misc_feature: MA Experiment 20000173 PARAMETER Experiment Name: At_42deg_Heat_P Parameter: Tissue Value: Aerial
  misc_feature: MA Experiment ID: 20000182 Result: Down-regulated in Transcription
  misc_feature: MA Experiment 20000182 PARAMETER Experiment Name: At_2mM_SA_P Parameter: Age (day) Value: 14
  misc_feature: MA Experiment 20000182 PARAMETER Experiment Name: At_2mM_SA_P Parameter: Organism Value: A. thaliana
  misc_feature: MA Experiment 20000182 PARAMETER Experiment Name: At_2mM_SA_P Parameter: Plant Line Value: WS
  misc_feature: MA Experiment 20000182 PARAMETER Experiment Name: At_2mM_SA_P Parameter: Timepoint (hr) Value: 6
  misc_feature: MA Experiment 20000182 PARAMETER Experiment Name: At_2mM_SA_P Parameter: Tissue Value: Aerial
  misc_feature: MA Experiment 20000182 PARAMETER Experiment Name: At_2mM_SA_P Parameter: Treatment Value: 2mM SA vs. No Treatment
  misc_feature: MA Experiment ID: 20000184 Result: Up-regulated in Transcription
  misc_feature: MA Experiment 20000184 PARAMETER Experiment Name: At_Shoots__P Parameter: Age (day) Value: 7
  misc_feature: MA Experiment 20000184 PARAMETER Experiment Name: At_Shoots__P Parameter: Tissue Value: Shoots vs. Whole Plant
  misc_feature: MA Experiment ID: 20000185 Result: Down-regulated in Transcription
  misc_feature: MA Experiment 20000185 PARAMETER Experiment Name: At_Roots__P Parameter: Age (day) Value: 7 vs. 21
  misc_feature: MA Experiment 20000185 PARAMETER Experiment Name: At_Roots__P Parameter: Organism Value: A. thaliana
  misc_feature: MA Experiment 20000185 PARAMETER Experiment Name: At_Roots__P Parameter: Tissue Value: Roots vs. Whole Plant
  misc_feature: MA Experiment ID: 20000234 Result: Up-regulated in Transcription
  misc_feature: MA Experiment 20000234 PARAMETER Experiment Name: At_Siliques_P Parameter: Age (day) Value: 21
  misc_feature: MA Experiment 20000234 PARAMETER Experiment Name: At_Siliques_P Parameter: Organism Value: A. thaliana
  misc_feature: MA Experiment 20000234 PARAMETER Experiment Name: At_Siliques_P Parameter: Plant Line Value: WS
  misc_feature: MA Experiment 20000234 PARAMETER Experiment Name: At_Siliques_P Parameter: Tissue Value: Less Than 5mm Siliques vs. Whole Plant
  misc_feature: MA Experiment ID: 20000265 Result: Up-regulated in Transcription
  misc_feature: MA Experiment 20000265 PARAMETER Experiment Name: At_Open_Flower_P Parameter: Age (day) Value: 21
  misc_feature: MA Experiment 20000265 PARAMETER Experiment Name: At_Open_Flower_P Parameter: Plant Line Value: WS
  misc_feature: MA Experiment 20000265 PARAMETER Experiment Name: At_Open_Flower_P Parameter: Tissue Value: Closed Flower vs. Whole Plant
  misc_feature: MA Experiment ID: 20000286 Result: Up-regulated in Transcription
  misc_feature: MA Experiment 20000286 PARAMETER Experiment Name: At_Open_Flower_P Parameter: Age (day) Value: 21
  misc_feature: MA Experiment 20000286 PARAMETER Experiment Name: At_Open_Flower_P Parameter: Plant Line Value: WS
  misc_feature: MA Experiment 20000286 PARAMETER Experiment Name: At_Open_Flower_P Parameter: Tissue Value: Half Open vs. Whole Plant
  misc_feature: MA Experiment ID: 20000436 Result: Down-regulated in Transcription
  misc_feature: MA Experiment 20000436 PARAMETER Experiment Name: At_Drought_P Parameter: Age (day) Value: 7
  misc_feature: MA Experiment 20000436 PARAMETER Experiment Name: At_Drought_P Parameter: Organism Value: A. thaliana
  misc_feature: MA Experiment 20000436 PARAMETER Experiment Name: At_Drought_P Parameter: Plant Line Value: WS
  misc_feature: MA Experiment 20000436 PARAMETER Experiment Name: At_Drought_P Parameter: Timepoint (hr) Value: 12
  misc_feature: MA Experiment 20000436 PARAMETER Experiment Name: At_Drought_P Parameter: Tissue Value: Whole Plant
  misc_feature: MA Experiment 20000436 PARAMETER Experiment Name: At_Drought_P Parameter: Treatment Value: Drought vs. No Drought
  misc_feature: MA Experiment ID: 20000437 Result: Down-regulated in Transcription
  misc_feature: MA Experiment 20000437 PARAMETER Experiment Name: At_Drought_P Parameter: Age (day) Value: 8
  misc_feature: MA Experiment 20000437 PARAMETER Experiment Name: At_Drought_P Parameter: Organism Value: A. thaliana
  misc_feature: MA Experiment 20000437 PARAMETER Experiment Name: At_Drought_P Parameter: Plant Line Value: WS
  misc_feature: MA Experiment 20000437 PARAMETER Experiment Name: At_Drought_P Parameter: Timepoint (hr) Value: 24
  misc_feature: MA Experiment 20000437 PARAMETER Experiment Name: At_Drought_P Parameter: Tissue Value: Whole Plant
  misc_feature: MA Experiment 20000437 PARAMETER Experiment Name: At_Drought_P Parameter: Treatment Value: Drought vs. No Drought
  misc_feature: MA Experiment ID: 20000438 Result: Up-regulated in Transcription
  misc_feature: MA Experiment 20000438 PARAMETER Experiment Name: At_Shoots__P Parameter: Age (day) Value: 14
  misc_feature: MA Experiment 20000438 PARAMETER Experiment Name: At_Shoots__P Parameter: Tissue Value: Shoots vs. Whole Plant
  misc_feature: MA Experiment ID: 20000439 Result: Down-regulated in Transcription
  misc_feature: MA Experiment 20000439 PARAMETER Experiment Name: At_Roots__P Parameter: Age (day) Value: 14 vs. 21
  misc_feature: MA Experiment 20000439 PARAMETER Experiment Name: At_Roots__P Parameter: Organism Value: A. thaliana
  misc_feature: MA Experiment 20000439 PARAMETER Experiment Name: At_Roots__P Parameter: Tissue Value: Roots vs. Whole Plant
  misc_feature: MA Experiment ID: 20000453 Result: Down-regulated in Transcription
  misc_feature: MA Experiment 20000453 PARAMETER Experiment Name: At_100uM_ABA_P Parameter: Age (day) Value: 15
  misc_feature: MA Experiment 20000453 PARAMETER Experiment Name: At_100uM_ABA_P Parameter: Organism Value: A. thaliana
  misc_feature: MA Experiment 20000453 PARAMETER Experiment Name: At_100uM_ABA_P Parameter: Plant Line Value: WS
  misc_feature: MA Experiment 20000453 PARAMETER Experiment Name: At_100uM_ABA_P Parameter: Timepoint (hr) Value: 24
  misc_feature: MA Experiment 20000453 PARAMETER Experiment Name: At_100uM_ABA_P Parameter: Tissue Value: Aerial
  misc_feature: MA Experiment 20000453 PARAMETER Experiment Name: At_100uM_ABA_P Parameter: Treatment Value: 100uM ABA vs. No Treatment
  misc_feature: MA Experiment ID: 20000573 Result: Down-regulated in Transcription
  misc_feature: MA Experiment 20000573 PARAMETER Experiment Name: At_100uM_ABA_Mutants__P Parameter: Organism Value: A. thaliana
  misc_feature: MA Experiment 20000573 PARAMETER Experiment Name: At_100uM_ABA_Mutants__P Parameter: Plant Line Value: CS22 vs. Ler wt
  misc_feature: MA Experiment 20000573 PARAMETER Experiment Name: At_100uM_ABA_Mutants__P Parameter: Timepoint (hr) Value: N/A
  misc_feature: MA Experiment 20000573 PARAMETER Experiment Name: At_100uM_ABA_Mutants__P Parameter: Tissue Value: Whole Plant
  misc_feature: MA Experiment 20000573 PARAMETER Experiment Name: At_100uM_ABA_Mutants__P Parameter: Treatment Value: None
  misc_feature: MA Experiment ID: 20001247 Result: Down-regulated in Transcription
  misc_feature: MA Experiment 20001247 PARAMETER Experiment Name: At_Far-red-induction_P Parameter: Age (day) Value: 7
  misc_feature: MA Experiment 20001247 PARAMETER Experiment Name: At_Far-red-induction_P Parameter: Light Value: Far-red vs. White
  misc_feature: MA Experiment 20001247 PARAMETER Experiment Name: At_Far-red-induction_P Parameter: Organism Value: A. thaliana
  misc_feature: MA Experiment 20001247 PARAMETER Experiment Name: At_Far-red-induction_P Parameter: Plant Line Value: Columbia
  misc_feature: MA Experiment 20001247 PARAMETER Experiment Name: At_Far-red-induction_P Parameter: Timepoint (hr) Value: 1
  misc_feature: MA Experiment 20001247 PARAMETER Experiment Name: At_Far-red-induction_P Parameter: Tissue Value: Whole Plant
  misc_feature: MA Experiment ID: 20001555 Result: Down-regulated in Transcription
  misc_feature: MA Experiment 20001555 PARAMETER Experiment Name: At_Drought_Soil_Dry_P Parameter: Age (day) Value: 24
  misc_feature: MA Experiment 20001555 PARAMETER Experiment Name: At_Drought_Soil_Dry_P Parameter: Organism Value: A. thaliana
  misc_feature: MA Experiment 20001555 PARAMETER Experiment Name: At_Drought_Soil_Dry_P Parameter: Plant Line Value: WS
  misc_feature: MA Experiment 20001555 PARAMETER Experiment Name: At_Drought_Soil_Dry_P Parameter: Post Timepoint (hr) Value: None
  misc_feature: MA Experiment 20001555 PARAMETER Experiment Name: At_Drought_Soil_Dry_P Parameter: Post-Treatment Value: None
  misc_feature: MA Experiment 20001555 PARAMETER Experiment Name: At_Drought_Soil_Dry_P Parameter: Timepoint (day) Value: 10
  misc_feature: MA Experiment 20001555 PARAMETER Experiment Name: At_Drought_Soil_Dry_P Parameter: Treatment Value: Drought vs. No Drought
  misc_feature: MA Experiment ID: 20001556 Result: Down-regulated in Transcription
  misc_feature: MA Experiment 20001556 PARAMETER Experiment Name: At_Drought_Soil_Dry_P Parameter: Age (day) Value: 26
  misc_feature: MA Experiment 20001556 PARAMETER Experiment Name: At_Drought_Soil_Dry_P Parameter: Organism Value: A. thaliana
  misc_feature: MA Experiment 20001556 PARAMETER Experiment Name: At_Drought_Soil_Dry_P Parameter: Plant Line Value: WS
  misc_feature: MA Experiment 20001556 PARAMETER Experiment Name: At_Drought_Soil_Dry_P Parameter: Post Timepoint (hr) Value: None
  misc_feature: MA Experiment 20001556 PARAMETER Experiment Name: At_Drought_Soil_Dry_P Parameter: Post-Treatment Value: None
  misc_feature: MA Experiment 20001556 PARAMETER Experiment Name: At_Drought_Soil_Dry_P Parameter: Timepoint (day) Value: 12
  misc_feature: MA Experiment 20001556 PARAMETER Experiment Name: At_Drought_Soil_Dry_P Parameter: Treatment Value: Drought vs. No Drought
  misc_feature: MA Experiment ID: 20001560 Result: Up-regulated in Transcription
  misc_feature: MA Experiment 20001560 PARAMETER Experiment Name: At_Drought_Soil_Dry_P Parameter: Age (day) Value: 28
  misc_feature: MA Experiment 20001560 PARAMETER Experiment Name: At_Drought_Soil_Dry_P Parameter: Organism Value: A. thaliana
  misc_feature: MA Experiment 20001560 PARAMETER Experiment Name: At_Drought_Soil_Dry_P Parameter: Plant Line Value: WS
  misc_feature: MA Experiment 20001560 PARAMETER Experiment Name: At_Drought_Soil_Dry_P Parameter: Post Timepoint (hr) Value: None
  misc_feature: MA Experiment 20001560 PARAMETER Experiment Name: At_Drought_Soil_Dry_P Parameter: Post-Treatment Value: None
  misc_feature: MA Experiment 20001560 PARAMETER Experiment Name: At_Drought_Soil_Dry_P Parameter: Timepoint (day) Value: 14
  misc_feature: MA Experiment 20001560 PARAMETER Experiment Name: At_Drought_Soil_Dry_P Parameter: Treatment Value: Drought vs. No Drought
  misc_feature: MA Experiment ID: 20001906 Result: Down-regulated in Transcription
  misc_feature: MA Experiment 20001906 PARAMETER Experiment Name: At_Drought_Reproduction_P Parameter: Age (day) Value: 35
  misc_feature: MA Experiment 20001906 PARAMETER Experiment Name: At_Drought_Reproduction_P Parameter: Organism Value: A. thaliana
  misc_feature: MA Experiment 20001906 PARAMETER Experiment Name: At_Drought_Reproduction_P Parameter: Plant Line Value: WS
  misc_feature: MA Experiment 20001906 PARAMETER Experiment Name: At_Drought_Reproduction_P Parameter: Timepoint (day) Value: 5
  misc_feature: MA Experiment 20001906 PARAMETER Experiment Name: At_Drought_Reproduction_P Parameter: Tissue Value: Siliques
  misc_feature: MA Experiment 20001906 PARAMETER Experiment Name: At_Drought_Reproduction_P Parameter: Treatment Value: Drought vs. No Drought
gtccctatccaatacacatctctctctctcttattaactcaatgacggcgactgcgtttagggtcggcttgtggttggccgttacggcttcctttctcttaaccgcaacaaacgccaaaatccccggcgtttacagtggcggaccgtggcagaatgcacacgccactttctacggtggcagtgacgcctccggcacaatgggcggcgcgtgtgggtacgggaacttgtacagccaaggatacggtgtgaacacggcggcgttgagcactgctttgttcaacaacggattcagctgtggtgcttgttttgagattaagtgtactgatgatccgagatggtgtgttccgggaaatccatctattcttgtgacggcgacgaacttttgtccgccgaattttgctcagccgagtgacgacggagggtggtgcaatccgccgcgcgagcattttgatctcgccatgcctatgttcctcaagatcggtctataccgtgcaggcattgtccccgtctcctatcgcagggtaccttgtcggaagataggagggataagattcacagtaaacggattcagatacttcaatcttgttctggtaactaacgttgccggcgccggagatattaacggagttagcgtaaagggatcaaagacagattgggtgaggatgagtcggaactggggacagaactggcaatccaacgccgttctcatcggccaatcactctctttccgagtcaccgcctctgaccgacgttcttctacctcatggaacgttgctcctgccacgtggcagtttggtcagactttctccggcaaaaactttcgagtctgaaatctgaaaaaccacccaaaagatgttttttaattttattttttacaatggaagaagacacaaacaagaagagagatgagacattttccagccctgggttttccctttaattttcttgggaatattccggtggcttgtggaaaatatttccgtttttagtattattatcagcaaaatttcttttaatctttgcgatttacgagtgatttgtttttctcttggttattttgttcctttaattatttcgttggtggcatcttcgttctgc

SEQ ID NO: 78075 - protein, 275 aa, Arabidopsis thaliana
  peptide (1)..(275): Ceres Seq. ID no. 12603290
  misc_feature (182)..(259): Pfam Name: Pollen allergen Pfam Description: Pollen allergen
  misc_feature (14)..(275): Homolog of NCBI NO: 15224330 NR Description: expansin, putative; protein id: At2g37640.1, by cDNA: gi_19699321 [Arabidopsis thaliana]
  misc_feature (25)..(275): Homolog of NCBI NO: 20502784 NR Description: expansin 11 precursor [Rumex palustris]
  misc_feature (25)..(275): Homolog of NCBI NO: 20502782 NR Description: expansin 10 precursor [Rumex palustris]
  misc_feature (25)..(275): Homolog of NCBI NO: 20502786 NR Description: expansin 12 precursor [Rumex palustris]
  misc_feature (18)..(275): Homolog of NCBI NO: 29467509 NR Description: expansin [Pyrus communis]
  misc_feature (32)..(275): Homolog of NCBI NO: 1076531 NR Description: pollen allergen homolog, hypothetical (clone - garden pea >gi|732905|emb|CAA59470.1| homology with pollen
  misc_feature (21)..(275): Homolog of NCBI NO: 20138197 NR Description: Alpha-expansin 6 precursor (At-EXP6) (AtEx6)
  misc_feature (21)..(275): Homolog of NCBI NO: 15227005 NR Description: expansin, putative; protein id: At2g28950.1, by cDNA: 17914., supported by cDNA: gi_16648831, supported by gi_17865811, supported by cDNA: gi_18252948 [Arabidopsis
  misc_feature (21)..(275): Homolog of NCBI NO: 29466643 NR Description: expansin [Prunus persica]
  misc_feature (25)..(275): Homolog of NCBI NO: 11281299 NR Description: alpha-expansin 2 [imported] - Triphysaria
PYPIHISLSLINSMTATAFRVGLWLAVTASFLLTATNAKIPGVYSGGPWQNAHATFYGGSDASGTMGGACGYGNLYSQGYGVNTAALSTALFNNGFSCGACFEIKCTDDPRWCVPGNPSILVTATNFCPPNFAQPSDDGGWCNPPREHFDLAMPMFLKIGLYRAGIVPVSYRRVPCRKIGGIRFTVNGFRYFNLVLVTNVAGAGDINGVSVKGSKTDWVRMSRNWGQNWQSNAVLIGQSLSFRVTASDRRSSTSWNVAPATWQFGQTFSGKNFRV

SEQ ID NO: 78076 - protein, 262 aa, Arabidopsis thaliana
  peptide (1)..(262): Ceres Seq. ID no. 12603291
  misc_feature (169)..(246): Pfam Name: Pollen allergen Pfam Description: Pollen allergen
  misc_feature (1)..(262): Homolog of NCBI NO: 15224330 NR Description: expansin, putative; protein id: At2g37640.1, by cDNA: gi_19699321 [Arabidopsis thaliana]
  misc_feature (12)..(262): Homolog of NCBI NO: 20502784 NR Description: expansin 11 precursor [Rumex palustris]
  misc_feature (12)..(262): Homolog of NCBI NO: 20502782 NR Description: expansin 10 precursor [Rumex palustris]
  misc_feature (12)..(262): Homolog of NCBI NO: 20502786 NR Description: expansin 12 precursor [Rumex palustris]
  misc_feature (5)..(262): Homolog of NCBI NO: 29467509 NR Description: expansin [Pyrus communis]
  misc_feature (19)..(262): Homolog of NCBI NO: 1076531 NR Description: pollen allergen homolog, hypothetical (clone - garden pea >gi|732905|emb|CAA59470.1| homology with pollen
  misc_feature (8)..(262): Homolog of NCBI NO: 20138197 NR Description: Alpha-expansin 6 precursor (At-EXP6) (AtEx6)
  misc_feature (8)..(262): Homolog of NCBI NO: 15227005 NR Description: expansin, putative; protein id: At2g28950.1, by cDNA: 17914., supported by cDNA: gi_16648831, supported by gi_17865811, supported by cDNA: gi_18252948 [Arabidopsis
  misc_feature (8)..(262): Homolog of NCBI NO: 29466643 NR Description: expansin [Prunus persica]
  misc_feature (12)..(262): Homolog of NCBI NO: 11281299 NR Description: alpha-expansin 2 [imported] - Triphysaria
MTATAFRVGLWLAVTASFLLTATNAKIPGVYSGGPWQNAHATFYGGSDASGTMGGACGYGNLYSQGYGVNTAALSTALFNNGFSCGACFEIKCTDDPRWCVPGNPSILVTATNFCPPNFAQPSDDGGWCNPPREHFDLAMPMFLKIGLYRAGIVPVSYRRVPCRKIGGIRFTVNGFRYFNLVLVTNVAGAGDINGVSVKGSKTDWVRMSRNWGQNWQSNAVLIGQSLSFRVTASDRRSSTSWNVAPATWQFGQTFSGKNFRV

SEQ ID NO: 78077 - protein, 210 aa, Arabidopsis thaliana; identical to SEQ ID NO: 36530
  peptide (1)..(210): Ceres Seq. ID no. 12603292
  misc_feature (117)..(194): Pfam Name: Pollen allergen Pfam Description: Pollen allergen
  misc_feature (1)..(210): Homolog of NCBI NO: 15224330 NR Description: expansin, putative; protein id: At2g37640.1, by cDNA: gi_19699321 [Arabidopsis thaliana]
  misc_feature (1)..(210): Homolog of NCBI NO: 20502784 NR Description: expansin 11 precursor [Rumex palustris]
  misc_feature (1)..(210): Homolog of NCBI NO: 20502782 NR Description: expansin 10 precursor [Rumex palustris]
  misc_feature (1)..(210): Homolog of NCBI NO: 20502786 NR Description: expansin 12 precursor [Rumex palustris]
  misc_feature (1)..(210): Homolog of NCBI NO: 29467509 NR Description: expansin [Pyrus communis]
  misc_feature (1)..(210): Homolog of NCBI NO: 1076531 NR Description: pollen allergen homolog, hypothetical (clone - garden pea >gi|732905|emb|CAA59470.1| homology with pollen
  misc_feature (1)..(210): Homolog of NCBI NO: 20138197 NR Description: Alpha-expansin 6 precursor (At-EXP6) (AtEx6)
  misc_feature (1)..(210): Homolog of NCBI NO: 15227005 NR Description: expansin, putative; protein id: At2g28950.1, by cDNA: 17914., supported by cDNA: gi_16648831, supported by gi_17865811, supported by cDNA: gi_18252948 [Arabidopsis
  misc_feature (1)..(210): Homolog of NCBI NO: 29466643 NR Description: expansin [Prunus persica]
  misc_feature (1)..(210): Homolog of NCBI NO: 11281299 NR Description: alpha-expansin 2 [imported] - Triphysaria

SEQ ID NO: 78078 - DNA, 2580 bp, Arabidopsis thaliana
  misc_feature (1)..(2580): Ceres Seq. ID no. 12604147
  misc_feature: MA Experiment ID: 20000185 Result: Down-regulated in Transcription
  misc_feature: MA Experiment 20000185 PARAMETER Experiment Name: At_Roots__P Parameter: Age (day) Value: 7 vs. 21
  misc_feature: MA Experiment 20000185 PARAMETER Experiment Name: At_Roots__P Parameter: Organism Value: A. thaliana
  misc_feature: MA Experiment 20000185 PARAMETER Experiment Name: At_Roots__P Parameter: Tissue Value: Roots vs. Whole Plant
  misc_feature: MA Experiment ID: 20000234 Result: Down-regulated in Transcription
  misc_feature: MA Experiment 20000234 PARAMETER Experiment Name: At_Siliques_P Parameter: Age (day) Value: 21
  misc_feature: MA Experiment 20000234 PARAMETER Experiment Name: At_Siliques_P Parameter: Organism Value: A. thaliana
  misc_feature: MA Experiment 20000234 PARAMETER Experiment Name: At_Siliques_P Parameter: Plant Line Value: WS
  misc_feature: MA Experiment 20000234 PARAMETER Experiment Name: At_Siliques_P Parameter: Tissue Value: Less Than 5mm Siliques vs. Whole Plant
  misc_feature: MA Experiment ID: 20000265 Result: Down-regulated in Transcription
  misc_feature: MA Experiment 20000265 PARAMETER Experiment Name: At_Open_Flower_P Parameter: Age (day) Value: 21
  misc_feature: MA Experiment 20000265 PARAMETER Experiment Name: At_Open_Flower_P Parameter: Plant Line Value: WS
  misc_feature: MA Experiment 20000265 PARAMETER Experiment Name: At_Open_Flower_P Parameter: Tissue Value: Closed Flower vs. Whole Plant
agtctctctctctctttatctctccacaatttgctgctttaacctctctctctctctctctcatcacaccatgtgggatgtggctatagcagtcttcactgcatcttcctcctcactttcttctctctctttctcttaatttctttttttccagatttttctctgattcccatcttttccctcgaatgatcggttgagagaagatggtttcagagacttggtttcgtaatctgtggaggtttccaaagaaacatgatggtcataaagataaggcggttctaggagtattagcgtttgaggttgcgagtttgttgtcgaagcttgttcatttgtggcagtcattaagtgataagaatgttgcaaggcttagggacgagattacacattccactggtataaagaagttagtttcagaagatgatgattttattgtgaggttaatacgtgatgaaatgatggagaacgttgagaatgtagcgaaagctgtggctaggcttgcgaggaaatgcaacgatcccaagttgaagtgctttgagaattgttttagtgatatgatgaagactggagctgacccttatggttggcagtttgggtggaagaaaatggataagaaagctaagaaaatggaacgtttcatatcatctaatgctagtctctaccaggagactgagattcttgctgatcttgaacagactttcaagagaatgaagagcaatgaatctgctactgacaatcttttggagtatcagaaaaaagttacatggaaaagacacgaagtgaagaatctgcgggatgtgtctctttggaaccgtacttatgactataccgtcattctcttggttagatcagttttcacaatccttagcaggactaaacatgtttttggcattagttacagagtggaagcaagtgatgttagctctgcagattctgattttattggccgcagccactccgtttctactattttaactcctgtatctcataaatctgagtctagtggtcttcctagatttgcttctggcccccttggaagatttaccggtccagcatcgggttcagctgctacaaggtccacgaagatgagtgatttcctttcgggttctctcagcgccgaatcacctaagtcaggtcctcttgttgcagaaaaacacaaacgtttcaagttttactctggtcagcttgggaagatcacctccaaatcaggaccacttatcggaatgggcaaaaacaacaagaagatggggcagaccccggaaaggccttcaatttcctcagtgaaaaagcaattgaaagccaaccgattaacacaggttggcccatttaaaggctgtatggtgtctcacgatgggattacgcctctcagcactagggcccggaatggagctaggaatagtagtgctgagcatcacattcttgaagataattctaactctgttcacgttgaaaacttgacacttccttcccgacccaagctgtcagatgctgctcctaatacccttggtaccgcttgcttagcattacactatgctaatgtcatcatcgtgatagagagatttgttgcgtctcctcacttgataggagatgatgcaagagacgacctttacaacatgttaccggcgagcgtgagaacatcgcttagagaaaggctaaaaccttactcgaaaaacttgagttcttccacagtttatgatccaggcctagcaagagaatggacagacgcaatggcgggtatcttggaatggttgggtccattagctcacaacatgataaaatggcaatctgagcggagttacgagcaccaaagcttggtttcaaggacgcacatagttcttgcacaaacccttttctttgcaaaccagcagaagacagaagccatcattaccgagcttctcgtaggcctcaattatgtctggagatttggcagagaactcaatgccaaggctcttcaggagtgtaccagtagtaaaacccttgagaaatgcttggacacagataactagtgaagctctccaagacgacacacacaagtctggatttttactacctcgttgacctaaaccggcactggatctcacccactgggtaaaccataccgtgggcgcgccctgtatcctatgcagcttggaccaaaccagagtacggaaaggtgctcgattaattacatgagaggtattatgatctgagcacctctttatcttcttccccgtttactattctgcttcgtggattgcaaaattctgacttgtagtaggatgatgatgcgttgtatattgttctatgatttttattgtggtgagttacatactgcatatatacgtatgtgccaaggttgttttagattctgtaatactcgttggtgatacagaagattccttaaattccgatttgtccaagttttgtcctgtattattattactcgtccttggtcttctcctcccttttggtcaactgtattcgtatgtgggtttgtcaaagtttgaaattaaagtcaatagatttcttagttgattattgtttcttcagtctacatgtttaaattttatgatataagttttatgaatgaatcgcacttgatct

SEQ ID NO: 78079 - protein, 599 aa, Arabidopsis thaliana
  peptide (1)..(599): Ceres Seq. ID no. 12604148
  misc_feature (432)..(524): Pfam Name: Protein of unknown function (DUF668) Pfam Description: Protein of unknown function (DUF668)
  misc_feature (23)..(228): Homolog of NCBI NO: 7939524 NR Description: contains similarity to unknown
  misc_feature (23)..(228): Homolog of NCBI NO: 15228977 NR Description: hypothetical protein; protein id: At3g23160.1
  misc_feature (428)..(596): Homolog of NCBI NO: 7939524 NR Description: contains similarity to unknown
  misc_feature (428)..(596): Homolog of NCBI NO: 15228977 NR Description: hypothetical protein; protein id: At3g23160.1
  misc_feature (26)..(227): Homolog of NCBI NO: 15242144 NR Description: putative protein; protein id: At5g51670.1 thaliana] >gi|8953735|dbj|BAA98099.1| contains similarity to
  misc_feature (385)..(582): Homolog of NCBI NO: 15242144 NR Description: putative protein; protein id: At5g51670.1 thaliana] >gi|8953735|dbj|BAA98099.1| contains similarity to
  misc_feature (385)..(582): Homolog of NCBI NO: 27754455 NR Description: unknown protein [Arabidopsis thaliana]
  misc_feature (165)..(227): Homolog of NCBI NO: 27754455 NR Description: unknown protein [Arabidopsis thaliana]
  misc_feature (26)..(95): Homolog of NCBI NO: 27754455 NR Description: unknown protein [Arabidopsis thaliana]
  misc_feature (74)..(279): Homolog of NCBI NO: 12003396 NR Description: Avr9/Cf-9 rapidly elicited protein 137 [Nicotiana
MVSETWFRNLWRFPKKHDGHKDKAVLGVLAFEVASLLSKLVHLWQSLSDKNVARLRDEITHSTGIKKLVSEDDDFIVRLIRDEMMENVENVAKAVARLARKCNDPKLKCFENCFSDMMKTGADPYGWQFGWKKMDKKAKKMERFISSNASLYQETEILADLEQTFKRMKSNESATDNLLEYQKKVTWKRHEVKNLRDVSLWNRTYDYTVILLVRSVFTILSRTKHVFGISYRVEASDVSSADSDFIGRSHSVSTILTPVSHKSESSGLPRFASGPLGRFTGPASGSAATRSTKMSDFLSGSLSAESPKSGPLVAEKHKRFKFYSGQLGKITSKSGPLIGMGKNNKKMGQTPERPSISSVKKQLKANRLTQVGPFKGCMVSHDGITPLSTRARNGARNSSAEHHILEDNSNSVHVENLTLPSRPKLSDAAPNTLGTACLALHYANVIIVIERFVASPHLIGDDARDDLYNMLPASVRTSLRERLKPYSKNLSSSTVYDPGLAREWTDAMAGILEWLGPLAHNMIKWQSERSYEHQSLVSRTHIVLAQTLFFANQQKTEAIITELLVGLNYVWRFGRELNAKALQECTSSKTLEKCLDTDN

SEQ ID NO: 78080 - protein, 516 aa, Arabidopsis thaliana
  peptide (1)..(516): Ceres Seq. ID no. 12604149
  misc_feature (349)..(441): Pfam Name: Protein of unknown function (DUF668) Pfam Description: Protein of unknown function (DUF668)
  misc_feature (1)..(145): Homolog of NCBI NO: 7939524 NR Description: contains similarity to unknown
  misc_feature (1)..(145): Homolog of NCBI NO: 15228977 NR Description: hypothetical protein; protein id: At3g23160.1
  misc_feature (345)..(513): Homolog of NCBI NO: 7939524 NR Description: contains similarity to unknown
  misc_feature (345)..(513): Homolog of NCBI NO: 15228977 NR Description: hypothetical protein; protein id: At3g23160.1
  misc_feature (1)..(144): Homolog of NCBI NO: 15242144 NR Description: putative protein; protein id: At5g51670.1 thaliana] >gi|8953735|dbj|BAA98099.1| contains similarity to
  misc_feature (302)..(499): Homolog of NCBI NO: 15242144 NR Description: putative protein; protein id: At5g51670.1 thaliana] >gi|8953735|dbj|BAA98099.1| contains similarity to
  misc_feature (302)..(499): Homolog of NCBI NO: 27754455 NR Description: unknown protein [Arabidopsis thaliana]
  misc_feature (82)..(144): Homolog of NCBI NO: 27754455 NR Description: unknown protein [Arabidopsis thaliana]
  misc_feature (1)..(12): Homolog of NCBI NO: 27754455 NR Description: unknown protein [Arabidopsis thaliana]
  misc_feature (1)..(196): Homolog of NCBI NO: 12003396 NR Description: Avr9/Cf-9 rapidly elicited protein 137 [Nicotiana
MMENVENVAKAVARLARKCNDPKLKCFENCFSDMMKTGADPYGWQFGWKKMDKKAKKMERFISSNASLYQETEILADLEQTFKRMKSNESATDNLLEYQKKVTWKRHEVKNLRDVSLWNRTYDYTVILLVRSVFTILSRTKHVFGISYRVEASDVSSADSDFIGRSHSVSTILTPVSHKSESSGLPRFASGPLGRFTGPASGSAATRSTKMSDFLSGSLSAESPKSGPLVAEKHKRFKFYSGQLGKITSKSGPLIGMGKNNKKMGQTPERPSISSVKKQLKANRLTQVGPFKGCMVSHDGITPLSTRARNGARNSSAEHHILEDNSNSVHVENLTLPSRPKLSDAAPNTLGTACLALHYANVIIVIERFVASPHLIGDDARDDLYNMLPASVRTSLRERLKPYSKNLSSSTVYDPGLAREWTDAMAGILEWLGPLAHNMIKWQSERSYEHQSLVSRTHIVLAQTLFFANQQKTEAIITELLVGLNYVWRFGRELNAKALQECTSSKTLEKCLDTDN

SEQ ID NO: 78081 - protein, 515 aa, Arabidopsis thaliana
  peptide (1)..(515): Ceres Seq. ID no. 12604150
  misc_feature (348)..(440): Pfam Name: Protein of unknown function (DUF668) Pfam Description: Protein of unknown function (DUF668)
  misc_feature (1)..(144): Homolog of NCBI NO: 7939524 NR Description: contains similarity to unknown
  misc_feature (1)..(144): Homolog of NCBI NO: 15228977 NR Description: hypothetical protein; protein id: At3g23160.1
  misc_feature (344)..(512): Homolog of NCBI NO: 7939524 NR Description: contains similarity to unknown
  misc_feature (344)..(512): Homolog of NCBI NO: 15228977 NR Description: hypothetical protein; protein id: At3g23160.1
  misc_feature (1)..(143): Homolog of NCBI NO: 15242144 NR Description: putative protein; protein id: At5g51670.1 thaliana] >gi|8953735|dbj|BAA98099.1| contains similarity to
  misc_feature (301)..(498): Homolog of NCBI NO: 15242144 NR Description: putative protein; protein id: At5g51670.1 thaliana] >gi|8953735|dbj|BAA98099.1| contains similarity to
  misc_feature (301)..(498): Homolog of NCBI NO: 27754455 NR Description: unknown protein [Arabidopsis thaliana]
  misc_feature (81)..(143): Homolog of NCBI NO: 27754455 NR Description: unknown protein [Arabidopsis thaliana]
  misc_feature (1)..(11): Homolog of NCBI NO: 27754455 NR Description: unknown protein [Arabidopsis thaliana]
  misc_feature (1)..(195): Homolog of NCBI NO: 12003396 NR Description: Avr9/Cf-9 rapidly elicited protein 137 [Nicotiana
MENVENVAKAVARLARKCNDPKLKCFENCFSDMMKTGADPYGWQFGWKKMDKKAKKMERFISSNASLYQETEILADLEQTFKRMKSNESATDNLLEYQKKVTWKRHEVKNLRDVSLWNRTYDYTVILLVRSVFTILSRTKHVFGISYRVEASDVSSADSDFIGRSHSVSTILTPVSHKSESSGLPRFASGPLGRFTGPASGSAATRSTKMSDFLSGSLSAESPKSGPLVAEKHKRFKFYSGQLGKITSKSGPLIGMGKNNKKMGQTPERPSISSVKKQLKANRLTQVGPFKGCMVSHDGITPLSTRARNGARNSSAEHHILEDNSNSVHVENLTLPSRPKLSDAAPNTLGTACLALHYANVIIVIERFVASPHLIGDDARDDLYNMLPASVRTSLRERLKPYSKNLSSSTVYDPGLAREWTDAMAGILEWLGPLAHNMIKWQSERSYEHQSLVSRTHIVLAQTLFFANQQKTEAIITELLVGLNYVWRFGRELNAKALQECTSSKTLEKCLDTDN

SEQ ID NO: 78082 - DNA, 1332 bp, Arabidopsis thaliana
  misc_feature (1)..(1332): Ceres Seq. ID no. 12604676
  misc_feature: MA Experiment ID: 20001911 Result: Down-regulated in Transcription
  misc_feature: MA Experiment 20001911 PARAMETER Experiment Name: At_Drought_Reproduction_P Parameter: Age (day) Value: 40
  misc_feature: MA Experiment 20001911 PARAMETER Experiment Name: At_Drought_Reproduction_P Parameter: Organism Value: A. thaliana
  misc_feature: MA Experiment 20001911 PARAMETER Experiment Name: At_Drought_Reproduction_P Parameter: Plant Line Value: WS
  misc_feature: MA Experiment 20001911 PARAMETER Experiment Name: At_Drought_Reproduction_P Parameter: Timepoint (day) Value: 10
  misc_feature: MA Experiment 20001911 PARAMETER Experiment Name: At_Drought_Reproduction_P Parameter: Tissue Value: Flowers
  misc_feature: MA Experiment 20001911 PARAMETER Experiment Name: At_Drought_Reproduction_P Parameter: Treatment Value: Drought vs. No Drought
gatgcgtactgtgaccattacatactacagttagctttcttctctagccgtcgaagtttcacgcgccgccgtgagaaaatgcagcacacaccggagcaaccgagagtcactctttacataatcctcaccaccgcgtttctctctctatgtttcctcctctctctctcttcctcttcccagtactcttcatcttcctacaccggacgacccgatgatctacgacccgacccgagactctttccttcttcctccaaaatcgccgccgatacagctcctccttcaatcgcttacctaatttccggatcttctggtgacacgcgacgaatccttcgacttctctacgctacttaccatcctcgaaatcgatatcttcttcatctcgatagcttagcgacacaatctgaacgagatcggctcgctgttgatgtacaagatgtaccgatttttagagctgcaaggaatgttgatgttattgggaagcctgatttcgcgtatcagagaggatcgtctccgatggcttctacgcttcatggtgcttcgattcttcttagattgtcaggaacttgggattggtttgttagtattagtgttgatgattatcctctcgttactcaagatgagcttcttcatattatgtcacatttgcctaaggacttgaattttgtgaaccacactagctacattggttggaaagagtccaggaagttgaagccagttattgttgatccagggctctatcttgtggagaaaaccgatatgtttttcgcttcgcagaaacgagagttgcctaaggctttcaagttattctcaggtccatctttctccatcttaagccggaatttcatggagcactgtgtcttaggcactgacaacttccctcggactctactcatgtacttgtccaacacacctgattctctttccaactacttcccaactatcctctgcaacacggataccttcaaaaagaccatcatgaacaacaacttactctacctagcttctaacgacacttctaaagaaagataccatcagcttgatcacaaagagttcacagaaatggttgactccggagcagcttttgcaagaggattcaggtacgacgacactgtccttgatcgcatcgatcatgaacttctgggacgcaaacctggtgaagttgtgcctggtggttggtgtttaggagattctagtaaaaaccgtagctcgtgttccgtctggggtgactcgggtatccttcggcccggttctggttccgataggctcgagagacgaattgttgagttactatcaaacgattggttcagattgcaccaatgcgtacctgaatga

SEQ ID NO: 78083 - protein, 443 aa, Arabidopsis thaliana; identical to SEQ ID NO: 49242
  peptide (1)..(443): Ceres Seq. ID no. 12604677
  misc_feature (95)..(320): Pfam Name: Core-2/I-Branching enzyme Pfam Description: Core-2/I-Branching enzyme
  misc_feature (27)..(443): Homolog of NCBI NO: 15229570 NR Description: hypothetical protein; protein id: At3g24040.1 thaliana] >gi|9294673|dbj|BAB03022.1|
  misc_feature (85)..(440): Homolog of NCBI NO: 15242532 NR Description: N-acetylglucosaminyltransferase family
  misc_feature (27)..(440): Homolog of NCBI NO: 15242199 NR Description: N-acetylglucosaminyltransferase family enzyme family); protein id: At5g15050.1, supported by cDNA: supported by cDNA: gi_16209673 [Arabidopsis thaliana]
  misc_feature (38)..(440): Homolog of NCBI NO: 18409754 NR Description: N-acetylglucosaminyltransferase family enzyme family); protein id: At1g71070.1, supported by cDNA:
  misc_feature (15)..(440): Homolog of NCBI NO: 15218824 NR Description: N-acetylglucosaminyltransferase family enzyme family); protein id: At1g03520.1, supported by cDNA: supported by cDNA: gi_20465790 [Arabidopsis thaliana] thaliana
  misc_feature (41)..(430): Homolog of NCBI NO: 34895394 NR Description: P0445D12.4 [Oryza sativa (japonica
  misc_feature (31)..(441): Homolog of NCBI NO: 27497209 NR Description: Hypothetical protein [Oryza sativa (japonica
  misc_feature (78)..(440): Homolog of NCBI NO: 15236287 NR Description: N-acetylglucosaminyltransferase family
  misc_feature (82)..(429): Homolog of NCBI NO: 32489778 NR Description: OSJNBb0018A10.9 [Oryza sativa (japonica
  misc_feature (46)..(440): Homolog of NCBI NO: 34903664 NR Description: B1015E06.17 [Oryza sativa (japonica

SEQ ID NO: 78084 - protein, 417 aa, Arabidopsis thaliana; identical to SEQ ID NO: 49243
  peptide (1)..(417): Ceres Seq. ID no. 12604678
  misc_feature (69)..(294): Pfam Name: Core-2/I-Branching enzyme Pfam Description: Core-2/I-Branching enzyme
  misc_feature (1)..(417): Homolog of NCBI NO: 15229570 NR Description: hypothetical protein; protein id: At3g24040.1 thaliana] >gi|9294673|dbj|BAB03022.1|
  misc_feature (59)..(414): Homolog of NCBI NO: 15242532 NR Description: N-acetylglucosaminyltransferase family
  misc_feature (1)..(414): Homolog of NCBI NO: 15242199 NR Description: N-acetylglucosaminyltransferase family enzyme family); protein id: At5g15050.1, supported by cDNA: supported by cDNA: gi_16209673 [Arabidopsis thaliana]
  misc_feature (12)..(414): Homolog of NCBI NO: 18409754 NR Description: N-acetylglucosaminyltransferase family enzyme family); protein id: At1g71070.1, supported by cDNA:
  misc_feature (1)..(414): Homolog of NCBI NO: 15218824 NR Description: N-acetylglucosaminyltransferase family enzyme family); protein id: At1g03520.1, supported by cDNA: supported by cDNA: gi_20465790 [Arabidopsis thaliana] thaliana
  misc_feature (15)..(404): Homolog of NCBI NO: 34895394 NR Description: P0445D12.4 [Oryza sativa (japonica
  misc_feature (5)..(415): Homolog of NCBI NO: 27497209 NR Description: Hypothetical protein [Oryza sativa (japonica
  misc_feature (52)..(414): Homolog of NCBI NO: 15236287 NR Description: N-acetylglucosaminyltransferase family
  misc_feature (56)..(403): Homolog of NCBI NO: 32489778 NR Description: OSJNBb0018A10.9 [Oryza sativa (japonica
  misc_feature (20)..(414): Homolog of NCBI NO: 34903664 NR Description: B1015E06.17 [Oryza sativa (japonica

SEQ ID NO: 78085 - protein, 272 aa, Arabidopsis thaliana; identical to SEQ ID NO: 49244
  peptide (1)..(272): Ceres Seq. ID no. 12604679
  misc_feature (1)..(149): Pfam Name: Core-2/I-Branching enzyme Pfam Description: Core-2/I-Branching enzyme
  misc_feature (1)..(272): Homolog of NCBI NO: 15229570 NR Description: hypothetical protein; protein id: At3g24040.1 thaliana] >gi|9294673|dbj|BAB03022.1|
  misc_feature (1)..(269): Homolog of NCBI NO: 15242532 NR Description: N-acetylglucosaminyltransferase family
  misc_feature (1)..(269): Homolog of NCBI NO: 15242199 NR Description: N-acetylglucosaminyltransferase family enzyme family); protein id: At5g15050.1, supported by cDNA: supported by cDNA: gi_16209673 [Arabidopsis thaliana]
  misc_feature (1)..(269): Homolog of NCBI NO: 18409754 NR Description: N-acetylglucosaminyltransferase family enzyme family); protein id: At1g71070.1, supported by cDNA:
  misc_feature (1)..(269): Homolog of NCBI NO: 15218824 NR Description: N-acetylglucosaminyltransferase family enzyme family); protein id: At1g03520.1, supported by cDNA: supported by cDNA: gi_20465790 [Arabidopsis thaliana] thaliana
  misc_feature (1)..(259): Homolog of NCBI NO: 34895394 NR Description: P0445D12.4 [Oryza sativa (japonica
  misc_feature (1)..(270): Homolog of NCBI NO: 27497209 NR Description: Hypothetical protein [Oryza sativa (japonica
  misc_feature (1)..(269): Homolog of NCBI NO: 15236287 NR Description: N-acetylglucosaminyltransferase family
  misc_feature (1)..(258): Homolog of NCBI NO: 32489778 NR Description: OSJNBb0018A10.9 [Oryza sativa (japonica
  misc_feature (1)..(269): Homolog of NCBI NO: 34903664 NR Description: B1015E06.17 [Oryza sativa (japonica

SEQ ID NO: 78086 - DNA, 2427 bp, Arabidopsis thaliana
  misc_feature (1)..(2427): Ceres Seq. ID no. 12605047
  misc_feature: MA Experiment ID: 20000171 Result: Up-regulated in Transcription
  misc_feature: MA Experiment 20000171 PARAMETER Experiment Name: At_42deg_Heat_P Parameter: Age (day) Value: 14
  misc_feature: MA Experiment 20000171 PARAMETER Experiment Name: At_42deg_Heat_P Parameter: Organism Value: A. thaliana
  misc_feature: MA Experiment 20000171 PARAMETER Experiment Name: At_42deg_Heat_P Parameter: Plant Line Value: WS
  misc_feature: MA Experiment 20000171 PARAMETER Experiment Name: At_42deg_Heat_P Parameter: Temperature (deg C) Value: 42 vs. 22
  misc_feature: MA Experiment 20000171 PARAMETER Experiment Name: At_42deg_Heat_P Parameter: Timepoint (hr) Value: 1
  misc_feature: MA Experiment 20000171 PARAMETER Experiment Name: At_42deg_Heat_P Parameter: Tissue Value: Aerial
  misc_feature: MA Experiment ID: 20000179 Result: Down-regulated in Transcription
  misc_feature: MA Experiment 20000179 PARAMETER Experiment Name: At_Germinating_Seeds_P Parameter: Age (hr) Value: 6 vs. 0
  misc_feature: MA Experiment 20000179 PARAMETER Experiment Name: At_Germinating_Seeds_P Parameter: Tissue Value: Germinating Seeds
  misc_feature: MA Experiment ID: 20000180 Result: Down-regulated in Transcription
  misc_feature: MA Experiment 20000180 PARAMETER Experiment Name: At_Germinating_Seeds_P Parameter: Age (hr) Value: 24 vs. 0
  misc_feature: MA Experiment 20000180 PARAMETER Experiment Name: At_Germinating_Seeds_P Parameter: Tissue Value: Germinating Seeds
  misc_feature: MA Experiment ID: 20000184 Result: Down-regulated in Transcription
  misc_feature: MA Experiment 20000184 PARAMETER Experiment Name: At_Shoots__P Parameter: Age (day) Value: 7
  misc_feature: MA Experiment 20000184 PARAMETER Experiment Name: At_Shoots__P Parameter: Tissue Value: Shoots vs. Whole Plant
  misc_feature: MA Experiment ID: 20000234 Result: Down-regulated in Transcription
  misc_feature: MA Experiment 20000234 PARAMETER Experiment Name: At_Siliques_P Parameter: Age (day) Value: 21
  misc_feature: MA Experiment 20000234 PARAMETER Experiment Name: At_Siliques_P Parameter: Organism Value: A. thaliana
  misc_feature: MA Experiment 20000234 PARAMETER Experiment Name: At_Siliques_P Parameter: Plant Line Value: WS
  misc_feature: MA Experiment 20000234 PARAMETER Experiment Name: At_Siliques_P Parameter: Tissue Value: Less Than 5mm Siliques vs. Whole Plant
  misc_feature: MA Experiment ID: 20000235 Result: Down-regulated in Transcription
  misc_feature: MA Experiment 20000235 PARAMETER Experiment Name: At_Siliques_P Parameter: Age (day) Value: 21
  misc_feature: MA Experiment 20000235 PARAMETER Experiment Name: At_Siliques_P Parameter: Organism Value: A. thaliana
  misc_feature: MA Experiment 20000235 PARAMETER Experiment Name: At_Siliques_P Parameter: Plant Line Value: WS
  misc_feature: MA Experiment 20000235 PARAMETER Experiment Name: At_Siliques_P Parameter: Tissue Value: 5-10mm Siliques vs. Whole Plant
  misc_feature: MA Experiment ID: 20000265 Result: Down-regulated in Transcription
  misc_feature: MA Experiment 20000265 PARAMETER Experiment Name: At_Open_Flower_P Parameter: Age (day) Value: 21
  misc_feature: MA Experiment 20000265 PARAMETER Experiment Name: At_Open_Flower_P Parameter: Plant Line Value: WS
  misc_feature: MA Experiment 20000265 PARAMETER Experiment Name: At_Open_Flower_P Parameter: Tissue Value: Closed Flower vs. Whole Plant
  misc_feature: MA Experiment ID: 20001558 Result: Down-regulated in Transcription
  misc_feature: MA Experiment 20001558 PARAMETER Experiment Name: At_Drought_Soil_Dry_P Parameter: Age (day) Value: 27
  misc_feature: MA Experiment 20001558 PARAMETER Experiment Name: At_Drought_Soil_Dry_P Parameter: Organism Value: A. thaliana
  misc_feature: MA Experiment 20001558 PARAMETER Experiment Name: At_Drought_Soil_Dry_P Parameter: Plant Line Value: WS
  misc_feature: MA Experiment 20001558 PARAMETER Experiment Name: At_Drought_Soil_Dry_P Parameter: Post Timepoint (hr) Value: 6
  misc_feature: MA Experiment 20001558 PARAMETER Experiment Name: At_Drought_Soil_Dry_P Parameter: Post-Treatment Value: Re-Water vs. No Drought
  misc_feature: MA Experiment 20001558 PARAMETER Experiment Name: At_Drought_Soil_Dry_P Parameter: Timepoint (day) Value: 13
  misc_feature: MA Experiment 20001558 PARAMETER Experiment Name: At_Drought_Soil_Dry_P Parameter: Treatment Value: Drought vs. No Drought
  misc_feature: MA Experiment ID: 20001560 Result: Down-regulated in Transcription
  misc_feature: MA Experiment 20001560 PARAMETER Experiment Name: At_Drought_Soil_Dry_P Parameter: Age (day) Value: 28
  misc_feature: MA Experiment 20001560 PARAMETER Experiment Name: At_Drought_Soil_Dry_P Parameter: Organism Value: A. thaliana
  misc_feature: MA Experiment 20001560 PARAMETER Experiment Name: At_Drought_Soil_Dry_P Parameter: Plant Line Value: WS
  misc_feature: MA Experiment 20001560 PARAMETER Experiment Name: At_Drought_Soil_Dry_P Parameter: Post Timepoint (hr) Value: None
  misc_feature: MA Experiment 20001560 PARAMETER Experiment Name: At_Drought_Soil_Dry_P Parameter: Post-Treatment Value: None
  misc_feature: MA Experiment 20001560 PARAMETER Experiment Name: At_Drought_Soil_Dry_P Parameter: Timepoint (day) Value: 14
  misc_feature: MA Experiment 20001560 PARAMETER Experiment Name: At_Drought_Soil_Dry_P Parameter: Treatment Value: Drought vs. No Drought
gatcttcattattttagatttgaccgtttagaaaagtaagaaccagaccgtaccgaaccaaaacgaaccagagccagacgactccttaacggcggctaagctatctgtaaaccgaccgaaccacacagccacaggcacacaaatcaaaccttctagaaatcaaagagagacatttattctctaaattcattttcctattttgcccctacgaatatttttcttcttcgtctctctctctcagctcttgaagtctttggtctgttggcgaattttcaagcagctttctaattctgaactgaaaatttcgtctttggaactttatattctctcatctgaaactgaaggagaaggaagatgacgactatggagagtttgattgggttagttaataggatacagagagcatgtaccgtactcggtgactatggtggtggaactggaagtaacgctttcaattctctctgggaagctcttccaaccgtcgccgtcgtcggtggtcagagttctgggaaatcttcggttcttgagagtatagttgggagagattttcttcctagaggatctggtatcgttacgagacggcctttagtgttgcagcttcataagactgatgatggaacagaggagtatgcagagttccttcatcttcccaagaagcaattcacagattttgctttggttcgcagggagattcaggatgagactgatagaatcacagggaaaaacaaacagatatctccagttcctattcacctcagtatctactctccaaatgttgtgaatttgacactcattgatttgcccggtttaactaaagtggctgttgagggacagccggaaaccattgctgaggatatcgaatccatggttcgcacatatgttgataagcccaattgtatcatattggctatatctcctgccaaccaagacattgccacatcagatgcaattaagctcgcaaaagatgtcgatccaacaggtgagaggacatttggtgttcttaccaagttagacttgatggacaaaggaactaatgcgttagaagttcttgaaggaagatcttacaggctgcaacatccttgggttgggatagtgaaccgttcacaagcagatattaataagaatgtcgatatgatgcttgcaagacgcaaggaacgagaatattttgataccagtcctgactatggtcacttagccagcaaaatgggttcagaatatctggcaaagctgctctctaagcacttggagtctgttatcaggacccgtattccaagtatactatccttaataaacaaaagcattgaagaacttgaaagagagttagaccgaatgggtcggcctgtcgcagttgatgctggggctcaactatacactatattggagatgtgccgtgcattcgataagatattcaaggaacatcttgatggcgggcgtcctggaggtgaccgtatctatggagtctttgacaaccaacttccagctgcacttaaaaagcttccttttgatcgccatctttctctacaaagcgtgaagaaaatcgtgtccgaggcagatggttatcaacctcacttgattgcaccagaacagggttatcgccgtctaatcgaaggggcactgggttactttagaggtccagctgaagcttctgtggatgctgttcactatgtcttgaaagagcttgtgaggaaatcaatatcagaaactgaggagctaaagcgtttcccttcactgcaagtcgagcttgctgcagcagccaacagctccttggagaaattcagggaagaaagcaagaagtcggttattcgacttgttgacatggaatctgcgtatctaaccgctgagttcttccggaaacttcctcaagaaatagaaagaccagtaaccaacagcaaaaaccaaaccgcttctccttcgtctgcaacattagaccagtatggagacggacatttcagaaggatagcatcaaatgtatctgcgtatgttaatatggtttcggacacacttcgtaacaccattccaaaagcttgtgtgtactgtcaggttagacaagccaagctcgcattgctcaattacttctactctcagatcagcaagagagaggggaaacagttgggacagttactagatgaagatccggcattgatggaccggagactagagtgcgcgaagaggctagagttatacaagaaagcaagagatgagattgatgctgttgcttgggtaagatgataaaacctaaaagtgtgtttctggtgatggttttagagaactataaattcgtctgttgtttaagttcgttgactatgtctttgtatgtatgtatatgatcatcagaccctattgagagagacttgagacgttttgtaataaacttatcattactatttaaaaacgccatagcgtgtactttccgtctcgcttcacttt

SEQ ID NO: 78087 - protein, 624 aa, Arabidopsis thaliana
  peptide (1)..(624): Ceres Seq. ID no. 12605048
  misc_feature (228)..(514): Pfam Name: Dynamin central region Pfam Description: Dynamin central region
  misc_feature (1)..(624): Homolog of NCBI NO: 6651401 NR Description: dynamin-like protein 4 [Arabidopsis thaliana]
  misc_feature (1)..(624): Homolog of NCBI NO: 37536976 NR Description: putative phragmoplastin [Oryza sativa (japonica group)] >gi|18854996|gb|AAL79688.1| putative phragmoplastin sativa] >gi|31433579|gb|AAP55077.1| putative phragmoplastin
  misc_feature (4)..(624): Homolog of NCBI NO: 30689768 NR Description: phragmoplastin -related [Arabidopsis thaliana]
  misc_feature (4)..(624): Homolog of NCBI NO: 7484944 NR Description: probable phragmoplastin At2g44590 [imported] - thaliana >gi|3341679|gb|AAC27461.1| putative phragmoplastin
  misc_feature (1)..(622): Homolog of NCBI NO: 15223914 NR Description: dynamin, putative; protein id: At1g14830.1, by cDNA: 12880., supported by cDNA: gi_19569771, supported by
  misc_feature (1)..(622): Homolog of NCBI NO: 21537304 NR Description: dynamin, putative [Arabidopsis thaliana]
  misc_feature (1)..(622): Homolog of NCBI NO: 6651403 NR Description: dynamin-like protein 5 [Arabidopsis thaliana]
  misc_feature (4)..(622): Homolog of NCBI NO: 19569772 NR Description: dynamin-like protein C [Arabidopsis thaliana]
  misc_feature (158)..(624): Homolog of NCBI NO: 30689765 NR Description: phragmoplastin -related [Arabidopsis thaliana]
  misc_feature (4)..(140): Homolog of NCBI NO: 30689765 NR Description: phragmoplastin -related [Arabidopsis thaliana]
MTTMESLIGLVNRIQRACTVLGDYGGGTGSNAFNSLWEALPTVAVVGGQSSGKSSVLESIVGRDFLPRGSGIVTRRPLVLQLHKTDDGTEEYAEFLHLPKKQFTDFALVRREIQDETDRITGKNKQISPVPIHLSIYSPNVVNLTLIDLPGLTKVAVEGQPETIAEDIESMVRTYVDKPNCIILAISPANQDIATSDAIKLAKDVDPTGERTFGVLTKLDLMDKGTNALEVLEGRSYRLQHPWVGIVNRSQADINKNVDMMLARRKEREYFDTSPDYGHLASKMGSEYLAKLLSKHLESVIRTRIPSILSLINKSIEELERELDRMGRPVAVDAGAQLYTILEMCRAFDKIFKEHLDGGRPGGDRIYGVFDNQLPAALKKLPFDRHLSLQSVKKIVSEADGYQPHLIAPEQGYRRLIEGALGYFRGPAEASVDAVHYVLKELVRKSISETEELKRFPSLQVELAAAANSSLEKFREESKKSVIRLVDMESAYLTAEFFRKLPQEIERPVTNSKNQTASPSSATLDQYGDGHFRRIASNVSAYVNMVSDTLRNTIPKACVYCQVRQAKLALLNYFYSQISKREGKQLGQLLDEDPALMDRRLECAKRLELYKKARDEIDAVAWVR

SEQ ID NO: 78088 - protein, 621 aa, Arabidopsis thaliana
  peptide (1)..(621): Ceres Seq. ID no. 12605049
  misc_feature (225)..(511): Pfam Name: Dynamin central region Pfam Description: Dynamin central region
  misc_feature (1)..(621): Homolog of NCBI NO: 6651401 NR Description: dynamin-like protein 4 [Arabidopsis thaliana]
  misc_feature (1)..(621): Homolog of NCBI NO: 37536976 NR Description: putative phragmoplastin [Oryza sativa (japonica group)] >gi|18854996|gb|AAL79688.1| putative phragmoplastin sativa] >gi|31433579|gb|AAP55077.1| putative phragmoplastin
  misc_feature (1)..(621): Homolog of NCBI NO: 30689768 NR Description: phragmoplastin -related [Arabidopsis thaliana]
  misc_feature (1)..(621): Homolog of NCBI NO: 7484944 NR Description: probable phragmoplastin At2g44590 [imported] - thaliana >gi|3341679|gb|AAC27461.1| putative phragmoplastin
  misc_feature (1)..(619): Homolog of NCBI NO: 15223914 NR Description: dynamin, putative; protein id: At1g14830.1, by cDNA: 12880., supported by cDNA: gi_19569771, supported by
  misc_feature (1)..(619): Homolog of NCBI NO: 21537304 NR Description: dynamin, putative [Arabidopsis thaliana]
  misc_feature (1)..(619): Homolog of NCBI NO: 6651403 NR Description: dynamin-like protein 5 [Arabidopsis thaliana]
  misc_feature (1)..(619): Homolog of NCBI NO: 19569772 NR Description: dynamin-like protein C [Arabidopsis thaliana]
  misc_feature (155)..(621): Homolog of NCBI NO: 30689765 NR Description: phragmoplastin -related [Arabidopsis thaliana]
  misc_feature (1)..(137): Homolog of NCBI NO: 30689765 NR Description: phragmoplastin -related [Arabidopsis thaliana]
MESLIGLVNRIQRACTVLGDYGGGTGSNAFNSLWEALPTVAVVGGQSSGKSSVLESIVGRDFLPRGSGIVTRRPLVLQLHKTDDGTEEYAEFLHLPKKQFTDFALVRREIQDETDRITGKNKQISPVPIHLSIYSPNVVNLTLIDLPGLTKVAVEGQPETIAEDIESMVRTYVDKPNCIILAISPANQDIATSDAIKLAKDVDPTGERTFGVLTKLDLMDKGTNALEVLEGRSYRLQHPWVGIVNRSQADINKNVDMMLARRKEREYFDTSPDYGHLASKMGSEYLAKLLSKHLESVIRTRIPSILSLINKSIEELERELDRMGRPVAVDAGAQLYTILEMCRAFDKIFKEHLDGGRPGGDRIYGVFDNQLPAALKKLPFDRHLSLQSVKKIVSEADGYQPHLIAPEQGYRRLIEGALGYFRGPAEASVDAVHYVLKELVRKSISETEELKRFPSLQVELAAAANSSLEKFREESKKSVIRLVDMESAYLTAEFFRKLPQEIERPVTNSKNQTASPSSATLDQYGDGHFRRIASNVSAYVNMVSDTLRNTIPKACVYCQVRQAKLALLNYFYSQISKREGKQLGQLLDEDPALMDRRLECAKRLELYKKARDEIDAVAWVR

SEQ ID NO: 78089 - protein, 454 aa, Arabidopsis thaliana
  peptide (1)..(454): Ceres Seq. ID no. 12605050
  misc_feature (58)..(344): Pfam Name: Dynamin central region Pfam Description: Dynamin central region
  misc_feature (1)..(454): Homolog of NCBI NO: 6651401 NR Description: dynamin-like protein 4 [Arabidopsis thaliana]
  misc_feature (1)..(454): Homolog of NCBI NO: 37536976 NR Description: putative phragmoplastin [Oryza sativa (japonica group)] >gi|18854996|gb|AAL79688.1| putative phragmoplastin sativa] >gi|31433579|gb|AAP55077.1| putative phragmoplastin
  misc_feature (1)..(454): Homolog of NCBI NO: 30689768 NR Description: phragmoplastin -related [Arabidopsis thaliana]
  misc_feature (1)..(454): Homolog of NCBI NO: 7484944 NR Description: probable phragmoplastin At2g44590 [imported] - thaliana >gi|3341679|gb|AAC27461.1| putative phragmoplastin
  misc_feature (1)..(452): Homolog of NCBI NO: 15223914 NR Description: dynamin, putative; protein id: At1g14830.1, by cDNA: 12880., supported by cDNA: gi_19569771, supported by
  misc_feature (1)..(452): Homolog of NCBI NO: 21537304 NR Description: dynamin, putative [Arabidopsis thaliana]
  misc_feature (1)..(452): Homolog of NCBI NO: 6651403 NR Description: dynamin-like protein 5 [Arabidopsis thaliana]
  misc_feature (1)..(452): Homolog of NCBI NO: 19569772 NR Description: dynamin-like protein C [Arabidopsis thaliana]
  misc_feature (1)..(454): Homolog of NCBI NO: 30689765 NR Description: phragmoplastin -related [Arabidopsis thaliana]
  misc_feature (1)..(454): Homolog of NCBI NO: 30689760 NR Description: phragmoplastin -related [Arabidopsis thaliana]
MVRTYVDKPNCIILAISPANQDIATSDAIKLAKDVDPTGERTFGVLTKLDLMDKGTNALEVLEGRSYRLQHPWVGIVNRSQADINKNVDMMLARRKEREYFDTSPDYGHLASKMGSEYLAKLLSKHLESVIRTRIPSILSLINKSIEELERELDRMGRPVAVDAGAQLYTILEMCRAFDKIFKEHLDGGRPGGDRIYGVFDNQLPAALKKLPFDRHLSLQSVKKIVSEADGYQPHLIAPEQGYRRLIEGALGYFRGPAEASVDAVHYVLKELVRKSISETEELKRFPSLQVELAAAANSSLEKFREESKKSVIRLVDMESAYLTAEFFRKLPQEIERPVTNSKNQTASPSSATLDQYGDGHFRRIASNVSAYVNMVSDTLRNTIPKACVYCQVRQAKLALLNYFYSQISKREGKQLGQLLDEDPALMDRRLECAKRLELYKKARDEIDAVAWVR

SEQ ID NO: 78090 - DNA, 3228 bp, Arabidopsis thaliana
  misc_feature (1)..(3228): Ceres Seq. ID no. 12605287
  misc_feature: MA Experiment ID: 20001556 Result: Up-regulated in Transcription
  misc_feature: MA Experiment 20001556 PARAMETER Experiment Name: At_Drought_Soil_Dry_P Parameter: Age (day) Value: 26
  misc_feature: MA Experiment 20001556 PARAMETER Experiment Name: At_Drought_Soil_Dry_P Parameter: Organism Value: A. thaliana
  misc_feature: MA Experiment 20001556 PARAMETER Experiment Name: At_Drought_Soil_Dry_P Parameter: Plant Line Value: WS
  misc_feature: MA Experiment 20001556 PARAMETER Experiment Name: At_Drought_Soil_Dry_P Parameter: Post Timepoint (hr) Value: None
  misc_feature: MA Experiment 20001556 PARAMETER Experiment Name: At_Drought_Soil_Dry_P Parameter: Post-Treatment Value: None
  misc_feature: MA Experiment 20001556 PARAMETER Experiment Name: At_Drought_Soil_Dry_P Parameter: Timepoint (day) Value: 12
  misc_feature: MA Experiment 20001556 PARAMETER Experiment Name: At_Drought_Soil_Dry_P Parameter: Treatment Value: Drought vs. No Drought
ctattcgtttagagaacacttaaacaaacgcaggaggcctggaaaaaagaaagataacgggactcgagagattgagattacggagccacccactttcatggagtctacactctcagctttctcaaccgtcaaggcaacagcgatggctcgaagtagtggtggtccttcattacctctcctcactatttctaaagcacttaaccgccactttaccggcgccagacacctccatcctttattgctcgctcgctgttctccctccgtgcgacgtcttggtgggtttcatggcagtcgatttacttcgtcgaattcagctttgagaagcttgggagctgctgttttgccggtaatccgacaccgtttagagtgtttgtcgagctcatcgccgtctttcaggagtatctcaagtggcggcggttctggatttggggggtataatggtggaagcggcggtggtggtggcggaggatcggagagtggtgattccaagtcaaaactgggtgctaatgcaagtgatggtgtctctgttccgtcgtcagatatcattattctcgatgttggagggatgacatgtggagggtgttcagcaagtgtgaagaagatactggaaagccaacctcaagttgcttcagctagtgttaatctcaccaccgagacggcaattgtgtggcctgtaccggaagctaaaagtgtacctgattggcaaaagagtttaggcgagacgcttgcaaaccatctgaccaattgcgggtttcagtctactcctcgagatttggtgacagagaatttcttcaaagttttcgaaacaaagacaaaagacaagcaggctcgcttaaaagagagtggccgcgagcttgctgtttcatgggccctatgtgctgtatgcttggttggccatttaactcactttctaggggttaatgctccctggattcatgcgatccattcaacggggtttcatgtgtctttatgtttgattacgttgcttggtcctggacgcaagctagtacttgatggtatcaagagtcttttaaaaggttccccaaacatgaacacgctagttggtcttggtgctttgtcatcattttctgttagctcactggcagccatgattccaaaattgggctggaagacattttttgaggaaccagttatgttaatagcttttgtattgctgggaaggaatcttgaacagagagctaaaataaaagccaccagtgatatgactggccttctgagtgttttgccttcaaaagctcgccttctgcttgatggtgatctgcagaattcaactgttgaggttccttgtaatagtctctctgttggtgatctagtcgtcatactaccaggagatcgagttccagcagatggtgtggtcaagtcaggtagaagcaccattgatgagtcaagtttcacaggtgaaccattgccagtgacaaaagagtcagggagtcaagtcgcagcaggatctataaacctgaacggaactcttactgtcgaagtgcatagatcagggggtgaaactgcagttggggacattattcgtctggttgaagaggctcagagtagagaagcaccagtacagcagttggttgacaaggtcgcagggcgcttcacgtatggagtgatggcactctctgcagctacatttacattctggaatctatttggtgcacatgttcttccttctgccttgcataatgggagcccaatgtctttggcccttcaactatcttgcagcgttctggttgtggcttgtccttgcgcccttgggttggctactccaacggcaatgctggttggtacatcattaggagcaagaagaggattacttcttcgtggtggtgatattcttgaaaagttttccttggttgatactgttgtcttcgacaaaactgggacactgacgaagggacaccctgttgtgactgaagttattattcctgaaaatccaagacacaatttgaatgatacttggtcagaagtagaggttttgatgttagcagctgctgttgagtcaaacactactcaccctgttgggaaagcgattgtaaaagcagcccgggctcgtaattgtcaaacaatgaaggcagaggatggaacatttactgaagaaccagggtctggtgctgttgctattgtcaacaacaaaagggttacagttgggactctagaatgggtcaagagacatggagccaccgggaactcattgcttgcattagaagagcatgaaattaacaaccagtctgttgtgtatattggggtggataatacacttgctgcagtcatccgttttgaagataaagtcagggaggatgctgctcaagttgttgagaatttgactcgccagggaattgatgtgtacatgctgtctggtgacaagaggaatgctgccaattatgtagcttctgtcgtaggaattaatcatgaacgggttatagcaggagttaaaccagctgagaaaaagaattttatcaatgaacttcaaaaaaataagaagattgttgcaatggtgggggatggaataaacgatgctgctgctctggcatcatctaatgttggagtggccatgggtggtggtgcaggagcggccagtgaggtgtctcctgttgtcttgatgggcaatcggttaacacagttgcttgatgcgatggagctaagtcggcaaaccatgaagaccgtgaagcaaaacctttggtgggcgttcggatacaacattgtaggaatcccaattgcggctggagtgttgctaccattgactggaaccatgttgactccatcaatggcgggggctctcatgggtgtaagctctctcggtgtcatgactaattccttacttctaaggtacagattcttctcgaaccgaaacgacaaaaatgtcaaaccggaaccaaaagagggaacaaaacagccacatgagaacacaagatggaagcaaagctcttagacggggaatttccacttcactgaggcactatatcatgatttttgcagagataaatctctttttagttttttacttttcattcttaacgataatttcggctcttggtcttgagagggtttgttaggacttagggtattgataatttggagaatcatctcaacgtgatttttcaaacaattgctttgagcttgtaacacagccacagtaacacatgtccaaactctgcattggctttggcatttgatactctgaaatttgattttgtgtataattatagtgaa

SEQ ID NO: 78091 - protein, 981 aa, Arabidopsis thaliana
  peptide (1)..(981): Ceres Seq. ID no. 12605288
  misc_feature (624)..(861): Pfam Name: haloacid dehalogenase-like hydrolase Pfam Description: haloacid dehalogenase-like hydrolase
  misc_feature (177)..(647): Homolog of NCBI NO: 17231274 NR Description: cation-transporting P-type ATPase [Nostoc sp. PCC
  misc_feature (567)..(948): Homolog of NCBI NO: 17231274 NR Description: cation-transporting P-type ATPase [Nostoc sp. PCC
  misc_feature (180)..(950): Homolog of NCBI NO: 23041549 NR Description: hypothetical protein [Trichodesmium erythraeum
  misc_feature (175)..(948): Homolog of NCBI NO: 22326934 NR Description: similar to metal-transporting P-type ATPase;
  misc_feature (175)..(948): Homolog of NCBI NO: 31616607 NR Description: Paa2 P-type ATPase [Arabidopsis thaliana]
  misc_feature (186)..(650): Homolog of NCBI NO: 29374937 NR Description: copper-translocating P-type ATPase [Enterococcus
  misc_feature (574)..(948): Homolog of NCBI NO: 29374937 NR Description: copper-translocating P-type ATPase [Enterococcus
  misc_feature (185)..(218): Homolog of NCBI NO: 29374937 NR Description: copper-translocating P-type ATPase [Enterococcus
  misc_feature (184)..(640): Homolog of NCBI NO: 15888531 NR Description: AGR_C_2202p [Agrobacterium tumefaciens]
  misc_feature (571)..(948): Homolog of NCBI NO: 15888531 NR Description: AGR_C_2202p [Agrobacterium tumefaciens]
YSFREHLNKRRRPGKKKDNGTREIEITEPPTFMESTLSAFSTVKATAMARSSGGPSLPLLTISKALNRHFTGARHLHPLLLARCSPSVRRLGGFHGSRFTSSNSALRSLGAAVLPVIRHRLECLSSSSPSFRSISSGGGSGFGGYNGGSGGGGGGGSESGDSKSKLGANASDGVSVPSSDIIILDVGGMTCGGCSASVKKILESQPQVASASVNLTTETAIVWPVPEAKSVPDWQKSLGETLANHLTNCGFQSTPRDLVTENFFKVFETKTKDKQARLKESGRELAVSWALCAVCLVGHLTHFLGVNAPWIHAIHSTGFHVSLCLITLLGPGRKLVLDGIKSLLKGSPNMNTLVGLGALSSFSVSSLAAMIPKLGWKTFFEEPVMLIAFVLLGRNLEQRAKIKATSDMTGLLSVLPSKARLLLDGDLQNSTVEVPCNSLSVGDLVVILPGDRVPADGVVKSGRSTIDESSFTGEPLPVTKESGSQVAAGSINLNGTLTVEVHRSGGETAVGDIIRLVEEAQSREAPVQQLVDKVAGRFTYGVMALSAATFTFWNLFGAHVLPSALHNGSPMSLALQLSCSVLVVACPCALGLATPTAMLVGTSLGARRGLLLRGGDILEKFSLVDTVVFDKTGTLTKGHPVVTEVIIPENPRHNLNDTWSEVEVLMLAAAVESNTTHPVGKAIVKAARARNCQTMKAEDGTFTEEPGSGAVAIVNNKRVTVGTLEWVKRHGATGNSLLALEEHEINNQSVVYIGVDNTLAAVIRFEDKVREDAAQVVENLTRQGIDVYMLSGDKRNAANYVASVVGINHERVIAGVKPAEKKNFINELQKNKKIVAMVGDGINDAAALASSNVGVAMGGGAGAASEVSPVVLMGNRLTQLLDAMELSRQTMKTVKQNLWWAFGYNIVGIPIAAGVLLPLTGTMLTPSMAGALMGVSSLGVMTNSLLLRYRFFSNRNDKNVKPEPKEGTKQPHENTRWKQSS

SEQ ID NO: 78092 - protein, 949 aa, Arabidopsis thaliana
  peptide (1)..(949): Ceres Seq. ID no. 12605289
  misc_feature (592)..(829): Pfam Name: haloacid dehalogenase-like hydrolase Pfam Description: haloacid dehalogenase-like hydrolase
  misc_feature (145)..(615): Homolog of NCBI NO: 17231274 NR Description: cation-transporting P-type ATPase [Nostoc sp. PCC
  misc_feature (535)..(916): Homolog of NCBI NO: 17231274 NR Description: cation-transporting P-type ATPase [Nostoc sp. PCC
  misc_feature (148)..(918): Homolog of NCBI NO: 23041549 NR Description: hypothetical protein [Trichodesmium erythraeum
  misc_feature (143)..(916): Homolog of NCBI NO: 22326934 NR Description: similar to metal-transporting P-type ATPase;
  misc_feature (143)..(916): Homolog of NCBI NO: 31616607 NR Description: Paa2 P-type ATPase [Arabidopsis thaliana]
  misc_feature (154)..(618): Homolog of NCBI NO: 29374937 NR Description: copper-translocating P-type ATPase [Enterococcus
  misc_feature (542)..(916): Homolog of NCBI NO: 29374937 NR Description: copper-translocating P-type ATPase [Enterococcus
  misc_feature (153)..(186): Homolog of NCBI NO: 29374937 NR Description: copper-translocating P-type ATPase [Enterococcus
  misc_feature (152)..(608): Homolog of NCBI NO: 15888531 NR Description: AGR_C_2202p [Agrobacterium tumefaciens]
  misc_feature (539)..(916): Homolog of NCBI NO: 15888531 NR Description: AGR_C_2202p [Agrobacterium tumefaciens]
MESTLSAFSTVKATAMARSSGGPSLPLLTISKALNRHFTGARHLHPLLLARCSPSVRRLGGFHGSRFTSSNSALRSLGAAVLPVIRHRLECLSSSSPSFRSISSGGGSGFGGYNGGSGGGGGGGSESGDSKSKLGANASDGVSVPSSDIIILDVGGMTCGGCSASVKKILESQPQVASASVNLTTETAIVWPVPEAKSVPDWQKSLGETLANHLTNCGFQSTPRDLVTENFFKVFETKTKDKQARLKESGRELAVSWALCAVCLVGHLTHFLGVNAPWIHAIHSTGFHVSLCLITLLGPGRKLVLDGIKSLLKGSPNMNTLVGLGALSSFSVSSLAAMIPKLGWKTFFEEPVMLIAFVLLGRNLEQRAKIKATSDMTGLLSVLPSKARLLLDGDLQNSTVEVPCNSLSVGDLVVILPGDRVPADGVVKSGRSTIDESSFTGEPLPVTKESGSQVAAGSINLNGTLTVEVHRSGGETAVGDIIRLVEEAQSREAPVQQLVDKVAGRFTYGVMALSAATFTFWNLFGAHVLPSALHNGSPMSLALQLSCSVLVVACPCALGLATPTAMLVGTSLGARRGLLLRGGDILEKFSLVDTVVFDKTGTLTKGHPVVTEVIIPENPRHNLNDTWSEVEVLMLAAAVESNTTHPVGKAIVKAARARNCQTMKAEDGTFTEEPGSGAVAIVNNKRVTVGTLEWVKRHGATGNSLLALEEHEINNQSVVYIGVDNTLAAVIRFEDKVREDAAQVVENLTRQGIDVYMLSGDKRNAANYVASVVGINHERVIAGVKPAEKKNFINELQKNKKIVAMVGDGINDAAALASSNVGVAMGGGAGAASEVSPVVLMGNRLTQLLDAMELSRQTMKTVKQNLWWAFGYNIVGIPIAAGVLLPLTGTMLTPSMAGALMGVSSLGVMTNSLLLRYRFFSNRNDKNVKPEPKEGTKQPHENTRWKQSS

SEQ ID NO: 78093 - protein, 934 aa, Arabidopsis thaliana
  peptide (1)..(934): Ceres Seq. ID no. 12605290
  misc_feature (577)..(814): Pfam Name: haloacid dehalogenase-like hydrolase Pfam Description: haloacid dehalogenase-like hydrolase
  misc_feature (130)..(600): Homolog of NCBI NO: 17231274 NR Description: cation-transporting P-type ATPase [Nostoc sp. PCC
  misc_feature (520)..(901): Homolog of NCBI NO: 17231274 NR Description: cation-transporting P-type ATPase [Nostoc sp. PCC
  misc_feature (133)..(903): Homolog of NCBI NO: 23041549 NR Description: hypothetical protein [Trichodesmium erythraeum
  misc_feature (128)..(901): Homolog of NCBI NO: 22326934 NR Description: similar to metal-transporting P-type ATPase;
  misc_feature (128)..(901): Homolog of NCBI NO: 31616607 NR Description: Paa2 P-type ATPase [Arabidopsis thaliana]
  misc_feature (139)..(603): Homolog of NCBI NO: 29374937 NR Description: copper-translocating P-type ATPase [Enterococcus
  misc_feature (527)..(901): Homolog of NCBI NO: 29374937 NR Description: copper-translocating P-type ATPase [Enterococcus
  misc_feature (138)..(171): Homolog of NCBI NO: 29374937 NR Description: copper-translocating P-type ATPase [Enterococcus
  misc_feature (137)..(593): Homolog of NCBI NO: 15888531 NR Description: AGR_C_2202p [Agrobacterium tumefaciens]
  misc_feature (524)..(901): Homolog of NCBI NO: 15888531 NR Description: AGR_C_2202p [Agrobacterium tumefaciens]
MARSSGGPSLPLLTISKALNRHFTGARHLHPLLLARCSPSVRRLGGFHGSRFTSSNSALRSLGAAVLPVIRHRLECLSSSSPSFRSISSGGGSGFGGYNGGSGGGGGGGSESGDSKSKLGANASDGVSVPSSDIIILDVGGMTCGGCSASVKKILESQPQVASASVNLTTETAIVWPVPEAKSVPDWQKSLGETLANHLTNCGFQSTPRDLVTENFFKVFETKTKDKQARLKESGRELAVSWALCAVCLVGHLTHFLGVNAPWIHAIHSTGFHVSLCLITLLGPGRKLVLDGIKSLLKGSPNMNTLVGLGALSSFSVSSLAAMIPKLGWKTFFEEPVMLIAFVLLGRNLEQRAKIKATSDMTGLLSVLPSKARLLLDGDLQNSTVEVPCNSLSVGDLVVILPGDRVPADGVVKSGRSTIDESSFTGEPLPVTKESGSQVAAGSINLNGTLTVEVHRSGGETAVGDIIRLVEEAQSREAPVQQLVDKVAGRFTYGVMALSAATFTFWNLFGAHVLPSALHNGSPMSLALQLSCSVLVVACPCALGLATPTAMLVGTSLGARRGLLLRGGDILEKFSLVDTVVFDKTGTLTKGHPVVTEVIIPENPRHNLNDTWSEVEVLMLAAAVESNTTHPVGKAIVKAARARNCQTMKAEDGTFTEEPGSGAVAIVNNKRVTVGTLEWVKRHGATGNSLLALEEHEINNQSVVYIGVDNTLAAVIRFEDKVREDAAQVVENLTRQGIDVYMLSGDKRNAANYVASVVGINHERVIAGVKPAEKKNFINELQKNKKIVAMVGDGINDAAALASSNVGVAMGGGAGAASEVSPVVLMGNRLTQLLDAMELSRQTMKTVKQNLWWAFGYNIVGIPIAAGVLLPLTGTMLTPSMAGALMGVSSLGVMTNSLLLRYRFFSNRNDKNVKPEPKEGTKQPHENTRWKQSS

SEQ ID NO: 78094 - DNA, 1824 bp, Arabidopsis thaliana
  misc_feature (1)..(1824): Ceres Seq. ID no. 12605489
  misc_feature: MA Experiment ID: 20000173 Result: Down-regulated in Transcription
  misc_feature: MA Experiment 20000173 PARAMETER Experiment Name: At_42deg_Heat_P Parameter: Age (day) Value: 14
  misc_feature: MA Experiment 20000173 PARAMETER Experiment Name: At_42deg_Heat_P Parameter: Organism Value: A. thaliana
  misc_feature: MA Experiment 20000173 PARAMETER Experiment Name: At_42deg_Heat_P Parameter: Plant Line Value: WS
  misc_feature: MA Experiment 20000173 PARAMETER Experiment Name: At_42deg_Heat_P Parameter: Temperature (deg C) Value: 42 vs. 22
  misc_feature: MA Experiment 20000173 PARAMETER Experiment Name: At_42deg_Heat_P Parameter: Timepoint (hr) Value: 6
  misc_feature: MA Experiment 20000173 PARAMETER Experiment Name: At_42deg_Heat_P Parameter: Tissue Value: Aerial
agttttatttttgttttctctttccatttcttgccaaaaccctaatttcaccttcacttaagaaatttctcccccaacttaaaccacccccttagaaaaaataaacaaaaaaaattagatctttcttgtttgcttataatatgtatgttttaggtcgaattttctgaaattaagattcattcctccatggaagaagctctgtttttattctctttagcttagcttagcttctactgatctgtttttgctacaaaatcccatctttttctttaaaactctttatctctgaatcttgagtttcttgtagaagaagaagcaattttgaatctttcgtaatcataaagattcgtggaggatctctactgatttgtcggaatctctcactacagaatcacttgatcttatgtccggatggaggagagagaaggaaccaacatcaacaacaacatcactagcagtttcggcttgaagcagcaacatgaagctgctgcttctgatggtggttactcaatggacccaccaccaagacccgaaaaccctaacccgtttttagtcccacccactactgtccccgcggccgccaccgtagcagcagctgttactgagaatgcggctactccgtttagcttaacaatgccgacggagaacacttcagctgagcagctgaaaaagaagagaggtaggccgagaaagtataatcccgatgggactcttgtcgtgactttatcgccgatgccaatctcgtcctctgttccgttgacgtcggagtttcctccaaggaaacgaggaagaggacgtggcaagtctaatcgatggctcaagaagtctcaaatgttccaattcgatagaagtcctgttgataccaatttggcaggtgtaggaactgctgattttgttggtgccaactttacacctcatgtactgatcgtcaacgccggagaggatgtgacgatgaagataatgacattctctcaacaaggatctcgtgctatctgcatcctttcagctaatggtcccatctccaatgttacgcttcgtcaatctatgacatccggtggtactctaacttatgagggtcgttttgagattctctctttgacgggttcgtttatgcaaaatgactctggaggaactcgaagtagagctggtggtatgagtgtttgccttgcaggaccagatggtcgtgtctttggtggaggactcgctggtctctttcttgctgctggtcctgtccaggtaatggtagggacttttatagctggtcaagagcagtcacagctggagctagcaaaagaaagacggctaagatttggggctcaaccatcttctatctcctttaacatatccgcagaagaacggaaggcgagattcgagaggcttaacaagtctgttgctattcctgcaccaaccacttcatacacgcatgtaaacacaacaaatgcggttcacagttactatacaaactcggttaaccatgtcaaggatcccttctcgtctatcccagtaggaggaggaggaggtggagaggtaggagaagaagagggtgaagaagatgatgatgaattagaaggtgaagacgaagaattcggaggcgatagccaatctgacaacgagattccgagctgatgatgatcatacggtttcttttcgcggatttgttaggtttgatggatttcagattttggttgattgtttttattaacacagaatgtttagaagctgctatctttaggttcccatcctcttgtgattgttgtagtatccttgttagaaacaaacttactgttgcaaaactctccttcaagaaagttttcactttgcttt

SEQ ID NO: 78095 - protein, 404 aa, Arabidopsis thaliana
  peptide (1)..(404): Ceres Seq. ID no. 12605490
  misc_feature (1)..(404): Homolog of NCBI NO: 15235023 NR Description: putative protein; protein id: At4g25320.1, by cDNA: gi_20466212 [Arabidopsis thaliana]
  misc_feature (1)..(404): Homolog of NCBI NO: 15242131 NR Description: putative protein; protein id: At5g51590.1
  misc_feature (38)..(400): Homolog of NCBI NO: 8809639 NR Description: contains similarity to DNA-binding [Arabidopsis thaliana] >gi|26451694|dbj|BAC42942.1| unknown [Arabidopsis thaliana] >gi|28973553|gb|AAO64101.1| unknown
  misc_feature (157)..(400): Homolog of NCBI NO: 15241763 NR Description: putative protein; protein id: At5g62260.1
  misc_feature (38)..(148): Homolog of NCBI NO: 15241763 NR Description: putative protein; protein id: At5g62260.1
  misc_feature (7)..(316): Homolog of NCBI NO: 22328578 NR Description: putative DNA-binding protein; protein id: supported by cDNA: gi_17979484 [Arabidopsis thaliana] AT4g12080/F16J13_150 [Arabidopsis thaliana]
  misc_feature (7)..(316): Homolog of NCBI NO: 7485570 NR Description: hypothetical protein F16J13.150 - Arabidopsis
  misc_feature (3)..(336): Homolog of NCBI NO: 15235790 NR Description: putative DNA binding protein; protein id: supported by cDNA: 12041. [Arabidopsis thaliana]
  misc_feature (83)..(294): Homolog of NCBI NO: 37537056 NR Description: putative AT-Hook DNA-binding protein [Oryza
  misc_feature (80)..(287): Homolog of NCBI NO: 2598227 NR Description: AT-hook protein 1 [Arabidopsis thaliana]
MEEREGTNINNNITSSFGLKQQHEAAASDGGYSMDPPPRPENPNPFLVPPTTVPAAATVAAAVTENAATPFSLTMPTENTSAEQLKKKRGRPRKYNPDGTLVVTLSPMPISSSVPLTSEFPPRKRGRGRGKSNRWLKKSQMFQFDRSPVDTNLAGVGTADFVGANFTPHVLIVNAGEDVTMKIMTFSQQGSRAICILSANGPISNVTLRQSMTSGGTLTYEGRFEILSLTGSFMQNDSGGTRSRAGGMSVCLAGPDGRVFGGGLAGLFLAAGPVQVMVGTFIAGQEQSQLELAKERRLRFGAQPSSISFNISAEERKARFERLNKSVAIPAPTTSYTHVNTTNAVHSYYTNSVNHVKDPFSSIPVGGGGGGEVGEEEGEEDDDELEGEDEEFGGDSQSDNEIPS

SEQ ID NO: 78096 - protein, 371 aa, Arabidopsis thaliana
  peptide (1)..(371): Ceres Seq. ID no. 12605491
  misc_feature (1)..(371): Homolog of NCBI NO: 15235023 NR Description: putative protein; protein id: At4g25320.1, by cDNA: gi_20466212 [Arabidopsis thaliana]
  misc_feature (1)..(371): Homolog of NCBI NO: 15242131 NR Description: putative protein; protein id: At5g51590.1
  misc_feature (5)..(367): Homolog of NCBI NO: 8809639 NR Description: contains similarity to DNA-binding [Arabidopsis thaliana] >gi|26451694|dbj|BAC42942.1| unknown [Arabidopsis thaliana] >gi|28973553|gb|AAO64101.1| unknown
  misc_feature (124)..(367): Homolog of NCBI NO: 15241763 NR Description: putative protein; protein id: At5g62260.1
  misc_feature (5)..(115): Homolog of NCBI NO: 15241763 NR Description: putative protein; protein id: At5g62260.1
  misc_feature (1)..(283): Homolog of NCBI NO: 22328578 NR Description: putative DNA-binding protein; protein id: supported by cDNA: gi_17979484 [Arabidopsis thaliana] AT4g12080/F16J13_150 [Arabidopsis thaliana]
  misc_feature (1)..(283): Homolog of NCBI NO: 7485570 NR Description: hypothetical protein F16J13.150 - Arabidopsis
  misc_feature (1)..(303): Homolog of NCBI NO: 15235790 NR Description: putative DNA binding protein; protein id: supported by cDNA: 12041. [Arabidopsis thaliana]
  misc_feature (50)..(261): Homolog of NCBI NO: 37537056 NR Description: putative AT-Hook DNA-binding protein [Oryza
  misc_feature (47)..(254): Homolog of NCBI NO: 2598227 NR Description: AT-hook protein 1 [Arabidopsis thaliana]
MDPPPRPENPNPFLVPPTTVPAAATVAAAVTENAATPFSLTMPTENTSAEQLKKKRGRPRKYNPDGTLVVTLSPMPISSSVPLTSEFPPRKRGRGRGKSNRWLKKSQMFQFDRSPVDTNLAGVGTADFVGANFTPHVLIVNAGEDVTMKIMTFSQQGSRAICILSANGPISNVTLRQSMTSGGTLTYEGRFEILSLTGSFMQNDSGGTRSRAGGMSVCLAGPDGRVFGGGLAGLFLAAGPVQVMVGTFIAGQEQSQLELAKERRLRFGAQPSSISFNISAEERKARFERLNKSVAIPAPTTSYTHVNTTNAVHSYYTNSVNHVKDPFSSIPVGGGGGGEVGEEEGEEDDDELEGEDEEFGGDSQSDNEIPS

SEQ ID NO: 78097 - protein, 330 aa, Arabidopsis thaliana
  peptide (1)..(330): Ceres Seq. ID no. 12605492
  misc_feature (1)..(330): Homolog of NCBI NO: 15235023 NR Description: putative protein; protein id: At4g25320.1, by cDNA: gi_20466212 [Arabidopsis thaliana]
  misc_feature (1)..(330): Homolog of NCBI NO: 15242131 NR Description: putative protein; protein id: At5g51590.1
  misc_feature (1)..(326): Homolog of NCBI NO: 8809639 NR Description: contains similarity to DNA-binding [Arabidopsis thaliana] >gi|26451694|dbj|BAC42942.1| unknown [Arabidopsis thaliana] >gi|28973553|gb|AAO64101.1| unknown
  misc_feature (83)..(326): Homolog of NCBI NO: 15241763 NR Description: putative protein; protein id: At5g62260.1
  misc_feature (1)..(74): Homolog of NCBI NO: 15241763 NR Description: putative protein; protein id: At5g62260.1
  misc_feature (1)..(242): Homolog of NCBI NO: 22328578 NR Description: putative DNA-binding protein; protein id: supported by cDNA: gi_17979484 [Arabidopsis thaliana] AT4g12080/F16J13_150 [Arabidopsis thaliana]
  misc_feature (1)..(242): Homolog of NCBI NO: 7485570 NR Description: hypothetical protein F16J13.150 - Arabidopsis
  misc_feature (1)..(262): Homolog of NCBI NO: 15235790 NR Description: putative DNA binding protein; protein id: supported by cDNA: 12041. [Arabidopsis thaliana]
  misc_feature (9)..(220): Homolog of NCBI NO: 37537056 NR Description: putative AT-Hook DNA-binding protein [Oryza
  misc_feature (6)..(213): Homolog of NCBI NO: 2598227 NR Description: AT-hook protein 1 [Arabidopsis thaliana]
MPTENTSAEQLKKKRGRPRKYNPDGTLVVTLSPMPISSSVPLTSEFPPRKRGRGRGKSNRWLKKSQMFQFDRSPVDTNLAGVGTADFVGANFTPHVLIVNAGEDVTMKIMTFSQQGSRAICILSANGPISNVTLRQSMTSGGTLTYEGRFEILSLTGSFMQNDSGGTRSRAGGMSVCLAGPDGRVFGGGLAGLFLAAGPVQVMVGTFIAGQEQSQLELAKERRLRFGAQPSSISFNISAEERKARFERLNKSVAIPAPTTSYTHVNTTNAVHSYYTNSVNHVKDPFSSIPVGGGGGGEVGEEEGEEDDDELEGEDEEFGGDSQSDNEIPS

SEQ ID NO: 78098 - DNA, 1787 bp, Arabidopsis thaliana
  misc_feature (1)..(1787): Ceres Seq. ID no. 12605608
  misc_feature: MA Experiment ID: 20000173 Result: Down-regulated in Transcription
  misc_feature: MA Experiment 20000173 PARAMETER Experiment Name: At_42deg_Heat_P Parameter: Age (day) Value: 14
  misc_feature: MA Experiment 20000173 PARAMETER Experiment Name: At_42deg_Heat_P Parameter: Organism Value: A. thaliana
  misc_feature: MA Experiment 20000173 PARAMETER Experiment Name: At_42deg_Heat_P Parameter: Plant Line Value: WS
  misc_feature: MA Experiment 20000173 PARAMETER Experiment Name: At_42deg_Heat_P Parameter: Temperature (deg C) Value: 42 vs. 22
  misc_feature: MA Experiment 20000173 PARAMETER Experiment Name: At_42deg_Heat_P Parameter: Timepoint (hr) Value: 6
  misc_feature: MA Experiment 20000173 PARAMETER Experiment Name: At_42deg_Heat_P Parameter: Tissue Value: Aerial
  misc_feature: MA Experiment ID: 20000184 Result: Down-regulated in Transcription
  misc_feature: MA Experiment 20000184 PARAMETER Experiment Name: At_Shoots__P Parameter: Age (day) Value: 7
  misc_feature: MA Experiment 20000184 PARAMETER Experiment Name: At_Shoots__P Parameter: Tissue Value: Shoots vs. Whole Plant
  misc_feature: MA Experiment ID: 20000794 Result: Up-regulated in Transcription
  misc_feature: MA Experiment 20000794 PARAMETER Experiment Name: At_Petals_P Parameter: Age (day) Value: 23-25 days
  misc_feature: MA Experiment 20000794 PARAMETER Experiment Name: At_Petals_P Parameter: Plant Line Value: WS
  misc_feature: MA Experiment 20000794 PARAMETER Experiment Name: At_Petals_P Parameter: Tissue Value: Petals vs. Whole plant
  misc_feature: MA Experiment ID: 20001247 Result: Up-regulated in Transcription
  misc_feature: MA Experiment 20001247 PARAMETER Experiment Name: At_Far-red-induction_P Parameter: Age (day) Value: 7
  misc_feature: MA Experiment 20001247 PARAMETER Experiment Name: At_Far-red-induction_P Parameter: Light Value: Far-red vs. White
  misc_feature: MA Experiment 20001247 PARAMETER Experiment Name: At_Far-red-induction_P Parameter: Organism Value: A. thaliana
  misc_feature: MA Experiment 20001247 PARAMETER Experiment Name: At_Far-red-induction_P Parameter: Plant Line Value: Columbia
  misc_feature: MA Experiment 20001247 PARAMETER Experiment Name: At_Far-red-induction_P Parameter: Timepoint (hr) Value: 1
  misc_feature: MA Experiment 20001247 PARAMETER Experiment Name: At_Far-red-induction_P Parameter: Tissue Value: Whole Plant
  misc_feature: MA Experiment ID: 20001557 Result: Down-regulated in Transcription
  misc_feature: MA Experiment 20001557 PARAMETER Experiment Name: At_Drought_Soil_Dry_P Parameter: Age (day) Value: 27
  misc_feature: MA Experiment 20001557 PARAMETER Experiment Name: At_Drought_Soil_Dry_P Parameter: Organism Value: A. thaliana
  misc_feature: MA Experiment 20001557 PARAMETER Experiment Name: At_Drought_Soil_Dry_P Parameter: Plant Line Value: WS
  misc_feature: MA Experiment 20001557 PARAMETER Experiment Name: At_Drought_Soil_Dry_P Parameter: Post Timepoint (hr) Value: 3
  misc_feature: MA Experiment 20001557 PARAMETER Experiment Name: At_Drought_Soil_Dry_P Parameter: Post-Treatment Value: Re-Water vs. No Drought
  misc_feature: MA Experiment 20001557 PARAMETER Experiment Name: At_Drought_Soil_Dry_P Parameter: Timepoint (day) Value: 13
  misc_feature: MA Experiment 20001557 PARAMETER Experiment Name: At_Drought_Soil_Dry_P Parameter: Treatment Value: Drought vs. No Drought
  misc_feature: MA Experiment ID: 20001560 Result: Down-regulated in Transcription
  misc_feature: MA Experiment 20001560 PARAMETER Experiment Name: At_Drought_Soil_Dry_P Parameter: Age (day) Value: 28
  misc_feature: MA Experiment 20001560 PARAMETER Experiment Name: At_Drought_Soil_Dry_P Parameter: Organism Value: A. thaliana
  misc_feature: MA Experiment 20001560 PARAMETER Experiment Name: At_Drought_Soil_Dry_P Parameter: Plant Line Value: WS
  misc_feature: MA Experiment 20001560 PARAMETER Experiment Name: At_Drought_Soil_Dry_P Parameter: Post Timepoint (hr) Value: None
  misc_feature: MA Experiment 20001560 PARAMETER Experiment Name: At_Drought_Soil_Dry_P Parameter: Post-Treatment Value: None
  misc_feature: MA Experiment 20001560 PARAMETER Experiment Name: At_Drought_Soil_Dry_P Parameter: Timepoint (day) Value: 14
  misc_feature: MA Experiment 20001560 PARAMETER Experiment Name: At_Drought_Soil_Dry_P Parameter: Treatment Value: Drought vs. No Drought
  misc_feature: MA Experiment ID: 20001905 Result: Down-regulated in Transcription
  misc_feature: MA Experiment 20001905 PARAMETER Experiment Name: At_Drought_Reproduction_P Parameter: Age (day) Value: 40
  misc_feature: MA Experiment 20001905 PARAMETER Experiment Name: At_Drought_Reproduction_P Parameter: Organism Value: A. thaliana
  misc_feature: MA Experiment 20001905 PARAMETER Experiment Name: At_Drought_Reproduction_P Parameter: Plant Line Value: WS
  misc_feature: MA Experiment 20001905 PARAMETER Experiment Name: At_Drought_Reproduction_P Parameter: Timepoint (day) Value: 10
  misc_feature: MA Experiment 20001905 PARAMETER Experiment Name: At_Drought_Reproduction_P Parameter: Tissue Value: Rosettes
  misc_feature: MA Experiment 20001905 PARAMETER Experiment Name: At_Drought_Reproduction_P Parameter: Treatment Value: Drought vs. No Drought
atatatagtttaatttttttctaggttttcgttcgaactcatgtgggttcagtaaataaatgtttaagtccccatctggccgcgtcaaaaatacttagataacaacaattagtggttgacatagaaaagtaatgattgttgccgcgtagaatgaaattaataaaattataaagaacagtgaagcaataaatgtttccttggcgtcttgaagagtagtcttcttaaatattccagcccaaaaaaaaaaagattctatccattatcaagagaagaaaaaaaatctgaattccaattcgaagaagaagaagaagaagaaaggagatgactatggggaatttcttaaagagatttggaagtggaaaaagcagaagcagtagaaatatgactctgggaacgacgtcgtctcaatctcatgaaccatcaccgtcggatccttcactctcccttgccgataataccaacgccaccaagaagaagtacgctctcatccctgaccgcttctcttccctcgaccaggtatcaaaagctctaagagaagctggtcttgaatcatccaatctcattctcggagttgatttcacaaagagcaacgagtggactgggaaaacttctttcgatggaaaatgtctgcacgcgctcggcgaaacttcgaatccatatgaaaaggcgatttttgtaatcggccaaacgttggctccttttgatgaagacaatctcatcccttgtttcggctttggcgattcaacaactcatgacgaggaagtgttcggtttccatagcgacaattctccatgtcatggcttcgaagaggtcttagcatgttacaagagaattgcacccaacttgcgtctatcagggccaacgtcgtatggaccgctcatcgatgctgctgtcgacattgtggagaagaacaacggacaattccatgttctggtgattgttgcagatggacaggtaacgagaggtacggatatggccgagggagaactcagtcaacaagagaaaacaaccatcgacgcgattgtaaatgcaagctcgtatgctttgtcgattgttttagtcggtgttggagacggaccatgggaagacatgaggaagttcgatgataagatccctaagcgtgaattcgacaactttcagtttgtgaatttcacagagattatgacgagaaactcaccagagtctgccaaagaaactgcttttgctctagctgctctaatggagattccctttcagtatcaagcagccatcgaactccgcttactcgggaagcagacgggcttagcgaagacaatagttccgaggccaccaccaattccgtacacacctccaactaatgctgaactaccatcaactgcatcacctgcatcacctgaacaaacccagagttgcccgatttgtctgactaaccgaaaagacgtggctttcagctgtggccacatgacttgtggagattgcggatccaaaatatcaaattgcccgatctgtcgagtaaggatcacgaaccggctaaagctttacacatgatcaatggccacgaactttttttctgaccacggctttacacgtgatcaatgccaacaaactttatctctgcacataacaaatcgcttgcacatagccatctcctttgtagaatctacaatttggtttgccaagtgtttctgacaatgttccacaatcagcgtgtaccatgtaattctgtatgtactgtaaaacattaactttgcaaacaagaatgaagaagcaatgtacaaattacaaaacataagttttacattttattc

SEQ ID NO: 78099 - protein, 401 aa, Arabidopsis thaliana
  peptide (1)..(401): Ceres Seq. ID no. 12605609
  misc_feature (1)..(401): Homolog of NCBI NO: 18412353 NR Description: expressed protein; protein id: At1g79380.1, by cDNA: gi_13937148 [Arabidopsis thaliana]
  misc_feature (3)..(399): Homolog of NCBI NO: 18481708 NR Description: hypothetical protein [Sorghum bicolor]
  misc_feature (27)..(355): Homolog of NCBI NO: 15241400 NR Description: putative protein; protein id: At5g14420.1, by cDNA: gi_20466261 [Arabidopsis thaliana]
  misc_feature (330)..(400): Homolog of NCBI NO: 15241400 NR Description: putative protein; protein id: At5g14420.1, by cDNA: gi_20466261 [Arabidopsis thaliana]
  misc_feature (24)..(400): Homolog of NCBI NO: 15232157 NR Description: unknown protein; protein id: At3g01650.1 thaliana] >gi|6016736|gb|AAF01562.1|AC009325_32 unknown protein
  misc_feature (11)..(350): Homolog of NCBI NO: 18408863 NR Description: F12A21.7; protein id: At1g67800.1, supported by
  misc_feature (333)..(400): Homolog of NCBI NO: 18408863 NR Description: F12A21.7; protein id: At1g67800.1, supported by
  misc_feature (11)..(350): Homolog of NCBI NO: 30697566 NR Description: copine-related [Arabidopsis thaliana]
  misc_feature (333)..(400): Homolog of NCBI NO: 30697566 NR Description: copine-related [Arabidopsis thaliana]
  misc_feature (46)..(401): Homolog of NCBI NO: 22328041 NR Description: putative protein; protein id: At5g63970.1, by cDNA: gi_20259325 [Arabidopsis thaliana] unknown protein [Arabidopsis thaliana]
MTMGNFLKRFGSGKSRSSRNMTLGTTSSQSHEPSPSDPSLSLADNTNATKKKYALIPDRFSSLDQVSKALREAGLESSNLILGVDFTKSNEWTGKTSFDGKCLHALGETSNPYEKAIFVIGQTLAPFDEDNLIPCFGFGDSTTHDEEVFGFHSDNSPCHGFEEVLACYKRIAPNLRLSGPTSYGPLIDAAVDIVEKNNGQFHVLVIVADGQVTRGTDMAEGELSQQEKTTIDAIVNASSYALSIVLVGVGDGPWEDMRKFDDKIPKREFDNFQFVNFTEIMTRNSPESAKETAFALAALMEIPFQYQAAIELRLLGKQTGLAKTIVPRPPPIPYTPPTNAELPSTASPASPEQTQSCPICLTNRKDVAFSCGHMTCGDCGSKISNCPICRVRITNRLKLYT

SEQ ID NO: 78100 - protein, 399 aa, Arabidopsis thaliana
  peptide (1)..(399): Ceres Seq. ID no. 12605610
  misc_feature (1)..(399): Homolog of NCBI NO: 18412353 NR Description: expressed protein; protein id: At1g79380.1, by cDNA: gi_13937148 [Arabidopsis thaliana]
  misc_feature (1)..(397): Homolog of NCBI NO: 18481708 NR Description: hypothetical protein [Sorghum bicolor]
  misc_feature (25)..(353): Homolog of NCBI NO: 15241400 NR Description: putative protein; protein id: At5g14420.1, by cDNA: gi_20466261 [Arabidopsis thaliana]
  misc_feature (328)..(398): Homolog of NCBI NO: 15241400 NR Description: putative protein; protein id: At5g14420.1, by cDNA: gi_20466261 [Arabidopsis thaliana]
  misc_feature (22)..(398): Homolog of NCBI NO: 15232157 NR Description: unknown protein; protein id: At3g01650.1 thaliana] >gi|6016736|gb|AAF01562.1|AC009325_32 unknown protein
  misc_feature (9)..(348): Homolog of NCBI NO: 18408863 NR Description: F12A21.7; protein id: At1g67800.1, supported by
  misc_feature (331)..(398): Homolog of NCBI NO: 18408863 NR Description: F12A21.7; protein id: At1g67800.1, supported by
  misc_feature (9)..(348): Homolog of NCBI NO: 30697566 NR Description: copine-related [Arabidopsis thaliana]
  misc_feature (331)..(398): Homolog of NCBI NO: 30697566 NR Description: copine-related [Arabidopsis thaliana]
  misc_feature (44)..(399): Homolog of NCBI NO: 22328041 NR Description: putative protein; protein id: At5g63970.1, by cDNA: gi_20259325 [Arabidopsis thaliana] unknown protein [Arabidopsis thaliana]
MGNFLKRFGSGKSRSSRNMTLGTTSSQSHEPSPSDPSLSLADNTNATKKKYALIPDRFSSLDQVSKALREAGLESSNLILGVDFTKSNEWTGKTSFDGKCLHALGETSNPYEKAIFVIGQTLAPFDEDNLIPCFGFGDSTTHDEEVFGFHSDNSPCHGFEEVLACYKRIAPNLRLSGPTSYGPLIDAAVDIVEKNNGQFHVLVIVADGQVTRGTDMAEGELSQQEKTTIDAIVNASSYALSIVLVGVGDGPWEDMRKFDDKIPKREFDNFQFVNFTEIMTRNSPESAKETAFALAALMEIPFQYQAAIELRLLGKQTGLAKTIVPRPPPIPYTPPTNAELPSTASPASPEQTQSCPICLTNRKDVAFSCGHMTCGDCGSKISNCPICRVRITNRLKLYT

SEQ ID NO: 78101 - protein, 381 aa, Arabidopsis thaliana
  peptide (1)..(381): Ceres Seq. ID no. 12605611
  misc_feature (1)..(381): Homolog of NCBI NO: 18412353 NR Description: expressed protein; protein id: At1g79380.1, by cDNA: gi_13937148 [Arabidopsis thaliana]
  misc_feature (1)..(379): Homolog of NCBI NO: 18481708 NR Description: hypothetical protein [Sorghum bicolor]
  misc_feature (7)..(335): Homolog of NCBI NO: 15241400 NR Description: putative protein; protein id: At5g14420.1, by cDNA: gi_20466261 [Arabidopsis thaliana]
  misc_feature (310)..(380): Homolog of NCBI NO: 15241400 NR Description: putative protein; protein id: At5g14420.1, by cDNA: gi_20466261 [Arabidopsis thaliana]
  misc_feature (4)..(380): Homolog of NCBI NO: 15232157 NR Description: unknown protein; protein id: At3g01650.1 thaliana] >gi|6016736|gb|AAF01562.1|AC009325_32 unknown protein
  misc_feature (1)..(330): Homolog of NCBI NO: 18408863 NR Description: F12A21.7; protein id: At1g67800.1, supported by
  misc_feature (313)..(380): Homolog of NCBI NO: 18408863 NR Description: F12A21.7; protein id: At1g67800.1, supported by
  misc_feature (1)..(330): Homolog of NCBI NO: 30697566 NR Description: copine-related [Arabidopsis thaliana]
  misc_feature (313)..(380): Homolog of NCBI NO: 30697566 NR Description: copine-related [Arabidopsis thaliana]
  misc_feature (26)..(381): Homolog of NCBI NO: 22328041 NR Description: putative protein; protein id: At5g63970.1, by cDNA: gi_20259325 [Arabidopsis thaliana] unknown protein [Arabidopsis thaliana]
MTLGTTSSQSHEPSPSDPSLSLADNTNATKKKYALIPDRFSSLDQVSKALREAGLESSNLILGVDFTKSNEWTGKTSFDGKCLHALGETSNPYEKAIFVIGQTLAPFDEDNLIPCFGFGDSTTHDEEVFGFHSDNSPCHGFEEVLACYKRIAPNLRLSGPTSYGPLIDAAVDIVEKNNGQFHVLVIVADGQVTRGTDMAEGELSQQEKTTIDAIVNASSYALSIVLVGVGDGPWEDMRKFDDKIPKREFDNFQFVNFTEIMTRNSPESAKETAFALAALMEIPFQYQAAIELRLLGKQTGLAKTIVPRPPPIPYTPPTNAELPSTASPASPEQTQSCPICLTNRKDVAFSCGHMTCGDCGSKISNCPICRVRITNRLKLYT

SEQ ID NO: 78102 - DNA, 1619 bp, Arabidopsis thaliana
  misc_feature (1)..(1619): Ceres Seq. ID no. 12605734
  misc_feature: MA Experiment ID: 20000173 Result: Down-regulated in Transcription
  misc_feature: MA Experiment 20000173 PARAMETER Experiment Name: At_42deg_Heat_P Parameter: Age (day) Value: 14
  misc_feature: MA Experiment 20000173 PARAMETER Experiment Name: At_42deg_Heat_P Parameter: Organism Value: A. thaliana
  misc_feature: MA Experiment 20000173 PARAMETER Experiment Name: At_42deg_Heat_P Parameter: Plant Line Value: WS
  misc_feature: MA Experiment 20000173 PARAMETER Experiment Name: At_42deg_Heat_P Parameter: Temperature (deg C) Value: 42 vs. 22
  misc_feature: MA Experiment 20000173 PARAMETER Experiment Name: At_42deg_Heat_P Parameter: Timepoint (hr) Value: 6
  misc_feature: MA Experiment 20000173 PARAMETER Experiment Name: At_42deg_Heat_P Parameter: Tissue Value: Aerial
  misc_feature: MA Experiment ID: 20000180 Result: Up-regulated in Transcription
  misc_feature: MA Experiment 20000180 PARAMETER Experiment Name: At_Germinating_Seeds_P Parameter: Age (hr) Value: 24 vs. 0
  misc_feature: MA Experiment 20000180 PARAMETER Experiment Name: At_Germinating_Seeds_P Parameter: Tissue Value: Germinating Seeds
  misc_feature: MA Experiment ID: 20000185 Result: Down-regulated in Transcription
  misc_feature: MA Experiment 20000185 PARAMETER Experiment Name: At_Roots__P Parameter: Age (day) Value: 7 vs. 21
  misc_feature: MA Experiment 20000185 PARAMETER Experiment Name: At_Roots__P Parameter: Organism Value: A. thaliana
  misc_feature: MA Experiment 20000185 PARAMETER Experiment Name: At_Roots__P Parameter: Tissue Value: Roots vs. Whole Plant
  misc_feature: MA Experiment ID: 20000234 Result: Up-regulated in Transcription
  misc_feature: MA Experiment 20000234 PARAMETER Experiment Name: At_Siliques_P Parameter: Age (day) Value: 21
  misc_feature: MA Experiment 20000234 PARAMETER Experiment Name: At_Siliques_P Parameter: Organism Value: A. thaliana
  misc_feature: MA Experiment 20000234 PARAMETER Experiment Name: At_Siliques_P Parameter: Plant Line Value: WS
  misc_feature: MA Experiment 20000234 PARAMETER Experiment Name: At_Siliques_P Parameter: Tissue Value: Less Than 5mm Siliques vs. Whole Plant
  misc_feature: MA Experiment ID: 20000235 Result: Up-regulated in Transcription
  misc_feature: MA Experiment 20000235 PARAMETER Experiment Name: At_Siliques_P Parameter: Age (day) Value: 21
  misc_feature: MA Experiment 20000235 PARAMETER Experiment Name: At_Siliques_P Parameter: Organism Value: A. thaliana
  misc_feature: MA Experiment 20000235 PARAMETER Experiment Name: At_Siliques_P Parameter: Plant Line Value: WS
  misc_feature: MA Experiment 20000235 PARAMETER Experiment Name: At_Siliques_P Parameter: Tissue Value: 5-10mm Siliques vs. Whole Plant
  misc_feature: MA Experiment ID: 20000264 Result: Up-regulated in Transcription
  misc_feature: MA Experiment 20000264 PARAMETER Experiment Name: At_Open_Flower_P Parameter: Age (day) Value: 21
  misc_feature: MA Experiment 20000264 PARAMETER Experiment Name: At_Open_Flower_P Parameter: Plant Line Value: WS
  misc_feature: MA Experiment 20000264 PARAMETER Experiment Name: At_Open_Flower_P Parameter: Tissue Value: Open Flower vs. Whole Plant
  misc_feature: MA Experiment ID: 20000265 Result: Up-regulated in Transcription
  misc_feature: MA Experiment 20000265 PARAMETER Experiment Name: At_Open_Flower_P Parameter: Age (day) Value: 21
  misc_feature: MA Experiment 20000265 PARAMETER Experiment Name: At_Open_Flower_P Parameter: Plant Line Value: WS
  misc_feature: MA Experiment 20000265 PARAMETER Experiment Name: At_Open_Flower_P Parameter: Tissue Value: Closed Flower vs. Whole Plant
  misc_feature: MA Experiment ID: 20000286 Result: Up-regulated in Transcription
  misc_feature: MA Experiment 20000286 PARAMETER Experiment Name: At_Open_Flower_P Parameter: Age (day) Value: 21
  misc_feature: MA Experiment 20000286 PARAMETER Experiment Name: At_Open_Flower_P Parameter: Plant Line Value: WS
  misc_feature: MA Experiment 20000286 PARAMETER Experiment Name: At_Open_Flower_P Parameter: Tissue Value: Half Open vs. Whole Plant
  misc_feature: MA Experiment ID: 20000439 Result: Down-regulated in Transcription
  misc_feature: MA Experiment 20000439 PARAMETER Experiment Name: At_Roots__P Parameter: Age (day) Value: 14 vs. 21
  misc_feature: MA Experiment 20000439 PARAMETER Experiment Name: At_Roots__P Parameter: Organism Value: A. thaliana
  misc_feature: MA Experiment 20000439 PARAMETER Experiment Name: At_Roots__P Parameter: Tissue Value: Roots vs. Whole Plant
  misc_feature: MA Experiment ID: 20000451 Result: Up-regulated in Transcription
  misc_feature: MA Experiment 20000451 PARAMETER Experiment Name: At_CS6879_Shoots-Roots_P Parameter: Age (day) Value: 14
  misc_feature: MA Experiment 20000451 PARAMETER Experiment Name: At_CS6879_Shoots-Roots_P Parameter: Organism Value: A. thaliana
  misc_feature: MA Experiment 20000451 PARAMETER Experiment Name: At_CS6879_Shoots-Roots_P Parameter: Plant Line Value: CS6879 vs. WS
  misc_feature: MA Experiment 20000451 PARAMETER Experiment Name: At_CS6879_Shoots-Roots_P Parameter: Tissue Value: Roots
  misc_feature: MA Experiment ID: 20000794 Result: Up-regulated in Transcription
  misc_feature: MA Experiment 20000794 PARAMETER Experiment Name: At_Petals_P Parameter: Age (day) Value: 23-25 days
  misc_feature: MA Experiment 20000794 PARAMETER Experiment Name: At_Petals_P Parameter: Plant Line Value: WS
  misc_feature: MA Experiment 20000794 PARAMETER Experiment Name: At_Petals_P Parameter: Tissue Value: Petals vs. Whole plant
  misc_feature: MA Experiment ID: 20001451 Result: Down-regulated in Transcription
  misc_feature: MA Experiment 20001451 PARAMETER Experiment Name: At_Far-red-induction_P Parameter: Age (day) Value: 7
  misc_feature: MA Experiment 20001451 PARAMETER Experiment Name: At_Far-red-induction_P Parameter: Light Value: Far-red vs. White
  misc_feature: MA Experiment 20001451 PARAMETER Experiment Name: At_Far-red-induction_P Parameter: Organism Value: A. thaliana
  misc_feature: MA Experiment 20001451 PARAMETER Experiment Name: At_Far-red-induction_P Parameter: Plant Line Value: Columbia
  misc_feature: MA Experiment 20001451 PARAMETER Experiment Name: At_Far-red-induction_P Parameter: Timepoint (hr) Value: 24
  misc_feature: MA Experiment 20001451 PARAMETER Experiment Name: At_Far-red-induction_P Parameter: Tissue Value: Whole Plant
  misc_feature: MA Experiment ID: 20001558 Result: Up-regulated in Transcription
  misc_feature: MA Experiment 20001558 PARAMETER Experiment Name: At_Drought_Soil_Dry_P Parameter: Age (day) Value: 27
  misc_feature: MA Experiment 20001558 PARAMETER Experiment Name: At_Drought_Soil_Dry_P Parameter: Organism Value: A. thaliana
  misc_feature: MA Experiment 20001558 PARAMETER Experiment Name: At_Drought_Soil_Dry_P Parameter: Plant Line Value: WS
  misc_feature: MA Experiment 20001558 PARAMETER Experiment Name: At_Drought_Soil_Dry_P Parameter: Post Timepoint (hr) Value: 6
  misc_feature: MA Experiment 20001558 PARAMETER Experiment Name: At_Drought_Soil_Dry_P Parameter: Post-Treatment Value: Re-Water vs. No Drought
  misc_feature: MA Experiment 20001558 PARAMETER Experiment Name: At_Drought_Soil_Dry_P Parameter: Timepoint (day) Value: 13
  misc_feature: MA Experiment 20001558 PARAMETER Experiment Name: At_Drought_Soil_Dry_P Parameter: Treatment Value: Drought vs. No Drought
  misc_feature: MA Experiment ID: 20001911 Result: Down-regulated in Transcription
  misc_feature: MA Experiment 20001911 PARAMETER Experiment Name: At_Drought_Reproduction_P Parameter: Age (day) Value: 40
  misc_feature: MA Experiment 20001911 PARAMETER Experiment Name: At_Drought_Reproduction_P Parameter: Organism Value: A. thaliana
  misc_feature: MA Experiment 20001911 PARAMETER Experiment Name: At_Drought_Reproduction_P Parameter: Plant Line Value: WS
  misc_feature: MA Experiment 20001911 PARAMETER Experiment Name: At_Drought_Reproduction_P Parameter: Timepoint (day) Value: 10
  misc_feature: MA Experiment 20001911 PARAMETER Experiment Name: At_Drought_Reproduction_P Parameter: Tissue Value: Flowers
  misc_feature: MA Experiment 20001911 PARAMETER Experiment Name: At_Drought_Reproduction_P Parameter: Treatment Value: Drought vs. No Drought
agttccttttccacttttaaccatcaccctataagtggttataactagtaacttgaaatagaaacactctatctctaaaagaggcaaccaaacaaacaaggtctagctttttataaccaaactctgcttctgaacagagttagtcaaagagagagaagccatggaagctatgaaggagactgtggaggagagcttgagagagatgagagagacgtttgcgagtgggaggacgaggagtctgaagtggaggaaggcacagatcggagctatatacgagatggttaaagacaacgaagacaagatctgcaatgctctgtttcaagatttgggcaaacacagtactgaagcttttagagatgagcttggtgttgtcttgcgaacagctactgttgcaatcaactgtcttgataaatgggccgtccccaaacatagcaaacttcctctgttgttctacccagcaaaagggaaagtcatatcggaaccctatgggacggttcttgttctgtctagctggaattttcctatatctttgtctctggatccattgattggggcaatagcagcaggaaataccgtgcttctcaagtcatctgaactaagccctaacgcatctgccttccttgccaagacaattccagcttatctcgatactaaagccatcaaagttatcgaaggaggacctgatgtcgctactatcctcttgcagcatcaatgggacaagatcttcttcaccgggagtcccaagattggaaggatcataatggctgcagcagcacagcatctgactcctgtgacattggagcttggtggaaaatcttgtatctctgtagattacgttcttatcgaaaagagtttcgcgcctactctgattgatatgttgaagcctacgataaagtctttctttggcgaaaatcctaaagaatctggatgtctctcaaggattgcaaacaagcaccacgttcagagactgtctcgtcttcttagcgatcctcgtccaacgatcttgttggaccctcctcttgattctgagatcatgaatgaagagatctttggtccaattctcccgattatcacggtacgtgacatccaagaaagcatagggatcattaatacaaaaccgaagccacttgccatttatgcattcacaaatgacgagaaccttaaaactagaattttgtcagaaacatcctcaggaagtgttaccttcaatgacgtcatgatccagtatatgtgtgatgcgttaccttttggaggagtgggagaaagtggaatagggaggtatcacgggaaatactcatttgattgtttcagtcacgagaaagcaataatggaaggaagcttaggtatggatcttgaagctcgataccctccatggaacaacttcaagctcaccttcatcagactcgcatttcgtgaagcttacttcaagcttatcctccttatgcttggtcttaaaagataaaagggggaaagtgagagacagagacacatacacacaaacagagacaatataagtgattgaattacatcacacttatgtttgcttatcatatcttcacctaataagtctcattccgaatgttttacatttctttcaagcttgagagattctatataaa

SEQ ID NO: 78103 - protein, 433 aa, Arabidopsis thaliana
  peptide (1)..(433): Ceres Seq. ID no. 12605735
  misc_feature (1)..(393): Pfam Name: Aldehyde dehydrogenase family Pfam Description: Aldehyde dehydrogenase family
  misc_feature (1)..(433): Homolog of NCBI NO: 15234364 NR Description: aldehyde dehydrogenase like protein; protein id: [Arabidopsis thaliana] >gi|7431493|pir||T04594 aldehyde
  misc_feature (217)..(433): Homolog of NCBI NO: 33317836 NR Description: aldehyde dehydrogenase [Oryza sativa (indica group)] >gi|38344982|emb|CAE02788.2| OSJNBa0011L07.12 [Oryza
  misc_feature (6)..(221): Homolog of NCBI NO: 33317836 NR Description: aldehyde dehydrogenase [Oryza sativa (indica group)] >gi|38344982|emb|CAE02788.2| OSJNBa0011L07.12 [Oryza
  misc_feature (14)..(224): Homolog of NCBI NO: 15219358 NR Description: aldehyde dehydrogenase, putative; protein id: supported by cDNA: 1141., supported by cDNA: gi_18175878
  misc_feature (14)..(224): Homolog of NCBI NO: 21536879 NR Description: aldehyde dehydrogenase, putative [Arabidopsis
  misc_feature (279)..(431): Homolog of NCBI NO: 15219358 NR Description: aldehyde dehydrogenase, putative; protein id: supported by cDNA: 1141., supported by cDNA: gi_18175878
  misc_feature (279)..(431): Homolog of NCBI NO: 21536879 NR Description: aldehyde dehydrogenase, putative [Arabidopsis
  misc_feature (217)..(276): Homolog of NCBI NO: 15219358 NR Description: aldehyde dehydrogenase, putative; protein id: supported by cDNA: 1141., supported by cDNA: gi_18175878
  misc_feature (217)..(276): Homolog of NCBI NO: 21536879 NR Description: aldehyde dehydrogenase, putative [Arabidopsis
  misc_feature (1)..(224): Homolog of NCBI NO: 18418408 NR Description: putative aldehyde dehydrogenase; protein id: supported by cDNA: gi_15451105, supported by cDNA: gi_20148406 thaliana] >gi|15451106|gb|AAK96824.1| putative aldehyde
MEAMKETVEESLREMRETFASGRTRSLKWRKAQIGAIYEMVKDNEDKICNALFQDLGKHSTEAFRDELGVVLRTATVAINCLDKWAVPKHSKLPLLFYPAKGKVISEPYGTVLVLSSWNFPISLSLDPLIGAIAAGNTVLLKSSELSPNASAFLAKTIPAYLDTKAIKVIEGGPDVATILLQHQWDKIFFTGSPKIGRIIMAAAAQHLTPVTLELGGKSCISVDYVLIEKSFAPTLIDMLKPTIKSFFGENPKESGCLSRIANKHHVQRLSRLLSDPRPTILLDPPLDSEIMNEEIFGPILPIITVRDIQESIGIINTKPKPLAIYAFTNDENLKTRILSETSSGSVTFNDVMIQYMCDALPFGGVGESGIGRYHGKYSFDCFSHEKAIMEGSLGMDLEARYPPWNNFKLTFIRLAFREAYFKLILLMLGLKR

SEQ ID NO: 78104 - protein, 430 aa, Arabidopsis thaliana
  peptide (1)..(430): Ceres Seq. ID no. 12605736
  misc_feature (1)..(390): Pfam Name: Aldehyde dehydrogenase family Pfam Description: Aldehyde dehydrogenase family
  misc_feature (1)..(430): Homolog of NCBI NO: 15234364 NR Description: aldehyde dehydrogenase like protein; protein id: [Arabidopsis thaliana] >gi|7431493|pir||T04594 aldehyde
  misc_feature (214)..(430): Homolog of NCBI NO: 33317836 NR Description: aldehyde dehydrogenase [Oryza sativa (indica group)] >gi|38344982|emb|CAE02788.2| OSJNBa0011L07.12 [Oryza
  misc_feature (3)..(218): Homolog of NCBI NO: 33317836 NR Description: aldehyde dehydrogenase [Oryza sativa (indica group)] >gi|38344982|emb|CAE02788.2| OSJNBa0011L07.12 [Oryza
  misc_feature (11)..(221): Homolog of NCBI NO: 15219358 NR Description: aldehyde dehydrogenase, putative; protein id: supported by cDNA: 1141., supported by cDNA: gi_18175878
  misc_feature (11)..(221): Homolog of NCBI NO: 21536879 NR Description: aldehyde dehydrogenase, putative [Arabidopsis
  misc_feature (276)..(428): Homolog of NCBI NO: 15219358 NR Description: aldehyde dehydrogenase, putative; protein id: supported by cDNA: 1141., supported by cDNA: gi_18175878
  misc_feature (276)..(428): Homolog of NCBI NO: 21536879 NR Description: aldehyde dehydrogenase, putative [Arabidopsis
  misc_feature (214)..(273): Homolog of NCBI NO: 15219358 NR Description: aldehyde dehydrogenase, putative; protein id: supported by cDNA: 1141., supported by cDNA: gi_18175878
  misc_feature (214)..(273): Homolog of NCBI NO: 21536879 NR Description: aldehyde dehydrogenase, putative [Arabidopsis
  misc_feature (1)..(221): Homolog of NCBI NO: 18418408 NR Description: putative aldehyde dehydrogenase; protein id: supported by cDNA: gi_15451105, supported by cDNA: gi_20148406 thaliana] >gi|15451106|gb|AAK96824.1| putative aldehyde
MKETVEESLREMRETFASGRTRSLKWRKAQIGAIYEMVKDNEDKICNALFQDLGKHSTEAFRDELGVVLRTATVAINCLDKWAVPKHSKLPLLFYPAKGKVISEPYGTVLVLSSWNFPISLSLDPLIGAIAAGNTVLLKSSELSPNASAFLAKTIPAYLDTKAIKVIEGGPDVATILLQHQWDKIFFTGSPKIGRIIMAAAAQHLTPVTLELGGKSCISVDYVLIEKSFAPTLIDMLKPTIKSFFGENPKESGCLSRIANKHHVQRLSRLLSDPRPTILLDPPLDSEIMNEEIFGPILPIITVRDIQESIGIINTKPKPLAIYAFTNDENLKTRILSETSSGSVTFNDVMIQYMCDALPFGGVGESGIGRYHGKYSFDCFSHEKAIMEGSLGMDLEARYPPWNNFKLTFIRLAFREAYFKLILLMLGLKR

SEQ ID NO: 78105 - protein, 419 aa, Arabidopsis thaliana
  peptide (1)..(419): Ceres Seq. ID no. 12605737
  misc_feature (1)..(379): Pfam Name: Aldehyde dehydrogenase family Pfam Description: Aldehyde dehydrogenase family
  misc_feature (1)..(419): Homolog of NCBI NO: 15234364 NR Description: aldehyde dehydrogenase like protein; protein id: [Arabidopsis thaliana] >gi|7431493|pir||T04594 aldehyde
  misc_feature (203)..(419): Homolog of NCBI NO: 33317836 NR Description: aldehyde dehydrogenase [Oryza sativa (indica group)] >gi|38344982|emb|CAE02788.2| OSJNBa0011L07.12 [Oryza
  misc_feature (1)..(207): Homolog of NCBI NO: 33317836 NR Description: aldehyde dehydrogenase [Oryza sativa (indica group)] >gi|38344982|emb|CAE02788.2| OSJNBa0011L07.12 [Oryza
  misc_feature (1)..(210): Homolog of NCBI NO: 15219358 NR Description: aldehyde dehydrogenase, putative; protein id: supported by cDNA: 1141., supported by cDNA: gi_18175878
  misc_feature (1)..(210): Homolog of NCBI NO: 21536879 NR Description: aldehyde dehydrogenase, putative [Arabidopsis
  misc_feature (265)..(417): Homolog of NCBI NO: 15219358 NR Description: aldehyde dehydrogenase, putative; protein id: supported by cDNA: 1141., supported by cDNA: gi_18175878
  misc_feature (265)..(417): Homolog of NCBI NO: 21536879 NR Description: aldehyde dehydrogenase, putative [Arabidopsis
  misc_feature (203)..(262): Homolog of NCBI NO: 15219358 NR Description: aldehyde dehydrogenase, putative; protein id: supported by cDNA: 1141., supported by cDNA: gi_18175878
  misc_feature (203)..(262): Homolog of NCBI NO: 21536879 NR Description: aldehyde dehydrogenase, putative [Arabidopsis
  misc_feature (1)..(210): Homolog of NCBI NO: 18418408 NR Description: putative aldehyde dehydrogenase; protein id: supported by cDNA: gi_15451105, supported by cDNA: gi_20148406 thaliana] >gi|15451106|gb|AAK96824.1| putative aldehyde
MRETFASGRTRSLKWRKAQIGAIYEMVKDNEDKICNALFQDLGKHSTEAFRDELGVVLRTATVAINCLDKWAVPKHSKLPLLFYPAKGKVISEPYGTVLVLSSWNFPISLSLDPLIGAIAAGNTVLLKSSELSPNASAFLAKTIPAYLDTKAIKVIEGGPDVATILLQHQWDKIFFTGSPKIGRIIMAAAAQHLTPVTLELGGKSCISVDYVLIEKSFAPTLIDMLKPTIKSFFGENPKESGCLSRIANKHHVQRLSRLLSDPRPTILLDPPLDSEIMNEEIFGPILPIITVRDIQESIGIINTKPKPLAIYAFTNDENLKTRILSETSSGSVTFNDVMIQYMCDALPFGGVGESGIGRYHGKYSFDCFSHEKAIMEGSLGMDLEARYPPWNNFKLTFIRLAFREAYFKLILLMLGLKR

SEQ ID NO: 78106 - DNA, 1327 bp, Arabidopsis thaliana
  misc_feature (1)..(1327): Ceres Seq. ID no. 12606109
  misc_feature: MA Experiment ID: 108434 Result: Down-regulated in Transcription
  misc_feature: MA Experiment 108434 PARAMETER Experiment Name: At_Root_Tips_cDNA_P Parameter: Tissue Value: Root Tips
  misc_feature: MA Experiment ID: 108488 Result: Down-regulated in Transcription
  misc_feature: MA Experiment ID: 108501 Result: Up-regulated in Transcription
  misc_feature: MA Experiment 108501 PARAMETER Experiment Name: At_ap2_floral_buds_cDNA_P Parameter: Plant Line Value: ap2 (Ler.)
  misc_feature: MA Experiment 108501 PARAMETER Experiment Name: At_ap2_floral_buds_cDNA_P Parameter: Tissue Value: Closed Flower
  misc_feature: MA Experiment ID: 108569 Result: Up-regulated in Transcription
  misc_feature: MA Experiment 108569 PARAMETER Experiment Name: At_0.001%_MeJA__cDNA_P Parameter: Timepoint (hr) Value: 6
  misc_feature: MA Experiment 108569 PARAMETER Experiment Name: At_0.001%_MeJA__cDNA_P Parameter: Tissue Value: Aerial
  misc_feature: MA Experiment 108569 PARAMETER Experiment Name: At_0.001%_MeJA__cDNA_P Parameter: Treatment Value: 0.001% MeJA vs. No Treatment
  misc_feature: MA Experiment ID: 108573 Result: Up-regulated in Transcription
  misc_feature: MA Experiment 108573 PARAMETER Experiment Name: At_Drought_cDNA_P Parameter: Timepoint (hr) Value: 6
  misc_feature: MA Experiment 108573 PARAMETER Experiment Name: At_Drought_cDNA_P Parameter: Tissue Value: Aerial
  misc_feature: MA Experiment 108573 PARAMETER Experiment Name: At_Drought_cDNA_P Parameter: Treatment Value: Drought vs. No Drought
  misc_feature: MA Experiment ID: 108594 Result: Down-regulated in Transcription
  misc_feature: MA Experiment 108594 PARAMETER Experiment Name: At_Ler-rhl_Root_cDNA_P Parameter: Plant Line Value: null
  misc_feature: MA Experiment ID: 20000227 Result: Down-regulated in Transcription
  misc_feature: MA Experiment 20000227 PARAMETER Experiment Name: At_Root-Tips-vs-Tops_P Parameter: Tissue Value: Root Tips vs. Root Tops
  misc_feature: MA Experiment ID: 20000235 Result: Down-regulated in Transcription
  misc_feature: MA Experiment 20000235 PARAMETER Experiment Name: At_Siliques_P Parameter: Age (day) Value: 21
  misc_feature: MA Experiment 20000235 PARAMETER Experiment Name: At_Siliques_P Parameter: Organism Value: A. thaliana
  misc_feature: MA Experiment 20000235 PARAMETER Experiment Name: At_Siliques_P Parameter: Plant Line Value: WS
  misc_feature: MA Experiment 20000235 PARAMETER Experiment Name: At_Siliques_P Parameter: Tissue Value: 5-10mm Siliques vs. Whole Plant
aatgaagcattagaagaatcatttccacacgattttccctgtgatttcttcatttccggcgacttaaaacggtgtctagcaaaatgagccgaccacaagatccaccccgaggtttcttcccatttggaaatccctttcggatgttatcatcaaagggatcagatttatcgccatggctactttctctattgaacggctttgagctacgtttggaagagagactgaagaaacttatgcctaagaacaaagatgacatcctcactttatcctggatgaagctagctatggagtcactctgcgagactcataagaacattaacactctcattactgatctccagcttcctgtctctgattgggaagagaaatgggttgatgtttacctcaacataagcgttaggttactagatctctgtaatgcctttagctctgagctcacacgtctcaaccagggagatctcttcctcaagtgtgttctgcacaatttacaatcggattctggggagaagtatctccaggctcgatcttcgcttgatagctggaggcaacatgttaatacaaacaaccctagaattgaaaactgccgtgcggttctagacagtcttgttaaatctctgagtctgcctaaagtcaagaactcgcctaaaggaaaggttctgatgcgagctttttatggtgtgaaggttcaaacagtttatatctgcagtgtatttaccgcagcctggtctgattccaccaaggatcttttcgatttacctgtctctgaaaaaccattatgggcaaaggtctttactgatatgcagagtgttgtaaatgctgagatcagagacatgttgtcttccggtagaaccacgattctcaaagagctggagagcgttgatgctagtgtcgagaagctatacccgatgatccaagatggcgttgatcctgtcgaagttgaattcttcaaagataatgttatggaattggggacacaagctgagaaattgtctcaagggttggatcagttactggaggaagttgatagtttctttaaactgactttgagagggcgcgatgtgttgctctgtaatcttaggtcaagtgactcaatctctggcaatgcagttggagaagatgtagactaaaatagtgaggtaaacaaacaagtttaacccttacaaaaggcagctttaggttctataaatagtgttttctcttttttctttgttttgagtccatctgtcgagcttgtctcttccgtttaggtgtgttggtcttgtatgtgtgactgtatgaaatcaattctgcaataaaatataaatatagaatacatctgtttggcttg

SEQ ID NO: 78107 - protein, 347 aa, Arabidopsis thaliana; identical to SEQ ID NO: 50019
  peptide (1)..(347): Ceres Seq. ID no. 12606110
  misc_feature (1)..(347): Homolog of NCBI NO: 18406969 NR Description: expressed protein; protein id: At2g46080.1, by cDNA: gi_16604341, supported by cDNA: gi_18252158 [Arabidopsis >gi|25341889|pir||E84898 hypothetical protein At2g46080
  misc_feature (1)..(347): Homolog of NCBI NO: 16604342 NR Description: At2g46080/T3F17.27 [Arabidopsis thaliana]
  misc_feature (1)..(333): Homolog of NCBI NO: 18378853 NR Description: expressed protein; protein id: At1g01550.1, by cDNA: gi_13194833, supported by cDNA: gi_16648870, supported cDNA: gi_17380899, supported by cDNA: gi_20259586 [Arabidopsis
  misc_feature (1)..(273): Homolog of NCBI NO: 37536014 NR Description: unknown protein [Oryza sativa (japonica
  misc_feature (292)..(338): Homolog of NCBI NO: 37536014 NR Description: unknown protein [Oryza sativa (japonica
  misc_feature (16)..(331): Homolog of NCBI NO: 28392962 NR Description: unknown protein [Arabidopsis thaliana]
  misc_feature (16)..(331): Homolog of NCBI NO: 7485228 NR Description: hypothetical protein A_IG002N01.26 - Arabidopsis >gi|2191147|gb|AAB61034.1| A_IG002N01.26 gene product thaliana] >gi|7267633|emb|CAB80945.1| hypothetical protein
  misc_feature (16)..(331): Homolog of NCBI NO: 30678866 NR Description: expressed protein [Arabidopsis thaliana]
  misc_feature (68)..(327): Homolog of NCBI NO: 15233126 NR Description: putative protein; protein id: At3g61500.1

SEQ ID NO: 78108 - protein, 328 aa, Arabidopsis thaliana; identical to SEQ ID NO: 50020
  peptide (1)..(328): Ceres Seq. ID no. 12606111
  misc_feature (1)..(328): Homolog of NCBI NO: 18406969 NR Description: expressed protein; protein id: At2g46080.1, by cDNA: gi_16604341, supported by cDNA: gi_18252158 [Arabidopsis >gi|25341889|pir||E84898 hypothetical protein At2g46080
  misc_feature (1)..(328): Homolog of NCBI NO: 16604342 NR Description: At2g46080/T3F17.27 [Arabidopsis thaliana]
  misc_feature (1)..(314): Homolog of NCBI NO: 18378853 NR Description: expressed protein; protein id: At1g01550.1, by cDNA: gi_13194833, supported by cDNA: gi_16648870, supported cDNA: gi_17380899, supported by cDNA: gi_20259586 [Arabidopsis
  misc_feature (1)..(254): Homolog of NCBI NO: 37536014 NR Description: unknown protein [Oryza sativa (japonica
  misc_feature (273)..(319): Homolog of NCBI NO: 37536014 NR Description: unknown protein [Oryza sativa (japonica
  misc_feature (1)..(312): Homolog of NCBI NO: 28392962 NR Description: unknown protein [Arabidopsis thaliana]
  misc_feature (1)..(312): Homolog of NCBI NO: 7485228 NR Description: hypothetical protein A_IG002N01.26 - Arabidopsis >gi|2191147|gb|AAB61034.1| A_IG002N01.26 gene product thaliana] >gi|7267633|emb|CAB80945.1| hypothetical protein
  misc_feature (1)..(312): Homolog of NCBI NO: 30678866 NR Description: expressed protein [Arabidopsis thaliana]
  misc_feature (49)..(308): Homolog of NCBI NO: 15233126 NR Description: putative protein; protein id: At3g61500.1

SEQ ID NO: 78109 - protein, 297 aa, Arabidopsis thaliana; identical to SEQ ID NO: 50021
  peptide (1)..(297): Ceres Seq. ID no. 12606112
  misc_feature (1)..(297): Homolog of NCBI NO: 18406969 NR Description: expressed protein; protein id: At2g46080.1, by cDNA: gi_16604341, supported by cDNA: gi_18252158 [Arabidopsis >gi|25341889|pir||E84898 hypothetical protein At2g46080
  misc_feature (1)..(297): Homolog of NCBI NO: 16604342 NR Description: At2g46080/T3F17.27 [Arabidopsis thaliana]
  misc_feature (1)..(283): Homolog of NCBI NO: 18378853 NR Description: expressed protein; protein id: At1g01550.1, by cDNA: gi_13194833, supported by cDNA: gi_16648870, supported cDNA: gi_17380899, supported by cDNA: gi_20259586 [Arabidopsis
  misc_feature (1)..(223): Homolog of NCBI NO: 37536014 NR Description: unknown protein [Oryza sativa (japonica
  misc_feature (242)..(288): Homolog of NCBI NO: 37536014 NR Description: unknown protein [Oryza sativa (japonica
  misc_feature (1)..(281): Homolog of NCBI NO: 28392962 NR Description: unknown protein [Arabidopsis thaliana]
  misc_feature (1)..(281): Homolog of NCBI NO: 7485228 NR Description: hypothetical protein A_IG002N01.26 - Arabidopsis >gi|2191147|gb|AAB61034.1| A_IG002N01.26 gene product thaliana] >gi|7267633|emb|CAB80945.1| hypothetical protein
  misc_feature (1)..(281): Homolog of NCBI NO: 30678866 NR Description: expressed protein [Arabidopsis thaliana]
  misc_feature (18)..(277): Homolog of NCBI NO: 15233126 NR Description: putative protein; protein id: At3g61500.1

SEQ ID NO: 78110 - DNA, 1411 bp, Arabidopsis thaliana
  misc_feature (1)..(1411): Ceres Seq. ID no. 12606124
  misc_feature: MA Experiment ID: 20000166 Result: Up-regulated in Transcription
  misc_feature: MA Experiment 20000166 PARAMETER Experiment Name: At_100uM_ABA_P Parameter: Age (day) Value: 14
  misc_feature: MA Experiment 20000166 PARAMETER Experiment Name: At_100uM_ABA_P Parameter: Organism Value: A. thaliana
  misc_feature: MA Experiment 20000166 PARAMETER Experiment Name: At_100uM_ABA_P Parameter: Plant Line Value: WS
  misc_feature: MA Experiment 20000166 PARAMETER Experiment Name: At_100uM_ABA_P Parameter: Timepoint (hr) Value: 1
  misc_feature: MA Experiment 20000166 PARAMETER Experiment Name: At_100uM_ABA_P Parameter: Tissue Value: Aerial
  misc_feature: MA Experiment 20000166 PARAMETER Experiment Name: At_100uM_ABA_P Parameter: Treatment Value: 100uM ABA vs. No Treatment
  misc_feature: MA Experiment ID: 20000169 Result: Up-regulated in Transcription
  misc_feature: MA Experiment 20000169 PARAMETER Experiment Name: At_100uM_ABA_P Parameter: Age (day) Value: 14
  misc_feature: MA Experiment 20000169 PARAMETER Experiment Name: At_100uM_ABA_P Parameter: Organism Value: A. thaliana
  misc_feature: MA Experiment 20000169 PARAMETER Experiment Name: At_100uM_ABA_P Parameter: Plant Line Value: WS
  misc_feature: MA Experiment 20000169 PARAMETER Experiment Name: At_100uM_ABA_P Parameter: Timepoint (hr) Value: 6
  misc_feature: MA Experiment 20000169 PARAMETER Experiment Name: At_100uM_ABA_P Parameter: Tissue Value: Aerial
  misc_feature: MA Experiment 20000169 PARAMETER Experiment Name: At_100uM_ABA_P Parameter: Treatment Value: 100uM ABA vs. No Treatment
  misc_feature: MA Experiment ID: 20000171 Result: Down-regulated in Transcription
  misc_feature: MA Experiment 20000171 PARAMETER Experiment Name: At_42deg_Heat_P Parameter: Age (day) Value: 14
  misc_feature: MA Experiment 20000171 PARAMETER Experiment Name: At_42deg_Heat_P Parameter: Organism Value: A. thaliana
  misc_feature: MA Experiment 20000171 PARAMETER Experiment Name: At_42deg_Heat_P Parameter: Plant Line Value: WS
  misc_feature: MA Experiment 20000171 PARAMETER Experiment Name: At_42deg_Heat_P Parameter: Temperature (deg C) Value: 42 vs. 22
  misc_feature: MA Experiment 20000171 PARAMETER Experiment Name: At_42deg_Heat_P Parameter: Timepoint (hr) Value: 1
  misc_feature: MA Experiment 20000171 PARAMETER Experiment Name: At_42deg_Heat_P Parameter: Tissue Value: Aerial
  misc_feature: MA Experiment ID: 20000173 Result: Down-regulated in Transcription
  misc_feature: MA Experiment 20000173 PARAMETER Experiment Name: At_42deg_Heat_P Parameter: Age (day) Value: 14
  misc_feature: MA Experiment 20000173 PARAMETER Experiment Name: At_42deg_Heat_P Parameter: Organism Value: A. thaliana
  misc_feature: MA Experiment 20000173 PARAMETER Experiment Name: At_42deg_Heat_P Parameter: Plant Line Value: WS
  misc_feature: MA Experiment 20000173 PARAMETER Experiment Name: At_42deg_Heat_P Parameter: Temperature (deg C) Value: 42 vs. 22
  misc_feature: MA Experiment 20000173 PARAMETER Experiment Name: At_42deg_Heat_P Parameter: Timepoint (hr) Value: 6
  misc_feature: MA Experiment 20000173 PARAMETER Experiment Name: At_42deg_Heat_P Parameter: Tissue Value: Aerial
  misc_feature: MA Experiment ID: 20000184 Result: Down-regulated in Transcription
  misc_feature: MA Experiment 20000184 PARAMETER Experiment Name: At_Shoots__P Parameter: Age (day) Value: 7
  misc_feature: MA Experiment 20000184 PARAMETER Experiment Name: At_Shoots__P Parameter: Tissue Value: Shoots vs. Whole Plant
  misc_feature: MA Experiment ID: 20000185 Result: Down-regulated in Transcription
  misc_feature: MA Experiment 20000185 PARAMETER Experiment Name: At_Roots__P Parameter: Age (day) Value: 7 vs. 21
  misc_feature: MA Experiment 20000185 PARAMETER Experiment Name: At_Roots__P Parameter: Organism Value: A. thaliana
  misc_feature: MA Experiment 20000185 PARAMETER Experiment Name: At_Roots__P Parameter: Tissue Value: Roots vs. Whole Plant
  misc_feature: MA Experiment ID: 20000227 Result: Down-regulated in Transcription
  misc_feature: MA Experiment 20000227 PARAMETER Experiment Name: At_Root-Tips-vs-Tops_P Parameter: Tissue Value: Root Tips vs. Root Tops
  misc_feature: MA Experiment ID: 20000234 Result: Down-regulated in Transcription
  misc_feature: MA Experiment 20000234 PARAMETER Experiment Name: At_Siliques_P Parameter: Age (day) Value: 21
  misc_feature: MA Experiment 20000234 PARAMETER Experiment Name: At_Siliques_P Parameter: Organism Value: A. thaliana
  misc_feature: MA Experiment 20000234 PARAMETER Experiment Name: At_Siliques_P Parameter: Plant Line Value: WS
  misc_feature: MA Experiment 20000234 PARAMETER Experiment Name: At_Siliques_P Parameter: Tissue Value: Less Than 5mm Siliques vs. Whole Plant
  misc_feature: MA Experiment ID: 20000265 Result: Down-regulated in Transcription
  misc_feature: MA Experiment 20000265 PARAMETER Experiment Name: At_Open_Flower_P Parameter: Age (day) Value: 21
  misc_feature: MA Experiment 20000265 PARAMETER Experiment Name: At_Open_Flower_P Parameter: Plant Line Value: WS
  misc_feature: MA Experiment 20000265 PARAMETER Experiment Name: At_Open_Flower_P Parameter: Tissue Value: Closed Flower vs. Whole Plant
  misc_feature: MA Experiment ID: 20000268 Result: Up-regulated in Transcription
  misc_feature: MA Experiment 20000268 PARAMETER Experiment Name: At_100mM_NaCl__P Parameter: Age (day) Value: 14
  misc_feature: MA Experiment 20000268 PARAMETER Experiment Name: At_100mM_NaCl__P Parameter: Organism Value: A. thaliana
  misc_feature: MA Experiment 20000268 PARAMETER Experiment Name: At_100mM_NaCl__P Parameter: Plant Line Value: WS
  misc_feature: MA Experiment 20000268 PARAMETER Experiment Name: At_100mM_NaCl__P Parameter: Timepoint (hr) Value: 6
  misc_feature: MA Experiment 20000268 PARAMETER Experiment Name: At_100mM_NaCl__P Parameter: Tissue Value: Whole Plant
  misc_feature: MA Experiment 20000268 PARAMETER Experiment Name: At_100mM_NaCl__P Parameter: Treatment Value: 100mM NaCl vs. No Treatment
  misc_feature: MA Experiment ID: 20000438 Result: Down-regulated in Transcription
  misc_feature: MA Experiment 20000438 PARAMETER Experiment Name: At_Shoots__P Parameter: Age (day) Value: 14
  misc_feature: MA Experiment 20000438 PARAMETER Experiment Name: At_Shoots__P Parameter: Tissue Value: Shoots vs. Whole Plant
  misc_feature: MA Experiment ID: 20000453 Result: Up-regulated in Transcription
  misc_feature: MA Experiment 20000453 PARAMETER Experiment Name: At_100uM_ABA_P Parameter: Age (day) Value: 15
  misc_feature: MA Experiment 20000453 PARAMETER Experiment Name: At_100uM_ABA_P Parameter: Organism Value: A. thaliana
  misc_feature: MA Experiment 20000453 PARAMETER Experiment Name: At_100uM_ABA_P Parameter: Plant Line Value: WS
  misc_feature: MA Experiment 20000453 PARAMETER Experiment Name: At_100uM_ABA_P Parameter: Timepoint (hr) Value: 24
  misc_feature: MA Experiment 20000453 PARAMETER Experiment Name: At_100uM_ABA_P Parameter: Tissue Value: Aerial
  misc_feature: MA Experiment 20000453 PARAMETER Experiment Name: At_100uM_ABA_P Parameter: Treatment Value: 100uM ABA vs. No Treatment
  misc_feature: MA Experiment ID: 20000496 Result: Up-regulated in Transcription
  misc_feature: MA Experiment 20000496 PARAMETER Experiment Name: At_Guard_Cells_P Parameter: Harvest Date Value: 7/19/2002
  misc_feature: MA Experiment 20000496 PARAMETER Experiment Name: At_Guard_Cells_P Parameter: Organism Value: Canola
  misc_feature: MA Experiment 20000496 PARAMETER Experiment Name: At_Guard_Cells_P Parameter: Tissue Value: Guard Cells vs. Leaves
  misc_feature: MA Experiment ID: 20000527 Result: Down-regulated in Transcription
  misc_feature: MA Experiment 20000527 PARAMETER Experiment Name: At_10percent_PEG_P Parameter: Age (day) Value: 20
  misc_feature: MA Experiment 20000527 PARAMETER Experiment Name: At_10percent_PEG_P Parameter: Organism Value: A. thaliana
  misc_feature: MA Experiment 20000527 PARAMETER Experiment Name: At_10percent_PEG_P Parameter: Plant Line Value: WS
  misc_feature: MA Experiment 20000527 PARAMETER Experiment Name: At_10percent_PEG_P Parameter: Timepoint (day) Value: 20
  misc_feature: MA Experiment 20000527 PARAMETER Experiment Name: At_10percent_PEG_P Parameter: Tissue Value: Whole Plant
  misc_feature: MA Experiment 20000527 PARAMETER Experiment Name: At_10percent_PEG_P Parameter: Treatment Value: 10percent PEG vs. No Treatment
  misc_feature: MA Experiment ID: 20000794 Result: Up-regulated in Transcription
  misc_feature: MA Experiment 20000794 PARAMETER Experiment Name: At_Petals_P Parameter: Age (day) Value: 23-25 days
  misc_feature: MA Experiment 20000794 PARAMETER Experiment Name: At_Petals_P Parameter: Plant Line Value: WS
  misc_feature: MA Experiment 20000794 PARAMETER Experiment Name: At_Petals_P Parameter: Tissue Value: Petals vs. Whole plant
  misc_feature: MA Experiment ID: 20001772 Result: Up-regulated in Transcription
  misc_feature: MA Experiment 20001772 PARAMETER Experiment Name: At_Far-red-enriched-adult_P Parameter: Age (day) Value: 29
  misc_feature: MA Experiment 20001772 PARAMETER Experiment Name: At_Far-red-enriched-adult_P Parameter: Light Value: Far-red enriched vs. White
  misc_feature: MA Experiment 20001772 PARAMETER Experiment Name: At_Far-red-enriched-adult_P Parameter: Organism Value: A. thaliana
  misc_feature: MA Experiment 20001772 PARAMETER Experiment Name: At_Far-red-enriched-adult_P Parameter: Plant Line Value: Columbia
  misc_feature: MA Experiment 20001772 PARAMETER Experiment Name: At_Far-red-enriched-adult_P Parameter: Timepoint (hr) Value: 24
  misc_feature: MA Experiment 20001772 PARAMETER Experiment Name: At_Far-red-enriched-adult_P Parameter: Tissue Value: Aerial
gttcatatggaaaacgctcatcaacctcaacaatctctctcctctctctctctgtatatagaagaatctccattgtctttaatttctctccatttctctttctctcttccttcaaagttttctcttttcttgatgggtttaagagagtaaagatcatcaagtactatgcattaaattgagaagttattaaaaatttcgaaagtaattaaagattgttgatgatgaagagattaagtagttcagattcagtgggtggtctcatctctttatgtcctacaacttccacagatgagcagagtccgaggagatacggtgggagagagtttcagtcgatgcttgaaggatacgaggaagaagaagaagctatagtagaagaaagaggacacgtgggcttgtcggagaagaagagaaggttaagcattaaccaagttaaagctttggagaagaattttgagttagagaataagcttgagcctgagaggaaagttaagttagctcaagaacttggtcttcaacctcgtcaagttgctgtttggtttcaaaaccgtcgtgctcggtggaagacaaaacagcttgagaaagattacggtgttcttaaaacccagtacgattctctccgtcataactttgattccctccgccgtgacaatgaatctctccttcaagagattagtaaactgaaaacgaagcttaatggaggaggaggagaagaagaagaagaagagaacaacgcggcggtgacaacggagagtgatatttcggtcaaggaggaagaagtttcgttgccggagaagattacagaggcaccgtcgtctcctccacagtttcttgaacattctgatggtcttaattaccggagtttcacagatctacgtgatcttcttccattaaaggcggcggcttcttcattcgccgccgcagctggatcttcagacagtagcgattcaagcgctctgctgaatgaagaaagcagctctaatgtcactgtggcggctccggtgacggttccaggaggtaatttcttccagtttgtgaaaatggagcagacggaggatcatgaggactttctgagtggagaagaagcttgtgaattcttttccgatgaacaaccgccgtctctacactggtactccaccgttgatcattggaattgaagctgaaaacaccaccggaagagattttggattggattagatgctcttttcttctctgtggaaaaaacagaggagggcaaaatgggaataaagttaaaattgaagggtgaaagggcaattaaggaagggttaagtctgggcgggaataatgatttagggtgaatttgtaattatgctttttctctagtgattttcgtgcacttcttgtaattaaggatcatcagatcaaagagaaattgagaaggggttaacatgtc

SEQ ID NO: 78111 - protein, 311 aa, Arabidopsis thaliana
  peptide (1)..(311): Ceres Seq. ID no. 12606125
  misc_feature (62)..(116): Pfam Name: Homeobox domain Pfam Description: Homeobox domain
  misc_feature (1)..(311): Homolog of NCBI NO: 18399966 NR Description: homeodomain transcription factor (ATHB-6); id: At2g22430.1, supported by cDNA: gi_16974586, supported by
  misc_feature (2)..(311): Homolog of NCBI NO: 25386231 NR Description: homeodomain transcription factor (ATHB-6)
  misc_feature (1)..(291): Homolog of NCBI NO: 5305602 NR Description: homeobox protein ATHB6 [Arabidopsis thaliana]
  misc_feature (1)..(311): Homolog of NCBI NO: 8133126 NR Description: hb-6-like protein [Brassica rapa subsp.
  misc_feature (2)..(310): Homolog of NCBI NO: 15236109 NR Description: homeodomain - like protein; protein id: supported by cDNA: gi_13877722, supported by cDNA: gi_15450981
  misc_feature (2)..(310): Homolog of NCBI NO: 15450982 NR Description: homeodomain-like protein [Arabidopsis thaliana]
  misc_feature (2)..(310): Homolog of NCBI NO: 7446295 NR Description: homeotic protein T5J17.230 - Arabidopsis thaliana
  misc_feature (2)..(311): Homolog of NCBI NO: 15238405 NR Description: homeobox-leucine zipper protein ATHB-5 (HD-zip ATHB- 5) (sp|P46667); protein id: At5g65310.1, supported by cDNA:
  misc_feature (48)..(311): Homolog of NCBI NO: 15148916 NR Description: homeodomain leucine zipper protein HDZ1
MMKRLSSSDSVGGLISLCPTTSTDEQSPRRYGGREFQSMLEGYEEEEEAIVEERGHVGLSEKKRRLSINQVKALEKNFELENKLEPERKVKLAQELGLQPRQVAVWFQNRRARWKTKQLEKDYGVLKTQYDSLRHNFDSLRRDNESLLQEISKLKTKLNGGGGEEEEEENNAAVTTESDISVKEEEVSLPEKITEAPSSPPQFLEHSDGLNYRSFTDLRDLLPLKAAASSFAAAAGSSDSSDSSALLNEESSSNVTVAAPVTVPGGNFFQFVKMEQTEDHEDFLSGEEACEFFSDEQPPSLHWYSTVDHWN

SEQ ID NO: 78112 - protein, 310 aa, Arabidopsis thaliana
  peptide (1)..(310): Ceres Seq. ID no. 12606126
  misc_feature (61)..(115): Pfam Name: Homeobox domain Pfam Description: Homeobox domain
  misc_feature (1)..(310): Homolog of NCBI NO: 18399966 NR Description: homeodomain transcription factor (ATHB-6); id: At2g22430.1, supported by cDNA: gi_16974586, supported by
  misc_feature (1)..(310): Homolog of NCBI NO: 25386231 NR Description: homeodomain transcription factor (ATHB-6)
  misc_feature (1)..(290): Homolog of NCBI NO: 5305602 NR Description: homeobox protein ATHB6 [Arabidopsis thaliana]
  misc_feature (1)..(310): Homolog of NCBI NO: 8133126 NR Description: hb-6-like protein [Brassica rapa subsp.
  misc_feature (1)..(309): Homolog of NCBI NO: 15236109 NR Description: homeodomain - like protein; protein id: supported by cDNA: gi_13877722, supported by cDNA: gi_15450981
  misc_feature (1)..(309): Homolog of NCBI NO: 15450982 NR Description: homeodomain-like protein [Arabidopsis thaliana]
  misc_feature (1)..(309): Homolog of NCBI NO: 7446295 NR Description: homeotic protein T5J17.230 - Arabidopsis thaliana
  misc_feature (1)..(310): Homolog of NCBI NO: 15238405 NR Description: homeobox-leucine zipper protein ATHB-5 (HD-zip ATHB- 5) (sp|P46667); protein id: At5g65310.1, supported by cDNA:
  misc_feature (47)..(310): Homolog of NCBI NO: 15148916 NR Description: homeodomain leucine zipper protein HDZ1
MKRLSSSDSVGGLISLCPTTSTDEQSPRRYGGREFQSMLEGYEEEEEAIVEERGHVGLSEKKRRLSINQVKALEKNFELENKLEPERKVKLAQELGLQPRQVAVWFQNRRARWKTKQLEKDYGVLKTQYDSLRHNFDSLRRDNESLLQEISKLKTKLNGGGGEEEEEENNAAVTTESDISVKEEEVSLPEKITEAPSSPPQFLEHSDGLNYRSFTDLRDLLPLKAAASSFAAAAGSSDSSDSSALLNEESSSNVTVAAPVTVPGGNFFQFVKMEQTEDHEDFLSGEEACEFFSDEQPPSLHWYSTVDHWN

SEQ ID NO: 78113 - protein, 273 aa, Arabidopsis thaliana
  peptide (1)..(273): Ceres Seq. ID no. 12606127
  misc_feature (24)..(78): Pfam Name: Homeobox domain Pfam Description: Homeobox domain
  misc_feature (1)..(273): Homolog of NCBI NO: 18399966 NR Description: homeodomain transcription factor (ATHB-6); id: At2g22430.1, supported by cDNA: gi_16974586, supported by
  misc_feature (1)..(273): Homolog of NCBI NO: 25386231 NR Description: homeodomain transcription factor (ATHB-6)
  misc_feature (1)..(253): Homolog of NCBI NO: 5305602 NR Description: homeobox protein ATHB6 [Arabidopsis thaliana]
  misc_feature (1)..(273): Homolog of NCBI NO: 8133126 NR Description: hb-6-like protein [Brassica rapa subsp.
  misc_feature (1)..(272): Homolog of NCBI NO: 15236109 NR Description: homeodomain - like protein; protein id: supported by cDNA: gi_13877722, supported by cDNA: gi_15450981
  misc_feature (1)..(272): Homolog of NCBI NO: 15450982 NR Description: homeodomain-like protein [Arabidopsis thaliana]
  misc_feature (1)..(272): Homolog of NCBI NO: 7446295 NR Description: homeotic protein T5J17.230 - Arabidopsis thaliana
  misc_feature (1)..(273): Homolog of NCBI NO: 15238405 NR Description: homeobox-leucine zipper protein ATHB-5 (HD-zip ATHB- 5) (sp|P46667); protein id: At5g65310.1, supported by cDNA:
  misc_feature (10)..(273): Homolog of NCBI NO: 15148916 NR Description: homeodomain leucine zipper protein HDZ1
MLEGYEEEEEAIVEERGHVGLSEKKRRLSINQVKALEKNFELENKLEPERKVKLAQELGLQPRQVAVWFQNRRARWKTKQLEKDYGVLKTQYDSLRHNFDSLRRDNESLLQEISKLKTKLNGGGGEEEEEENNAAVTTESDISVKEEEVSLPEKITEAPSSPPQFLEHSDGLNYRSFTDLRDLLPLKAAASSFAAAAGSSDSSDSSALLNEESSSNVTVAAPVTVPGGNFFQFVKMEQTEDHEDFLSGEEACEFFSDEQPPSLHWYSTVDHWN

SEQ ID NO: 78114 - DNA, 675 bp, Arabidopsis thaliana
  misc_feature (1)..(675): Ceres Seq. ID no. 12606178
  misc_feature: MA Experiment ID: 20000184 Result: Up-regulated in Transcription
  misc_feature: MA Experiment 20000184 PARAMETER Experiment Name: At_Shoots__P Parameter: Age (day) Value: 7
  misc_feature: MA Experiment 20000184 PARAMETER Experiment Name: At_Shoots__P Parameter: Tissue Value: Shoots vs. Whole Plant
  misc_feature: MA Experiment ID: 20000437 Result: Down-regulated in Transcription
  misc_feature: MA Experiment 20000437 PARAMETER Experiment Name: At_Drought_P Parameter: Age (day) Value: 8
  misc_feature: MA Experiment 20000437 PARAMETER Experiment Name: At_Drought_P Parameter: Organism Value: A. thaliana
  misc_feature: MA Experiment 20000437 PARAMETER Experiment Name: At_Drought_P Parameter: Plant Line Value: WS
  misc_feature: MA Experiment 20000437 PARAMETER Experiment Name: At_Drought_P Parameter: Timepoint (hr) Value: 24
  misc_feature: MA Experiment 20000437 PARAMETER Experiment Name: At_Drought_P Parameter: Tissue Value: Whole Plant
  misc_feature: MA Experiment 20000437 PARAMETER Experiment Name: At_Drought_P Parameter: Treatment Value: Drought vs. No Drought
  misc_feature: MA Experiment ID: 20000438 Result: Up-regulated in Transcription
  misc_feature: MA Experiment 20000438 PARAMETER Experiment Name: At_Shoots__P Parameter: Age (day) Value: 14
  misc_feature: MA Experiment 20000438 PARAMETER Experiment Name: At_Shoots__P Parameter: Tissue Value: Shoots vs. Whole Plant
  misc_feature: MA Experiment ID: 20000439 Result: Down-regulated in Transcription
  misc_feature: MA Experiment 20000439 PARAMETER Experiment Name: At_Roots__P Parameter: Age (day) Value: 14 vs. 21
  misc_feature: MA Experiment 20000439 PARAMETER Experiment Name: At_Roots__P Parameter: Organism Value: A. thaliana
  misc_feature: MA Experiment 20000439 PARAMETER Experiment Name: At_Roots__P Parameter: Tissue Value: Roots vs. Whole Plant
  misc_feature: MA Experiment ID: 20000527 Result: Up-regulated in Transcription
  misc_feature: MA Experiment 20000527 PARAMETER Experiment Name: At_10percent_PEG_P Parameter: Age (day) Value: 20
  misc_feature: MA Experiment 20000527 PARAMETER Experiment Name: At_10percent_PEG_P Parameter: Organism Value: A. thaliana
  misc_feature: MA Experiment 20000527 PARAMETER Experiment Name: At_10percent_PEG_P Parameter: Plant Line Value: WS
  misc_feature: MA Experiment 20000527 PARAMETER Experiment Name: At_10percent_PEG_P Parameter: Timepoint (day) Value: 20
  misc_feature: MA Experiment 20000527 PARAMETER Experiment Name: At_10percent_PEG_P Parameter: Tissue Value: Whole Plant
  misc_feature: MA Experiment 20000527 PARAMETER Experiment Name: At_10percent_PEG_P Parameter: Treatment Value: 10percent PEG vs. No Treatment
  misc_feature: MA Experiment ID: 20001248 Result: Down-regulated in Transcription
  misc_feature: MA Experiment 20001248 PARAMETER Experiment Name: At_Far-red-induction_P Parameter: Age (day) Value: 7
  misc_feature: MA Experiment 20001248 PARAMETER Experiment Name: At_Far-red-induction_P Parameter: Light Value: Far-red vs. White
  misc_feature: MA Experiment 20001248 PARAMETER Experiment Name: At_Far-red-induction_P Parameter: Organism Value: A. thaliana
  misc_feature: MA Experiment 20001248 PARAMETER Experiment Name: At_Far-red-induction_P Parameter: Plant Line Value: Columbia
  misc_feature: MA Experiment 20001248 PARAMETER Experiment Name: At_Far-red-induction_P Parameter: Timepoint (hr) Value: 4
  misc_feature: MA Experiment 20001248 PARAMETER Experiment Name: At_Far-red-induction_P Parameter: Tissue Value: Whole Plant
  misc_feature: MA Experiment ID: 20001450 Result: Down-regulated in Transcription
  misc_feature: MA Experiment 20001450 PARAMETER Experiment Name: At_Far-red-induction_P Parameter: Age (day) Value: 7
  misc_feature: MA Experiment 20001450 PARAMETER Experiment Name: At_Far-red-induction_P Parameter: Light Value: Far-red vs. White
  misc_feature: MA Experiment 20001450 PARAMETER Experiment Name: At_Far-red-induction_P Parameter: Organism Value: A. thaliana
  misc_feature: MA Experiment 20001450 PARAMETER Experiment Name: At_Far-red-induction_P Parameter: Plant Line Value: Columbia
  misc_feature: MA Experiment 20001450 PARAMETER Experiment Name: At_Far-red-induction_P Parameter: Timepoint (hr) Value: 8
  misc_feature: MA Experiment 20001450 PARAMETER Experiment Name: At_Far-red-induction_P Parameter: Tissue Value: Whole Plant
  misc_feature: MA Experiment ID: 20001451 Result: Down-regulated in Transcription
  misc_feature: MA Experiment 20001451 PARAMETER Experiment Name: At_Far-red-induction_P Parameter: Age (day) Value: 7
  misc_feature: MA Experiment 20001451 PARAMETER Experiment Name: At_Far-red-induction_P Parameter: Light Value: Far-red vs. White
  misc_feature: MA Experiment 20001451 PARAMETER Experiment Name: At_Far-red-induction_P Parameter: Organism Value: A. thaliana
  misc_feature: MA Experiment 20001451 PARAMETER Experiment Name: At_Far-red-induction_P Parameter: Plant Line Value: Columbia
  misc_feature: MA Experiment 20001451 PARAMETER Experiment Name: At_Far-red-induction_P Parameter: Timepoint (hr) Value: 24
  misc_feature: MA Experiment 20001451 PARAMETER Experiment Name: At_Far-red-induction_P Parameter: Tissue Value: Whole Plant
  misc_feature: MA Experiment ID: 20001757 Result: Up-regulated in Transcription
  misc_feature: MA Experiment 20001757 PARAMETER Experiment Name: At_50mM_NH4NO3_L-to-H_P Parameter: Timepoint (hr) Value: 6
  misc_feature: MA Experiment 20001757 PARAMETER Experiment Name: At_50mM_NH4NO3_L-to-H_P Parameter: Tissue Value: Leaf
  misc_feature: MA Experiment 20001757 PARAMETER Experiment Name: At_50mM_NH4NO3_L-to-H_P Parameter: Treatment Value: 50mM NH4NO3 vs 100mM Mannitol
ggtcacatttctttaactttaaaaactcttccgtttcgccgaagcttcttcaatggcgatttctctcgccaccgcctatatctctccatgttttacaccggaatcgtctagttccgcttcaccatcacgaactctttcctccgtacgattaccttctcagattcgccgattcggaagtgttcaatcgccgtcttcgtctactcgcttcgctccactcactgtaagagcagcaaagaagcaaactttcaactcttttgatgatttgttgcagaattctgataaacctgtacttgtagacttctatgctacttggtgtggtccatgtcagcttatggtacctatactcaatgaagtgagtgaaacactgaaagatataattgcagttgtgaaaattgatactgagaagtacccaagtcttgctaacaaataccagattgaggctttgcccacattcatcttattcaaagacggcaaactctgggaccgtttcgagggtgccttgccagcgaaccaactcgttgagcgtattgagaattctttgcaagtgaaacagtaggtttgagaaaccaagaaaacttgtcatctatgaacaatctgttgtgacataagccattgttgattgtttgctcggtataatcatctacctattcatatatggcatctgccatttttctc

SEQ ID NO: 78115 - protein, 167 aa, Arabidopsis thaliana; identical to SEQ ID NO: 50565
  peptide (1)..(167): Ceres Seq. ID no. 12606179
  misc_feature (1)..(167): Homolog of NCBI NO: 30693659 NR Description: thioredoxin family [Arabidopsis thaliana]
  misc_feature (57)..(167): Homolog of NCBI NO: 25405118 NR Description: hypothetical protein T10P12.4 [imported] - thaliana >gi|5080763|gb|AAD39273.1|AC007203_5 Hypothetical
  misc_feature (1)..(69): Homolog of NCBI NO: 25405118 NR Description: hypothetical protein T10P12.4 [imported] - thaliana >gi|5080763|gb|AAD39273.1|AC007203_5 Hypothetical
  misc_feature (2)..(166): Homolog of NCBI NO: 38454080 NR Description: At1g76760 [Arabidopsis thaliana]
  misc_feature (19)..(166): Homolog of NCBI NO: 15223728 NR Description: thioredoxin-like protein; protein id: At1g76760.1
  misc_feature (60)..(165): Homolog of NCBI NO: 23039598 NR Description: hypothetical protein [Trichodesmium erythraeum
  misc_feature (59)..(163): Homolog of NCBI NO: 23123943 NR Description: hypothetical protein [Nostoc punctiforme]
  misc_feature (61)..(161): Homolog of NCBI NO: 17229385 NR Description: thioredoxin [Nostoc sp. PCC 7120]
  misc_feature (59)..(159): Homolog of NCBI NO: 27763679 NR Description: thioredoxin y [Chlamydomonas reinhardtii]
  misc_feature (59)..(160): Homolog of NCBI NO: 16331440 NR Description: thioredoxin M [Synechocystis sp. PCC 6803]

SEQ ID NO: 78116 - DNA, 1164 bp, Arabidopsis thaliana
  misc_feature (1)..(1164): Ceres Seq. ID no. 12606224
  misc_feature: MA Experiment ID: 20000286 Result: Up-regulated in Transcription
  misc_feature: MA Experiment 20000286 PARAMETER Experiment Name: At_Open_Flower_P Parameter: Age (day) Value: 21
  misc_feature: MA Experiment 20000286 PARAMETER Experiment Name: At_Open_Flower_P Parameter: Plant Line Value: WS
  misc_feature: MA Experiment 20000286 PARAMETER Experiment Name: At_Open_Flower_P Parameter: Tissue Value: Half Open vs. Whole Plant
  misc_feature: MA Experiment ID: 20001904 Result: Up-regulated in Transcription
  misc_feature: MA Experiment 20001904 PARAMETER Experiment Name: At_Drought_Reproduction_P Parameter: Age (day) Value: 37
  misc_feature: MA Experiment 20001904 PARAMETER Experiment Name: At_Drought_Reproduction_P Parameter: Organism Value: A. thaliana
  misc_feature: MA Experiment 20001904 PARAMETER Experiment Name: At_Drought_Reproduction_P Parameter: Plant Line Value: WS
  misc_feature: MA Experiment 20001904 PARAMETER Experiment Name: At_Drought_Reproduction_P Parameter: Timepoint (day) Value: 7
  misc_feature: MA Experiment 20001904 PARAMETER Experiment Name: At_Drought_Reproduction_P Parameter: Tissue Value: Rosettes
  misc_feature: MA Experiment 20001904 PARAMETER Experiment Name: At_Drought_Reproduction_P Parameter: Treatment Value: Drought vs. No Drought
atcttcattctcacactcaacccctctctctcctttcattctcattctctctcggctttgttttctctttaatctgattcatctattctatttctatcaccacacaaaaagaagaaaaaaaacaaactttactttaagaattttgaagaataaaatcaaaagagaataaccatggttttctcctccatccaagcctatcttgattcatccaactggcaacaggctcctccgagcaattataatcatgacggaacaggcgcctcagcaaatggaggtcatgttcttcgtcctcagctgcagccacagcagcagccacagcagcagccgcatcctaatgggagcgggggcggaggtggaggtggaggcggctcgatccgagcaggatcaatggtggacagagcaagacaagcaaacgtagccttgccagaagcagcactgaaatgtccgagatgcgaatccaccaacaccaagttctgctacttcaacaactacagcctcactcaaccacgccacttctgcaagacctgccggagatactggacacgtggcggagctctccgcaacgtcccagtcggcggtggctgccggagaaacaggcgtaccaaaagcaacagcaacaacaacaataacagcactgctactagcaataacaccagtttctcctccgggaatgcatccaccatcagcacgattctctcctcccactatggaggaaaccaagagagtatcttaagccagattttgtctccggcgaggctaatgaatcctacttacaatcatctcggagatctcacaagtaatacaaaaacagacaacaacatgagcttgttgaactatggaggattgagtcaagacttgaggtcaatccacatgggagcttctggtggctcgcttatgagctgtgttgatgaatggagatcggcgtcttatcatcagcagtcaagtatgggcggtgggaacttggaggattcttctaatcctaatccatccgcaaatgggttttactcttttgagtcgccgaggataacttcagcgtcaatctcttctgctttagcatcgcagttttcttcggttaaagttgaagataatccttacaaatgggttaatgtcaatggtaattgctcttcctggaatgatctttctgctttcggctcttctcgttga

SEQ ID NO: 78117 - protein, 330 aa, Arabidopsis thaliana; identical to SEQ ID NO: 49811
  peptide (1)..(330): Ceres Seq. ID no. 12606225
  misc_feature (84)..(146): Pfam Name: Dof domain, zinc finger Pfam Description: Dof domain, zinc finger
  misc_feature (1)..(330): Homolog of NCBI NO: 15224320 NR Description: Dof zinc finger protein; protein id: At2g37590.1 thaliana] >gi|7485442|pir||T02525 probable DOF zinc finger
  misc_feature (1)..(283): Homolog of NCBI NO: 15241827 NR Description: Dof zinc finger protein; protein id: At5g02460.1
  misc_feature (55)..(306): Homolog of NCBI NO: 29124139 NR Description: putative DNA-binding protein [Oryza sativa
  misc_feature (46)..(201): Homolog of NCBI NO: 7688355 NR Description: Dof zinc finger protein [Solanum tuberosum]
  misc_feature (1)..(306): Homolog of NCBI NO: 30684022 NR Description: Dof zinc finger protein [Arabidopsis thaliana]
  misc_feature (13)..(309): Homolog of NCBI NO: 25406987 NR Description: hypothetical protein [imported] - Arabidopsis >gi|8439908|gb|AAF75094.1|AC007583_30 Strong similarity to zinc protein OBP2 from Arabidopsis thaliana gb|AF155816. EST gb|N65215
  misc_feature (1)..(170): Homolog of NCBI NO: 25352305 NR Description: probable DOF zinc finger protein [imported] - thaliana >gi|3927829|gb|AAC79586.1| putative DOF zinc finger
  misc_feature (64)..(249): Homolog of NCBI NO: 11282341 NR Description: zinc finger protein OBP3 - Arabidopsis thaliana
  misc_feature (12)..(309): Homolog of NCBI NO: 30680246 NR Description: Dof zinc finger protein [Arabidopsis thaliana]
  misc_feature (12)..(309): Homolog of NCBI NO: 21593773 NR Description: zinc finger protein OBP2 [Arabidopsis thaliana]

SEQ ID NO: 78118 - protein, 258 aa, Arabidopsis thaliana; identical to SEQ ID NO: 49812
  peptide (1)..(258): Ceres Seq. ID no. 12606226
  misc_feature (12)..(74): Pfam Name: Dof domain, zinc finger Pfam Description: Dof domain, zinc finger
  misc_feature (1)..(258): Homolog of NCBI NO: 15224320 NR Description: Dof zinc finger protein; protein id: At2g37590.1 thaliana] >gi|7485442|pir||T02525 probable DOF zinc finger
  misc_feature (1)..(211): Homolog of NCBI NO: 15241827 NR Description: Dof zinc finger protein; protein id: At5g02460.1
  misc_feature (1)..(234): Homolog of NCBI NO: 29124139 NR Description: putative DNA-binding protein [Oryza sativa
  misc_feature (1)..(129): Homolog of NCBI NO: 7688355 NR Description: Dof zinc finger protein [Solanum tuberosum]
  misc_feature (1)..(234): Homolog of NCBI NO: 30684022 NR Description: Dof zinc finger protein [Arabidopsis thaliana]
  misc_feature (1)..(237): Homolog of NCBI NO: 25406987 NR Description: hypothetical protein [imported] - Arabidopsis >gi|8439908|gb|AAF75094.1|AC007583_30 Strong similarity to zinc protein OBP2 from Arabidopsis thaliana gb|AF155816. EST gb|N65215
  misc_feature (1)..(98): Homolog of NCBI NO: 25352305 NR Description: probable DOF zinc finger protein [imported] - thaliana >gi|3927829|gb|AAC79586.1| putative DOF zinc finger
  misc_feature (1)..(177): Homolog of NCBI NO: 11282341 NR Description: zinc finger protein OBP3 - Arabidopsis thaliana
  misc_feature (1)..(237): Homolog of NCBI NO: 30680246 NR Description: Dof zinc finger protein [Arabidopsis thaliana]
  misc_feature (1)..(237): Homolog of NCBI NO: 21593773 NR Description: zinc finger protein OBP2 [Arabidopsis thaliana]

SEQ ID NO: 78119 - DNA, 1126 bp, Arabidopsis thaliana
  misc_feature (1)..(1126): Ceres Seq. ID no. 12606275
  misc_feature: MA Experiment ID: 20000171 Result: Up-regulated in Transcription
  misc_feature: MA Experiment 20000171 PARAMETER Experiment Name: At_42deg_Heat_P Parameter: Age (day) Value: 14
  misc_feature: MA Experiment 20000171 PARAMETER Experiment Name: At_42deg_Heat_P Parameter: Organism Value: A. thaliana
  misc_feature: MA Experiment 20000171 PARAMETER Experiment Name: At_42deg_Heat_P Parameter: Plant Line Value: WS
  misc_feature: MA Experiment 20000171 PARAMETER Experiment Name: At_42deg_Heat_P Parameter: Temperature (deg C) Value: 42 vs. 22
  misc_feature: MA Experiment 20000171 PARAMETER Experiment Name: At_42deg_Heat_P Parameter: Timepoint (hr) Value: 1
  misc_feature: MA Experiment 20000171 PARAMETER Experiment Name: At_42deg_Heat_P Parameter: Tissue Value: Aerial
  misc_feature: MA Experiment ID: 20000173 Result: Up-regulated in Transcription
  misc_feature: MA Experiment 20000173 PARAMETER Experiment Name: At_42deg_Heat_P Parameter: Age (day) Value: 14
  misc_feature: MA Experiment 20000173 PARAMETER Experiment Name: At_42deg_Heat_P Parameter: Organism Value: A. thaliana
  misc_feature: MA Experiment 20000173 PARAMETER Experiment Name: At_42deg_Heat_P Parameter: Plant Line Value: WS
  misc_feature: MA Experiment 20000173 PARAMETER Experiment Name: At_42deg_Heat_P Parameter: Temperature (deg C) Value: 42 vs. 22
  misc_feature: MA Experiment 20000173 PARAMETER Experiment Name: At_42deg_Heat_P Parameter: Timepoint (hr) Value: 6
  misc_feature: MA Experiment 20000173 PARAMETER Experiment Name: At_42deg_Heat_P Parameter: Tissue Value: Aerial
  misc_feature: MA Experiment ID: 20001248 Result: Down-regulated in Transcription
  misc_feature: MA Experiment 20001248 PARAMETER Experiment Name: At_Far-red-induction_P Parameter: Age (day) Value: 7
  misc_feature: MA Experiment 20001248 PARAMETER Experiment Name: At_Far-red-induction_P Parameter: Light Value: Far-red vs. White
  misc_feature: MA Experiment 20001248 PARAMETER Experiment Name: At_Far-red-induction_P Parameter: Organism Value: A. thaliana
  misc_feature: MA Experiment 20001248 PARAMETER Experiment Name: At_Far-red-induction_P Parameter: Plant Line Value: Columbia
  misc_feature: MA Experiment 20001248 PARAMETER Experiment Name: At_Far-red-induction_P Parameter: Timepoint (hr) Value: 4
  misc_feature: MA Experiment 20001248 PARAMETER Experiment Name: At_Far-red-induction_P Parameter: Tissue Value: Whole Plant
  misc_feature: MA Experiment ID: 20001450 Result: Down-regulated in Transcription
  misc_feature: MA Experiment 20001450 PARAMETER Experiment Name: At_Far-red-induction_P Parameter: Age (day) Value: 7
  misc_feature: MA Experiment 20001450 PARAMETER Experiment Name: At_Far-red-induction_P Parameter: Light Value: Far-red vs. White
  misc_feature: MA Experiment 20001450 PARAMETER Experiment Name: At_Far-red-induction_P Parameter: Organism Value: A. thaliana
  misc_feature: MA Experiment 20001450 PARAMETER Experiment Name: At_Far-red-induction_P Parameter: Plant Line Value: Columbia
  misc_feature: MA Experiment 20001450 PARAMETER Experiment Name: At_Far-red-induction_P Parameter: Timepoint (hr) Value: 8
  misc_feature: MA Experiment 20001450 PARAMETER Experiment Name: At_Far-red-induction_P Parameter: Tissue Value: Whole Plant
  misc_feature: MA Experiment ID: 20001451 Result: Down-regulated in Transcription
  misc_feature: MA Experiment 20001451 PARAMETER Experiment Name: At_Far-red-induction_P Parameter: Age (day) Value: 7
  misc_feature: MA Experiment 20001451 PARAMETER Experiment Name: At_Far-red-induction_P Parameter: Light Value: Far-red vs. White
  misc_feature: MA Experiment 20001451 PARAMETER Experiment Name: At_Far-red-induction_P Parameter: Organism Value: A. thaliana
  misc_feature: MA Experiment 20001451 PARAMETER Experiment Name: At_Far-red-induction_P Parameter: Plant Line Value: Columbia
  misc_feature: MA Experiment 20001451 PARAMETER Experiment Name: At_Far-red-induction_P Parameter: Timepoint (hr) Value: 24
  misc_feature: MA Experiment 20001451 PARAMETER Experiment Name: At_Far-red-induction_P Parameter: Tissue Value: Whole Plant
  misc_feature: MA Experiment ID: 20001560 Result: Up-regulated in Transcription
  misc_feature: MA Experiment 20001560 PARAMETER Experiment Name: At_Drought_Soil_Dry_P Parameter: Age (day) Value: 28
  misc_feature: MA Experiment 20001560 PARAMETER Experiment Name: At_Drought_Soil_Dry_P Parameter: Organism Value: A. thaliana
  misc_feature: MA Experiment 20001560 PARAMETER Experiment Name: At_Drought_Soil_Dry_P Parameter: Plant Line Value: WS
  misc_feature: MA Experiment 20001560 PARAMETER Experiment Name: At_Drought_Soil_Dry_P Parameter: Post Timepoint (hr) Value: None
  misc_feature: MA Experiment 20001560 PARAMETER Experiment Name: At_Drought_Soil_Dry_P Parameter: Post-Treatment Value: None
  misc_feature: MA Experiment 20001560 PARAMETER Experiment Name: At_Drought_Soil_Dry_P Parameter: Timepoint (day) Value: 14
  misc_feature: MA Experiment 20001560 PARAMETER Experiment Name: At_Drought_Soil_Dry_P Parameter: Treatment Value: Drought vs. No Drought
acagagtttcggctcctccgttgtgtttcaggacgacgcaaaggggaaaaaaaattgaattctttctctccaagcgaaactagggtttcgaaagtctctgtctcatcaaagcttcgaaaagaaagtgattgcattaagagaaacattgggataaaagatgagctttactcaggctaattgttttcgaccatcctactatcctgcaaggataacacgaccaaattgcatctccagtgtacctattaggtcttcagtacgctttgatcacttcccgcgtacctcgtttactcttcgagctactgctgcagtgtctactcagttttcgcctcttcttgatcatcgccgtcgtttacctactgggaaatcgaaacaaagttctgctgtgtgcttatttggtgggaaagataaacctgatggtagtgatgagatatcgccatggaaagcaatagagaaagctatggggaagaaatcggttgaagatatgttgcgagagcagatacagaagaaagacttttatgatactgacagtggcggcaacatgcctccacgtggaggaggcagtggtggcggtggtggaaatggtgaggagcgtcctgaagggtcaggaggagaagatggtggtcttgctgggatcgcagatgaaactttgcaagtggttttggcgaccttaggcttcatctttttgtacacatacattatcactggggaggaattggtcaagcttgcaagggattacattaggtttcttatgggaagacctaagactgttcgattgacccgagccatggatagttggaacggattcttggagaagatgtcgaggcaaagagtgtatgatgagtattggctagaaaaggcgatcatcaacacaccaacctggtatgatagccctgagaagtacagacgtgttatcaaggcttatgttgattcaaattctgatgaagcttatgtggaatcaaattctgatgaggtatcttactaggttaggaacaggaagagatccataataacaattgagttttttttcttagtgtttgaaatttagaatcagtttctttgaattggatttatgttcgtacatttgtatggaattggtttatttatacacgatgaacattctcgaggg

SEQ ID NO: 78120 - protein, 274 aa, Arabidopsis thaliana; identical to SEQ ID NO: 49678
  peptide (1)..(274): Ceres Seq. ID no. 12606276
  misc_feature (1)..(274): Homolog of NCBI NO: 30689439 NR Description: expressed protein [Arabidopsis thaliana] unknown protein [Arabidopsis thaliana]
  misc_feature (101)..(274): Homolog of NCBI NO: 25408887 NR Description: hypothetical protein At2g43630 [imported] - thaliana >gi|2281107|gb|AAB64043.1| unknown protein [Arabidopsis
  misc_feature (1)..(232): Homolog of NCBI NO: 15231725 NR Description: putative protein; protein id: At3g59640.1, by cDNA: gi_14423405 [Arabidopsis thaliana]
  misc_feature (46)..(255): Homolog of NCBI NO: 38345414 NR Description: OSJNBb0091E11.5 [Oryza sativa (japonica

SEQ ID NO: 78121 - protein, 174 aa, Arabidopsis thaliana; identical to SEQ ID NO: 49679
  peptide (1)..(174): Ceres Seq. ID no. 12606277
  misc_feature (1)..(174): Homolog of NCBI NO: 30689439 NR Description: expressed protein [Arabidopsis thaliana] unknown protein [Arabidopsis thaliana]
  misc_feature (1)..(174): Homolog of NCBI NO: 25408887 NR Description: hypothetical protein At2g43630 [imported] - thaliana >gi|2281107|gb|AAB64043.1| unknown protein [Arabidopsis
  misc_feature (1)..(132): Homolog of NCBI NO: 15231725 NR Description: putative protein; protein id: At3g59640.1, by cDNA: gi_14423405 [Arabidopsis thaliana]
  misc_feature (1)..(155): Homolog of NCBI NO: 38345414 NR Description: OSJNBb0091E11.5 [Oryza sativa (japonica

SEQ ID NO: 78122 - protein, 166 aa, Arabidopsis thaliana; identical to SEQ ID NO: 49680
  peptide (1)..(166): Ceres Seq. ID no. 12606278
  misc_feature (1)..(166): Homolog of NCBI NO: 30689439 NR Description: expressed protein [Arabidopsis thaliana] unknown protein [Arabidopsis thaliana]
  misc_feature (1)..(166): Homolog of NCBI NO: 25408887 NR Description: hypothetical protein At2g43630 [imported] - thaliana >gi|2281107|gb|AAB64043.1| unknown protein [Arabidopsis
  misc_feature (1)..(124): Homolog of NCBI NO: 15231725 NR Description: putative protein; protein id: At3g59640.1, by cDNA: gi_14423405 [Arabidopsis thaliana]
  misc_feature (1)..(147): Homolog of NCBI NO: 38345414 NR Description: OSJNBb0091E11.5 [Oryza sativa (japonica

SEQ ID NO: 78123 - DNA, 2900 bp, Arabidopsis thaliana
  misc_feature (1)..(2900): Ceres Seq. ID no. 12606550
  misc_feature: MA Experiment ID: 20000495 Result: Down-regulated in Transcription
  misc_feature: MA Experiment 20000495 PARAMETER Experiment Name: At_Guard_Cells_P Parameter: Harvest Date Value: 8/2/2002
  misc_feature: MA Experiment 20000495 PARAMETER Experiment Name: At_Guard_Cells_P Parameter: Organism Value: A. thaliana
  misc_feature: MA Experiment 20000495 PARAMETER Experiment Name: At_Guard_Cells_P Parameter: Tissue Value: Guard Cells vs. Leaves
gccacacgatggagtatggcggaagaagcatcgaccgagtaattgagacgctctgtttccaattactactctctcgagctcctccgctctgcattgtcgccgagagttcctttcttgtccgacaaactacttcttctccttcgataagccaattctgcgccatagatttttgaaatctactgccggaaaggctgcatgcgatttcaactcccttttcccgggacaattcgcagcttgtgaagaagatcaagaggtgaactctgagtgatgagtgagccaaaggtcaggcgttgggttggcaaatatgaggttggaagattgatcggtgaatgtaattttgggaaactgcggagtgctgttgacacagagacaggagaccctgtggctttgatgatccttgataaagacaaggttctgaagcataagatggctgaacaaataaagagagaaatttctattatgaagctgatcaaccatccaaatgtagtgcagctttatgaggttttggcgagcaaggcgaagatatatattgtcctagagttcatcagtggtggaaagctttttgacaagattaaaaatgatgggcgcatgaatgaagacgaagcacagagatatttccagcagcttatcaatgcagttgattactgccacagcaggggagtgtaccacagagacttaaagccagaaaatttgcttcttgatgcgcaagagaatttgaaagtcgctgaatttggattgattgccttgtcccaacaagccgggggagatggccttcgtcacactgcatgtggaaatccagattatgctgctcctgaggttcttaatgatcaaggctatgatggggcaaaggcagacttgtggtcctgtggagtgatactctttgtactacttgctgggtatttgcctttcgaggattctagtctcacgacgctgtacaaaaagatctcatctgctgattttagttgtcctccttggctctcttctggtgttaagaatttgatcgtccgaatcttggatccaaaccctatgactcgtataacaattccagagattttggaagatgtgtggttcaagaaagattacaagccagctgtatttgaagagaagaaagaagcaaatttggctgatgtggaagctgttttcaaagattctgaagaagggagagtgcaactgaggtcatttccttgtgtgatatgttcaggtggtactacttgtggtgatgttcgttcaaggaccaaactgatgaacggcttgatagaaagagggaggcctcaagaagctcattccattttcaacacacttattgaggaaggccacaagccaagcctcatcacatacaccacgcttgtaactgcattgacccgtcaaaagcacttccactctctcctctccctcatctccaaagtcgagaaaaacggccttaaacctgacaccattctcttcaacgccatcatcaacgcctcttccgagtctggaaatctcgatcaagcaatgaagattttcgaaaaaatgaaggaaagtggatgtaaacccacagcaagtacatttaatactctcatcaaaggatatggcaaaattggtaagctggaggaatcatcaagactcctggatatgatgttacgggatgagatgctccaaccaaatgacagaacatgtaacatacttgtccaggcttggtgtaaccagaggaagattgaagaagcatggaacattgtatataagatgcaatcttatggggtaaaacctgatgtagttacgtttaacacattggcaaaagcgtatgcgcggatcgggtcaacatgtacagctgaggatatgatcataccaaggatgttacacaataaagttaaaccgaatgtacgtacctgcggtaccattgtgaatggctactgtgaagagggcaagatggaagaagctttgaggtttttctatagaatgaaggaacttggagttcatcctaatctgtttgtttttaactctctaatcaaaggcttccttaacatcaacgacatggatggagttggtgaggtggtggatctgatggaagaatttggagtaaaacctgatgtggtaacgtttagcactctaatgaatgcatggagttctgtaggagatatgaaaagatgcgaagagatctatacagatatgttggaaggaggaatagatcctgatattcatgcatttagtatccttgccaaagggtatgctcgagctggggagcccgaaaaagcgaagcaaatcttgaatcagatgagaaaatttggtgttcgcccaaatgtagtgatctacacacagatcataagcggttggtgcagtgctggtgaaatgaagaaagcgatgcaggtatataagaaaatgtgtggaatcgttggtttatcgcctaacttgactacttacgagactcttatatggggatttggggaagcgaagcagccatggaaagcagaagagcttctgaaagacatggaagggaagaatgttgttcccacaaggaaaactatgcaactaatagctgatggatggaaatctattggtgtctctaatagtaatgatgacaatacattgggctcttccttctcaacttcctctaaactcaatatcccaaataatatcgcctcgtcgagaagtccattgttcttaaaaggaatgcctgaaaaaccaaagctatgtatcaagtctcagtttggtttgaggcagactcttttggtggtgttgtgcagagaccagattggggaagccgggagattttgtaagttcatgtagaatttgttttgctgtagagatggagctaaattaaagggtaagaaaagctgatcaaagattgttgtcgatcgatttttaagatttatttttctgtacagatatactttttcagttaaatgaaaaatatggtgtttaac

SEQ ID NO: 78124 - protein, 831 aa, Arabidopsis thaliana
  peptide (1)..(831): Ceres Seq. ID no. 12606551
  misc_feature (13)..(268): Pfam Name: Protein kinase domain Pfam Description: Protein kinase domain
  misc_feature (307)..(765): Homolog of NCBI NO: 3107905 NR Description: leaf protein [Ipomoea nil]
  misc_feature (307)..(762): Homolog of NCBI NO: 30689969 NR Description: pentatricopeptide (PPR) repeat-containing protein
  misc_feature (307)..(762): Homolog of NCBI NO: 26449475 NR Description: unknown protein [Arabidopsis thaliana]
  misc_feature (1)..(300): Homolog of NCBI NO: 30688193 NR Description: NAF specific protein kinase family [Arabidopsis >gi|29294047|gb|AAO73884.1| NAF specific protein kinase family
  misc_feature (301)..(777): Homolog of NCBI NO: 34904258 NR Description: Ipomoea nil leaf protein like protein [Oryza
  misc_feature (5)..(297): Homolog of NCBI NO: 30683328 NR Description: CBL-interacting protein kinase 3 [Arabidopsis
  misc_feature (5)..(297): Homolog of NCBI NO: 30683332 NR Description: CBL-interacting protein kinase 3 [Arabidopsis
  misc_feature (5)..(297): Homolog of NCBI NO: 30683336 NR Description: CBL-interacting protein kinase 3 [Arabidopsis
  misc_feature (1)..(300): Homolog of NCBI NO: 7446371 NR Description: probable serine/threonine kinase (EC 2.7.1.-) - sorghum >gi|2632252|emb|CAA73067.1| serine/threonine kinase
  misc_feature (1)..(300): Homolog of NCBI NO: 7446372 NR Description: probable serine/threonine kinase (EC 2.7.1.-) - sorghum >gi|2632254|emb|CAA73068.1| serine/threonine kinase
MSEPKVRRWVGKYEVGRLIGECNFGKLRSAVDTETGDPVALMILDKDKVLKHKMAEQIKREISIMKLINHPNVVQLYEVLASKAKIYIVLEFISGGKLFDKIKNDGRMNEDEAQRYFQQLINAVDYCHSRGVYHRDLKPENLLLDAQENLKVAEFGLIALSQQAGGDGLRHTACGNPDYAAPEVLNDQGYDGAKADLWSCGVILFVLLAGYLPFEDSSLTTLYKKISSADFSCPPWLSSGVKNLIVRILDPNPMTRITIPEILEDVWFKKDYKPAVFEEKKEANLADVEAVFKDSEEGRVQLRSFPCVICSGGTTCGDVRSRTKLMNGLIERGRPQEAHSIFNTLIEEGHKPSLITYTTLVTALTRQKHFHSLLSLISKVEKNGLKPDTILFNAIINASSESGNLDQAMKIFEKMKESGCKPTASTFNTLIKGYGKIGKLEESSRLLDMMLRDEMLQPNDRTCNILVQAWCNQRKIEEAWNIVYKMQSYGVKPDVVTFNTLAKAYARIGSTCTAEDMIIPRMLHNKVKPNVRTCGTIVNGYCEEGKMEEALRFFYRMKELGVHPNLFVFNSLIKGFLNINDMDGVGEVVDLMEEFGVKPDVVTFSTLMNAWSSVGDMKRCEEIYTDMLEGGIDPDIHAFSILAKGYARAGEPEKAKQILNQMRKFGVRPNVVIYTQIISGWCSAGEMKKAMQVYKKMCGIVGLSPNLTTYETLIWGFGEAKQPWKAEELLKDMEGKNVVPTRKTMQLIADGWKSIGVSNSNDDNTLGSSFSTSSKLNIPNNIASSRSPLFLKGMPEKPKLCIKSQFGLRQTLLVVLCRDQIGEAGRFCKFM

SEQ ID NO: 78125 - protein, 790 aa, Arabidopsis thaliana
  peptide (1)..(790): Ceres Seq. ID no. 12606552
  misc_feature (1)..(227): Pfam Name: Protein kinase domain Pfam Description: Protein kinase domain
  misc_feature (266)..(724): Homolog of NCBI NO: 3107905 NR Description: leaf protein [Ipomoea nil]
  misc_feature (266)..(721): Homolog of NCBI NO: 30689969 NR Description: pentatricopeptide (PPR) repeat-containing protein
  misc_feature (266)..(721): Homolog of NCBI NO: 26449475 NR Description: unknown protein [Arabidopsis thaliana]
  misc_feature (1)..(259): Homolog of NCBI NO: 30688193 NR Description: NAF specific protein kinase family [Arabidopsis >gi|29294047|gb|AAO73884.1| NAF specific protein kinase family
  misc_feature (260)..(736): Homolog of NCBI NO: 34904258 NR Description: Ipomoea nil leaf protein like protein [Oryza
  misc_feature (1)..(256): Homolog of NCBI NO: 30683328 NR Description: CBL-interacting protein kinase 3 [Arabidopsis
  misc_feature (1)..(256): Homolog of NCBI NO: 30683332 NR Description: CBL-interacting protein kinase 3 [Arabidopsis
  misc_feature (1)..(256): Homolog of NCBI NO: 30683336 NR Description: CBL-interacting protein kinase 3 [Arabidopsis
  misc_feature (1)..(259): Homolog of NCBI NO: 7446371 NR Description: probable serine/threonine kinase (EC 2.7.1.-) - sorghum >gi|2632252|emb|CAA73067.1| serine/threonine kinase
  misc_feature (1)..(259): Homolog of NCBI NO: 7446372 NR Description: probable serine/threonine kinase (EC 2.7.1.-) - sorghum >gi|2632254|emb|CAA73068.1| serine/threonine kinase
MILDKDKVLKHKMAEQIKREISIMKLINHPNVVQLYEVLASKAKIYIVLEFISGGKLFDKIKNDGRMNEDEAQRYFQQLINAVDYCHSRGVYHRDLKPENLLLDAQENLKVAEFGLIALSQQAGGDGLRHTACGNPDYAAPEVLNDQGYDGAKADLWSCGVILFVLLAGYLPFEDSSLTTLYKKISSADFSCPPWLSSGVKNLIVRILDPNPMTRITIPEILEDVWFKKDYKPAVFEEKKEANLADVEAVFKDSEEGRVQLRSFPCVICSGGTTCGDVRSRTKLMNGLIERGRPQEAHSIFNTLIEEGHKPSLITYTTLVTALTRQKHFHSLLSLISKVEKNGLKPDTILFNAIINASSESGNLDQAMKIFEKMKESGCKPTASTFNTLIKGYGKIGKLEESSRLLDMMLRDEMLQPNDRTCNILVQAWCNQRKIEEAWNIVYKMQSYGVKPDVVTFNTLAKAYARIGSTCTAEDMIIPRMLHNKVKPNVRTCGTIVNGYCEEGKMEEALRFFYRMKELGVHPNLFVFNSLIKGFLNINDMDGVGEVVDLMEEFGVKPDVVTFSTLMNAWSSVGDMKRCEEIYTDMLEGGIDPDIHAFSILAKGYARAGEPEKAKQILNQMRKFGVRPNVVIYTQIISGWCSAGEMKKAMQVYKKMCGIVGLSPNLTTYETLIWGFGEAKQPWKAEELLKDMEGKNVVPTRKTMQLIADGWKSIGVSNSNDDNTLGSSFSTSSKLNIPNNIASSRSPLFLKGMPEKPKLCIKSQFGLRQTLLVVLCRDQIGEAGRFCKFM

SEQ ID NO: 78126 - protein, 778 aa, Arabidopsis thaliana
  peptide (1)..(778): Ceres Seq. ID no. 12606553
  misc_feature (1)..(215): Pfam Name: Protein kinase domain Pfam Description: Protein kinase domain
  misc_feature (254)..(712): Homolog of NCBI NO: 3107905 NR Description: leaf protein [Ipomoea nil]
  misc_feature (254)..(709): Homolog of NCBI NO: 30689969 NR Description: pentatricopeptide (PPR) repeat-containing protein
  misc_feature (254)..(709): Homolog of NCBI NO: 26449475 NR Description: unknown protein [Arabidopsis thaliana]
  misc_feature (1)..(247): Homolog of NCBI NO: 30688193 NR Description: NAF specific protein kinase family [Arabidopsis >gi|29294047|gb|AAO73884.1| NAF specific protein kinase family
  misc_feature (248)..(724): Homolog of NCBI NO: 34904258 NR Description: Ipomoea nil leaf protein like protein [Oryza
  misc_feature (1)..(244): Homolog of NCBI NO: 30683328 NR Description: CBL-interacting protein kinase 3 [Arabidopsis
  misc_feature (1)..(244): Homolog of NCBI NO: 30683332 NR Description: CBL-interacting protein kinase 3 [Arabidopsis
  misc_feature (1)..(244): Homolog of NCBI NO: 30683336 NR Description: CBL-interacting protein kinase 3 [Arabidopsis
  misc_feature (1)..(247): Homolog of NCBI NO: 7446371 NR Description: probable serine/threonine kinase (EC 2.7.1.-) - sorghum >gi|2632252|emb|CAA73067.1| serine/threonine kinase
  misc_feature (1)..(247): Homolog of NCBI NO: 7446372 NR Description: probable serine/threonine kinase (EC 2.7.1.-) - sorghum >gi|2632254|emb|CAA73068.1| serine/threonine kinase
MAEQIKREISIMKLINHPNVVQLYEVLASKAKIYIVLEFISGGKLFDKIKNDGRMNEDEAQRYFQQLINAVDYCHSRGVYHRDLKPENLLLDAQENLKVAEFGLIALSQQAGGDGLRHTACGNPDYAAPEVLNDQGYDGAKADLWSCGVILFVLLAGYLPFEDSSLTTLYKKISSADFSCPPWLSSGVKNLIVRILDPNPMTRITIPEILEDVWFKKDYKPAVFEEKKEANLADVEAVFKDSEEGRVQLRSFPCVICSGGTTCGDVRSRTKLMNGLIERGRPQEAHSIFNTLIEEGHKPSLITYTTLVTALTRQKHFHSLLSLISKVEKNGLKPDTILFNAIINASSESGNLDQAMKIFEKMKESGCKPTASTFNTLIKGYGKIGKLEESSRLLDMMLRDEMLQPNDRTCNILVQAWCNQRKIEEAWNIVYKMQSYGVKPDVVTFNTLAKAYARIGSTCTAEDMIIPRMLHNKVKPNVRTCGTIVNGYCEEGKMEEALRFFYRMKELGVHPNLFVFNSLIKGFLNINDMDGVGEVVDLMEEFGVKPDVVTFSTLMNAWSSVGDMKRCEEIYTDMLEGGIDPDIHAFSILAKGYARAGEPEKAKQILNQMRKFGVRPNVVIYTQIISGWCSAGEMKKAMQVYKKMCGIVGLSPNLTTYETLIWGFGEAKQPWKAEELLKDMEGKNVVPTRKTMQLIADGWKSIGVSNSNDDNTLGSSFSTSSKLNIPNNIASSRSPLFLKGMPEKPKLCIKSQFGLRQTLLVVLCRDQIGEAGRFCKFM

SEQ ID NO: 78127 - DNA, 1898 bp, Arabidopsis thaliana
  misc_feature (1)..(1898): Ceres Seq. ID no. 12606696
  misc_feature: MA Experiment ID: 108435 Result: Down-regulated in Transcription
  misc_feature: MA Experiment 108435 PARAMETER Experiment Name: At_stm_Mutants_cDNA_P Parameter: Plant Line Value: wt Landsburg vs stm
  misc_feature: MA Experiment 108435 PARAMETER Experiment Name: At_stm_Mutants_cDNA_P Parameter: Tissue Value: Shoot Apical Meristem Region
  misc_feature: MA Experiment ID: 108461 Result: Up-regulated in Transcription
  misc_feature: MA Experiment 108461 PARAMETER Experiment Name: At_Germinating_Seeds_cDNA_P Parameter: Age (day) Value: 1 vs. 0
  misc_feature: MA Experiment 108461 PARAMETER Experiment Name: At_Germinating_Seeds_cDNA_P Parameter: Tissue Value: Germinating Seeds
  misc_feature: MA Experiment ID: 108462 Result: Up-regulated in Transcription
  misc_feature: MA Experiment 108462 PARAMETER Experiment Name: At_Germinating_Seeds_cDNA_P Parameter: Age (day) Value: 2 vs. 0
  misc_feature: MA Experiment 108462 PARAMETER Experiment Name: At_Germinating_Seeds_cDNA_P Parameter: Tissue Value: Germinating Seeds
  misc_feature: MA Experiment ID: 108463 Result: Up-regulated in Transcription
  misc_feature: MA Experiment 108463 PARAMETER Experiment Name: At_Germinating_Seeds_cDNA_P Parameter: Age (day) Value: 3 vs. 0
  misc_feature: MA Experiment 108463 PARAMETER Experiment Name: At_Germinating_Seeds_cDNA_P Parameter: Tissue Value: Germinating Seeds
  misc_feature: MA Experiment ID: 108464 Result: Up-regulated in Transcription
  misc_feature: MA Experiment 108464 PARAMETER Experiment Name: At_Germinating_Seeds_cDNA_P Parameter: Age (day) Value: 4 vs. 0
  misc_feature: MA Experiment 108464 PARAMETER Experiment Name: At_Germinating_Seeds_cDNA_P Parameter: Tissue Value: Germinating Seeds
  misc_feature: MA Experiment ID: 108579 Result: Up-regulated in Transcription
  misc_feature: MA Experiment 108579 PARAMETER Experiment Name: At_4deg_Cold_cDNA_P Parameter: Temperature (deg C) Value: 4 vs. 22
  misc_feature: MA Experiment 108579 PARAMETER Experiment Name: At_4deg_Cold_cDNA_P Parameter: Timepoint (hr) Value: 6
  misc_feature: MA Experiment 108579 PARAMETER Experiment Name: At_4deg_Cold_cDNA_P Parameter: Tissue Value: Aerial
  misc_feature: MA Experiment ID: 108585 Result: Down-regulated in Transcription
  misc_feature: MA Experiment 108585 PARAMETER Experiment Name: At_5mM_NaNP_cDNA_P Parameter: Timepoint (hr) Value: 6
  misc_feature: MA Experiment 108585 PARAMETER Experiment Name: At_5mM_NaNP_cDNA_P Parameter: Tissue Value: Aerial
  misc_feature: MA Experiment 108585 PARAMETER Experiment Name: At_5mM_NaNP_cDNA_P Parameter: Treatment Value: null
  misc_feature: MA Experiment ID: 108595 Result: Down-regulated in Transcription
  misc_feature: MA Experiment 108595 PARAMETER Experiment Name: At_Ler-pi_Ovule_cDNA_P Parameter: Plant Line Value: null
  misc_feature: MA Experiment ID: 20000069 Result: Down-regulated in Transcription
  misc_feature: MA Experiment 20000069 PARAMETER Experiment Name: At_100uM_ABA_Mutants_cDNA_P Parameter: Plant Line Value: CS23
  misc_feature: MA Experiment 20000069 PARAMETER Experiment Name: At_100uM_ABA_Mutants_cDNA_P Parameter: Timepoint (hr) Value: 6
  misc_feature: MA Experiment 20000069 PARAMETER Experiment Name: At_100uM_ABA_Mutants_cDNA_P Parameter: Tissue Value: Aerial
  misc_feature: MA Experiment 20000069 PARAMETER Experiment Name: At_100uM_ABA_Mutants_cDNA_P Parameter: Treatment Value: 100uM ABA vs. No Treatment
  misc_feature: MA Experiment ID: 20000070 Result: Down-regulated in Transcription
  misc_feature: MA Experiment 20000070 PARAMETER Experiment Name: At_100uM_ABA_Mutants_cDNA_P Parameter: Plant Line Value: CS24
  misc_feature: MA Experiment 20000070 PARAMETER Experiment Name: At_100uM_ABA_Mutants_cDNA_P Parameter: Timepoint (hr) Value: 6
  misc_feature: MA Experiment 20000070 PARAMETER Experiment Name: At_100uM_ABA_Mutants_cDNA_P Parameter: Tissue Value: Aerial
  misc_feature: MA Experiment 20000070 PARAMETER Experiment Name: At_100uM_ABA_Mutants_cDNA_P Parameter: Treatment Value: 100uM ABA vs. No Treatment
  misc_feature: MA Experiment ID: 20000071 Result: Down-regulated in Transcription
  misc_feature: MA Experiment 20000071 PARAMETER Experiment Name: At_100uM_ABA_Mutants_cDNA_P Parameter: Plant Line Value: CS8104
  misc_feature: MA Experiment 20000071 PARAMETER Experiment Name: At_100uM_ABA_Mutants_cDNA_P Parameter: Timepoint (hr) Value: 6
  misc_feature: MA Experiment 20000071 PARAMETER Experiment Name: At_100uM_ABA_Mutants_cDNA_P Parameter: Tissue Value: Aerial
  misc_feature: MA Experiment 20000071 PARAMETER Experiment Name: At_100uM_ABA_Mutants_cDNA_P Parameter: Treatment Value: 100uM ABA vs. No Treatment
  misc_feature: MA Experiment ID: 20000072 Result: Down-regulated in Transcription
  misc_feature: MA Experiment 20000072 PARAMETER Experiment Name: At_100uM_ABA_Mutants_cDNA_P Parameter: Plant Line Value: CS8105
  misc_feature: MA Experiment 20000072 PARAMETER Experiment Name: At_100uM_ABA_Mutants_cDNA_P Parameter: Timepoint (hr) Value: 6
  misc_feature: MA Experiment 20000072 PARAMETER Experiment Name: At_100uM_ABA_Mutants_cDNA_P Parameter: Tissue Value: Aerial
  misc_feature: MA Experiment 20000072 PARAMETER Experiment Name: At_100uM_ABA_Mutants_cDNA_P Parameter: Treatment Value: 100uM ABA vs. No Treatment
  misc_feature: MA Experiment ID: 20000086 Result: Down-regulated in Transcription
  misc_feature: MA Experiment 20000086 PARAMETER Experiment Name: At_100uM_ABA_Mutants_cDNA_P Parameter: Plant Line Value: CS22
  misc_feature: MA Experiment 20000086 PARAMETER Experiment Name: At_100uM_ABA_Mutants_cDNA_P Parameter: Timepoint (hr) Value: 6
  misc_feature: MA Experiment 20000086 PARAMETER Experiment Name: At_100uM_ABA_Mutants_cDNA_P Parameter: Tissue Value: Aerial
  misc_feature: MA Experiment 20000086 PARAMETER Experiment Name: At_100uM_ABA_Mutants_cDNA_P Parameter: Treatment Value: 100uM ABA vs. No Treatment
  misc_feature: MA Experiment ID: 20000087 Result: Down-regulated in Transcription
  misc_feature: MA Experiment 20000087 PARAMETER Experiment Name: At_100uM_ABA_Mutants_cDNA_P Parameter: Plant Line Value: WS
  misc_feature: MA Experiment 20000087 PARAMETER Experiment Name: At_100uM_ABA_Mutants_cDNA_P Parameter: Timepoint (hr) Value: 6
  misc_feature: MA Experiment 20000087 PARAMETER Experiment Name: At_100uM_ABA_Mutants_cDNA_P Parameter: Tissue Value: Aerial
  misc_feature: MA Experiment 20000087 PARAMETER Experiment Name: At_100uM_ABA_Mutants_cDNA_P Parameter: Treatment Value: 100uM ABA vs. No Treatment
  misc_feature: MA Experiment ID: 20000088 Result: Down-regulated in Transcription
  misc_feature: MA Experiment 20000088 PARAMETER Experiment Name: At_100uM_ABA_Mutants_cDNA_P Parameter: Plant Line Value: Landsberg
  misc_feature: MA Experiment 20000088 PARAMETER Experiment Name: At_100uM_ABA_Mutants_cDNA_P Parameter: Timepoint (hr) Value: 6
  misc_feature: MA Experiment 20000088 PARAMETER Experiment Name: At_100uM_ABA_Mutants_cDNA_P Parameter: Tissue Value: Aerial
  misc_feature: MA Experiment 20000088 PARAMETER Experiment Name: At_100uM_ABA_Mutants_cDNA_P Parameter: Treatment Value: 100uM ABA vs. No Treatment
  misc_feature: MA Experiment ID: 20000089 Result: Down-regulated in Transcription
  misc_feature: MA Experiment ID: 20000090 Result: Down-regulated in Transcription
  misc_feature: MA Experiment ID: 20000117 Result: Down-regulated in Transcription
  misc_feature: MA Experiment 20000117 PARAMETER Experiment Name: At_100uM_ABA_Mutants_cDNA_P Parameter: Plant Line Value: Columbia
  misc_feature: MA Experiment 20000117 PARAMETER Experiment Name: At_100uM_ABA_Mutants_cDNA_P Parameter: Timepoint (hr) Value: 6
  misc_feature: MA Experiment 20000117 PARAMETER Experiment Name: At_100uM_ABA_Mutants_cDNA_P Parameter: Tissue Value: Aerial
  misc_feature: MA Experiment 20000117 PARAMETER Experiment Name: At_100uM_ABA_Mutants_cDNA_P Parameter: Treatment Value: 100uM ABA vs. No Treatment
  misc_feature: MA Experiment ID: 20000180 Result: Up-regulated in Transcription
  misc_feature: MA Experiment 20000180 PARAMETER Experiment Name: At_Germinating_Seeds_P Parameter: Age (hr) Value: 24 vs. 0
  misc_feature: MA Experiment 20000180 PARAMETER Experiment Name: At_Germinating_Seeds_P Parameter: Tissue Value: Germinating Seeds
  misc_feature: MA Experiment ID: 20000185 Result: Down-regulated in Transcription
  misc_feature: MA Experiment 20000185 PARAMETER Experiment Name: At_Roots__P Parameter: Age (day) Value: 7 vs. 21
  misc_feature: MA Experiment 20000185 PARAMETER Experiment Name: At_Roots__P Parameter: Organism Value: A. thaliana
  misc_feature: MA Experiment 20000185 PARAMETER Experiment Name: At_Roots__P Parameter: Tissue Value: Roots vs. Whole Plant
  misc_feature: MA Experiment ID: 20000224 Result: Up-regulated in Transcription
  misc_feature: MA Experiment ID: 20000235 Result: Up-regulated in Transcription
  misc_feature: MA Experiment 20000235 PARAMETER Experiment Name: At_Siliques_P Parameter: Age (day) Value: 21
  misc_feature: MA Experiment 20000235 PARAMETER Experiment Name: At_Siliques_P Parameter: Organism Value: A. thaliana
  misc_feature: MA Experiment 20000235 PARAMETER Experiment Name: At_Siliques_P Parameter: Plant Line Value: WS
  misc_feature: MA Experiment 20000235 PARAMETER Experiment Name: At_Siliques_P Parameter: Tissue Value: 5-10mm Siliques vs. Whole Plant
  misc_feature: MA Experiment ID: 20000438 Result: Up-regulated in Transcription
  misc_feature: MA Experiment 20000438 PARAMETER Experiment Name: At_Shoots__P Parameter: Age (day) Value: 14
  misc_feature: MA Experiment 20000438 PARAMETER Experiment Name: At_Shoots__P Parameter: Tissue Value: Shoots vs. Whole Plant
  misc_feature: MA Experiment ID: 20000439 Result: Down-regulated in Transcription
  misc_feature: MA Experiment 20000439 PARAMETER Experiment Name: At_Roots__P Parameter: Age (day) Value: 14 vs. 21
  misc_feature: MA Experiment 20000439 PARAMETER Experiment Name: At_Roots__P Parameter: Organism Value: A. thaliana
  misc_feature: MA Experiment 20000439 PARAMETER Experiment Name: At_Roots__P Parameter: Tissue Value: Roots vs. Whole Plant
  misc_feature: MA Experiment ID: 20000794 Result: Up-regulated in Transcription
  misc_feature: MA Experiment 20000794 PARAMETER Experiment Name: At_Petals_P Parameter: Age (day) Value: 23-25 days
  misc_feature: MA Experiment 20000794 PARAMETER Experiment Name: At_Petals_P Parameter: Plant Line Value: WS
  misc_feature: MA Experiment 20000794 PARAMETER Experiment Name: At_Petals_P Parameter: Tissue Value: Petals vs. Whole plant
  misc_feature: MA Experiment ID: 20001248 Result: Down-regulated in Transcription
  misc_feature: MA Experiment 20001248 PARAMETER Experiment Name: At_Far-red-induction_P Parameter: Age (day) Value: 7
  misc_feature: MA Experiment 20001248 PARAMETER Experiment Name: At_Far-red-induction_P Parameter: Light Value: Far-red vs. White
  misc_feature: MA Experiment 20001248 PARAMETER Experiment Name: At_Far-red-induction_P Parameter: Organism Value: A. thaliana
  misc_feature: MA Experiment 20001248 PARAMETER Experiment Name: At_Far-red-induction_P Parameter: Plant Line Value: Columbia
  misc_feature: MA Experiment 20001248 PARAMETER Experiment Name: At_Far-red-induction_P Parameter: Timepoint (hr) Value: 4
  misc_feature: MA Experiment 20001248 PARAMETER Experiment Name: At_Far-red-induction_P Parameter: Tissue Value: Whole Plant
  misc_feature: MA Experiment ID: 20001450 Result: Down-regulated in Transcription
  misc_feature: MA Experiment 20001450 PARAMETER Experiment Name: At_Far-red-induction_P Parameter: Age (day) Value: 7
  misc_feature: MA Experiment 20001450 PARAMETER Experiment Name: At_Far-red-induction_P Parameter: Light Value: Far-red vs. White
  misc_feature: MA Experiment 20001450 PARAMETER Experiment Name: At_Far-red-induction_P Parameter: Organism Value: A. thaliana
  misc_feature: MA Experiment 20001450 PARAMETER Experiment Name: At_Far-red-induction_P Parameter: Plant Line Value: Columbia
  misc_feature: MA Experiment 20001450 PARAMETER Experiment Name: At_Far-red-induction_P Parameter: Timepoint (hr) Value: 8
  misc_feature: MA Experiment 20001450 PARAMETER Experiment Name: At_Far-red-induction_P Parameter: Tissue Value: Whole Plant
aaagaaggaagaaaatttgagtgggtgagaattttttacgatagaggaagagacagcatcatctacttgtgttgtctgtgtacatatattacagtaagcgttgcaatataacttcttgaggatcttctcacattaatgggtcaaaccttttgctcttccttttgattaatttagtgtttgacaatctcctcctccttctccttcttcttcaaagttttgtcgcagtatctattgttcttacagagagaaaggaaagctttagtcttttaccagtttgatccaattctgggtttcactgaaaaaaagttgggagtttgattcttctaactgtagaagaaacagagtcaacagaagaaaactaaaaaagttgagatttttctctcacgcgctcaagaacttgagtatgtcttcttctgtagcagtgttatgggttgctacttcttctctaaatccagacccaatgaacaattgtgggttggtaagggttctagaatcttctagactgttctctccttgtcagaatcagagactaaacaaaggtaagaagaagcagataccaacttggagttcttcttttgtaaggaaccgaagtagaagaattggtgttgtgtcttcaagcttagtagcaagtccttctggagagatagctctttcatctgaagagaaggtttacaatgttgtgttgaaacaagctgctttggtgaacaaacagctaaggtcttcttcttatgaccttgatgtgaagaaaccacaagatgttgttcttcctgggagtttgagtttgttgggtgaagcttatgatcgatgcggtgaagtttgcgctgaatatgctaagacgttttatcttggaactttgcttatgacacccgaaaggcgaaaggcgatttgggcaatctacgtttggtgtagaagaactgatgaacttgtggatgggccaaatgcttcacatataactcccatggctttagatagatgggaagcaaggttagaagatcttttccgtggtcgtcctttcgatatgcttgatgctgctctcgctgatacagttgctagatacccggtcgatattcagccatttcgagacatgatcgaaggaatgagaatggacttgaagaaatcgagataccagaacttcgatgatctatacctttactgctactacgtcgctggaaccgtcggattgatgagcgttccggttatgggaatcgatcctaagtcgaaagcaacaaccgaaagtgtttacaacgctgccttggcccttggtatagccaatcagcttactaacatactcagagacgtaggcgaagatgcgagaagaggaagggtttatctgcctcaggatgaattggctcaggctggtctttcagatgaagacatattcgccggaaaagtaactgataaatggagaaacttcatgaaaatgcagcttaaacgagcaagaatgttcttcgacgaagctgagaaaggcgtcaccgagctcagtgccgctagcagatggcctgtatgggcttcattgctattgtacaggagaatactggacgagattgaagcgaatgattacaacaattttactaagagagcttatgtggggaaagtcaagaaaattgcagctttgccattggcttatgctaaatcagtactaaagacttcaagttcaagactatcgatatgagagcgagaggaaagtggaacaaaaacaacctaagagcgctttttgtgattaagaaaaaacttaggctcgaatttattatgttaactaatatatacatattaatggggaagcaaattcttataatgttacattatctttctgaatgtaaaaaagtatttttttttttaattttattttagttatagttctcttggcctaatgaggggatatacaatttttggttgat

SEQ ID NO: 78128 - protein, 422 aa, Arabidopsis thaliana; identical to SEQ ID NO: 47842
  peptide (1)..(422): Ceres Seq. ID no. 12606697
  misc_feature (1)..(422): Homolog of NCBI NO: 15237933 NR Description: phytoene synthase (geranylgeranyl-diphosphate transferase)(PSY); protein id: At5g17230.1, supported by cDNA: supported by cDNA: gi_15810496, supported by cDNA: phytoene
  misc_feature (1)..(422): Homolog of NCBI NO: 21553694 NR Description: phytoene synthase [Arabidopsis thaliana]
  misc_feature (1)..(422): Homolog of NCBI NO: 413732 NR Description: phytoene synthase
  misc_feature (4)..(416): Homolog of NCBI NO: 585749 NR Description: Phytoene synthase, chloroplast precursor
  misc_feature (30)..(416): Homolog of NCBI NO: 40456029 NR Description: phytoene synthase [Momordica charantia var.
  misc_feature (71)..(416): Homolog of NCBI NO: 6959860 NR Description: phytoene synthase [Citrus unshiu]
  misc_feature (4)..(421): Homolog of NCBI NO: 12584564 NR Description: phytoene synthase [Helianthus annuus]
  misc_feature (4)..(421): Homolog of NCBI NO: 11990226 NR Description: phytoene synthase [Helianthus annuus]
  misc_feature (68)..(416): Homolog of NCBI NO: 1346882 NR Description: Phytoene synthase, chloroplast precursor (MEL5)
  misc_feature (71)..(416): Homolog of NCBI NO: 13542332 NR Description: phytoene synthase [Citrus x paradisi]

SEQ ID NO: 78129 - protein, 403 aa, Arabidopsis thaliana; identical to SEQ ID NO: 47843
  peptide (1)..(403): Ceres Seq. ID no. 12606698
  misc_feature (1)..(403): Homolog of NCBI NO: 15237933 NR Description: phytoene synthase (geranylgeranyl-diphosphate transferase)(PSY); protein id: At5g17230.1, supported by cDNA: supported by cDNA: gi_15810496, supported by cDNA: phytoene
  misc_feature (1)..(403): Homolog of NCBI NO: 21553694 NR Description: phytoene synthase [Arabidopsis thaliana]
  misc_feature (1)..(403): Homolog of NCBI NO: 413732 NR Description: phytoene synthase
  misc_feature (1)..(397): Homolog of NCBI NO: 585749 NR Description: Phytoene synthase, chloroplast precursor
  misc_feature (11)..(397): Homolog of NCBI NO: 40456029 NR Description: phytoene synthase [Momordica charantia var.
  misc_feature (52)..(397): Homolog of NCBI NO: 6959860 NR Description: phytoene synthase [Citrus unshiu]
  misc_feature (1)..(402): Homolog of NCBI NO: 12584564 NR Description: phytoene synthase [Helianthus annuus]
  misc_feature (1)..(402): Homolog of NCBI NO: 11990226 NR Description: phytoene synthase [Helianthus annuus]
  misc_feature (49)..(397): Homolog of NCBI NO: 1346882 NR Description: Phytoene synthase, chloroplast precursor (MEL5)
  misc_feature (52)..(397): Homolog of NCBI NO: 13542332 NR Description: phytoene synthase [Citrus x paradisi]

SEQ ID NO: 78130 - protein, 270 aa, Arabidopsis thaliana; identical to SEQ ID NO: 29905
  peptide (1)..(270): Ceres Seq. ID no. 12606699
  misc_feature (1)..(270): Homolog of NCBI NO: 15237933 NR Description: phytoene synthase (geranylgeranyl-diphosphate transferase)(PSY); protein id: At5g17230.1, supported by cDNA: supported by cDNA: gi_15810496, supported by cDNA: phytoene
  misc_feature (1)..(270): Homolog of NCBI NO: 21553694 NR Description: phytoene synthase [Arabidopsis thaliana]
  misc_feature (1)..(270): Homolog of NCBI NO: 413732 NR Description: phytoene synthase
  misc_feature (1)..(264): Homolog of NCBI NO: 585749 NR Description: Phytoene synthase, chloroplast precursor
  misc_feature (1)..(264): Homolog of NCBI NO: 40456029 NR Description: phytoene synthase [Momordica charantia var.
  misc_feature (1)..(264): Homolog of NCBI NO: 6959860 NR Description: phytoene synthase [Citrus unshiu]
  misc_feature (1)..(269): Homolog of NCBI NO: 12584564 NR Description: phytoene synthase [Helianthus annuus]
  misc_feature (1)..(269): Homolog of NCBI NO: 11990226 NR Description: phytoene synthase [Helianthus annuus]
  misc_feature (1)..(264): Homolog of NCBI NO: 1346882 NR Description: Phytoene synthase, chloroplast precursor (MEL5)
  misc_feature (1)..(264): Homolog of NCBI NO: 13542332 NR Description: phytoene synthase [Citrus x paradisi]

SEQ ID NO: 78131 - DNA, 624 bp, Arabidopsis thaliana
  misc_feature (1)..(624): Ceres Seq. ID no. 12606714
  misc_feature: MA Experiment ID: 108434 Result: Up-regulated in Transcription
  misc_feature: MA Experiment 108434 PARAMETER Experiment Name: At_Root_Tips_cDNA_P Parameter: Tissue Value: Root Tips
  misc_feature: MA Experiment ID: 108461 Result: Up-regulated in Transcription
  misc_feature: MA Experiment 108461 PARAMETER Experiment Name: At_Germinating_Seeds_cDNA_P Parameter: Age (day) Value: 1 vs. 0
  misc_feature: MA Experiment 108461 PARAMETER Experiment Name: At_Germinating_Seeds_cDNA_P Parameter: Tissue Value: Germinating Seeds
  misc_feature: MA Experiment ID: 108462 Result: Up-regulated in Transcription
  misc_feature: MA Experiment 108462 PARAMETER Experiment Name: At_Germinating_Seeds_cDNA_P Parameter: Age (day) Value: 2 vs. 0
  misc_feature: MA Experiment 108462 PARAMETER Experiment Name: At_Germinating_Seeds_cDNA_P Parameter: Tissue Value: Germinating Seeds
  misc_feature: MA Experiment ID: 108473 Result: Down-regulated in Transcription
  misc_feature: MA Experiment 108473 PARAMETER Experiment Name: At_Drought_Flowers_cDNA_P Parameter: Timepoint (hr) Value: 7 d
  misc_feature: MA Experiment 108473 PARAMETER Experiment Name: At_Drought_Flowers_cDNA_P Parameter: Tissue Value: Flower
  misc_feature: MA Experiment 108473 PARAMETER Experiment Name: At_Drought_Flowers_cDNA_P Parameter: Treatment Value: Drought vs. No Drought
  misc_feature: MA Experiment ID: 20000069 Result: Down-regulated in Transcription
  misc_feature: MA Experiment 20000069 PARAMETER Experiment Name: At_100uM_ABA_Mutants_cDNA_P Parameter: Plant Line Value: CS23
  misc_feature: MA Experiment 20000069 PARAMETER Experiment Name: At_100uM_ABA_Mutants_cDNA_P Parameter: Timepoint (hr) Value: 6
  misc_feature: MA Experiment 20000069 PARAMETER Experiment Name: At_100uM_ABA_Mutants_cDNA_P Parameter: Tissue Value: Aerial
  misc_feature: MA Experiment 20000069 PARAMETER Experiment Name: At_100uM_ABA_Mutants_cDNA_P Parameter: Treatment Value: 100uM ABA vs. No Treatment
  misc_feature: MA Experiment ID: 20000111 Result: Down-regulated in Transcription
  misc_feature: MA Experiment 20000111 PARAMETER Experiment Name: At_42deg_Heat_cDNA_P Parameter: Temperature (deg C) Value: 42 vs. 22
  misc_feature: MA Experiment 20000111 PARAMETER Experiment Name: At_42deg_Heat_cDNA_P Parameter: Timepoint (hr) Value: 6
  misc_feature: MA Experiment 20000111 PARAMETER Experiment Name: At_42deg_Heat_cDNA_P Parameter: Tissue Value: Aerial
  misc_feature: MA Experiment ID: 20000112 Result: Down-regulated in Transcription
  misc_feature: MA Experiment 20000112 PARAMETER Experiment Name: At_42deg_Heat_cDNA_P Parameter: Temperature (deg C) Value: 42 vs. 22
  misc_feature: MA Experiment 20000112 PARAMETER Experiment Name: At_42deg_Heat_cDNA_P Parameter: Timepoint (hr) Value: 2
  misc_feature: MA Experiment 20000112 PARAMETER Experiment Name: At_42deg_Heat_cDNA_P Parameter: Tissue Value: Aerial
  misc_feature: MA Experiment ID: 20000113 Result: Down-regulated in Transcription
  misc_feature: MA Experiment 20000113 PARAMETER Experiment Name: At_42deg_Heat_cDNA_P Parameter: Temperature (deg C) Value: 42 vs. 22
  misc_feature: MA Experiment 20000113 PARAMETER Experiment Name: At_42deg_Heat_cDNA_P Parameter: Timepoint (hr) Value: 8
  misc_feature: MA Experiment 20000113 PARAMETER Experiment Name: At_42deg_Heat_cDNA_P Parameter: Tissue Value: Aerial
  misc_feature: MA Experiment ID: 20000117 Result: Down-regulated in Transcription
  misc_feature: MA Experiment 20000117 PARAMETER Experiment Name: At_100uM_ABA_Mutants_cDNA_P Parameter: Plant Line Value: Columbia
  misc_feature: MA Experiment 20000117 PARAMETER Experiment Name: At_100uM_ABA_Mutants_cDNA_P Parameter: Timepoint (hr) Value: 6
  misc_feature: MA Experiment 20000117 PARAMETER Experiment Name: At_100uM_ABA_Mutants_cDNA_P Parameter: Tissue Value: Aerial
  misc_feature: MA Experiment 20000117 PARAMETER Experiment Name: At_100uM_ABA_Mutants_cDNA_P Parameter: Treatment Value: 100uM ABA vs. No Treatment
  misc_feature: MA Experiment ID: 20000144 Result: Down-regulated in Transcription
  misc_feature: MA Experiment 20000144 PARAMETER Experiment Name: At_42deg_Heat_cDNA_P Parameter: Temperature (deg C) Value: 42 vs. 22
  misc_feature: MA Experiment 20000144 PARAMETER Experiment Name: At_42deg_Heat_cDNA_P Parameter: Timepoint (hr) Value: 1
  misc_feature: MA Experiment 20000144 PARAMETER Experiment Name: At_42deg_Heat_cDNA_P Parameter: Tissue Value: Aerial
  misc_feature: MA Experiment ID: 20000173 Result: Down-regulated in Transcription
  misc_feature: MA Experiment 20000173 PARAMETER Experiment Name: At_42deg_Heat_P Parameter: Age (day) Value: 14
  misc_feature: MA Experiment 20000173 PARAMETER Experiment Name: At_42deg_Heat_P Parameter: Organism Value: A. thaliana
  misc_feature: MA Experiment 20000173 PARAMETER Experiment Name: At_42deg_Heat_P Parameter: Plant Line Value: WS
  misc_feature: MA Experiment 20000173 PARAMETER Experiment Name: At_42deg_Heat_P Parameter: Temperature (deg C) Value: 42 vs. 22
  misc_feature: MA Experiment 20000173 PARAMETER Experiment Name: At_42deg_Heat_P Parameter: Timepoint (hr) Value: 6
  misc_feature: MA Experiment 20000173 PARAMETER Experiment Name: At_42deg_Heat_P Parameter: Tissue Value: Aerial
  misc_feature: MA Experiment ID: 20000179 Result: Up-regulated in Transcription
  misc_feature: MA Experiment 20000179 PARAMETER Experiment Name: At_Germinating_Seeds_P Parameter: Age (hr) Value: 6 vs. 0
  misc_feature: MA Experiment 20000179 PARAMETER Experiment Name: At_Germinating_Seeds_P Parameter: Tissue Value: Germinating Seeds
  misc_feature: MA Experiment ID: 20000180 Result: Up-regulated in Transcription
  misc_feature: MA Experiment 20000180 PARAMETER Experiment Name: At_Germinating_Seeds_P Parameter: Age (hr) Value: 24 vs. 0
  misc_feature: MA Experiment 20000180 PARAMETER Experiment Name: At_Germinating_Seeds_P Parameter: Tissue Value: Germinating Seeds
  misc_feature: MA Experiment ID: 20000227 Result: Up-regulated in Transcription
  misc_feature: MA Experiment 20000227 PARAMETER Experiment Name: At_Root-Tips-vs-Tops_P Parameter: Tissue Value: Root Tips vs. Root Tops
  misc_feature: MA Experiment ID: 20000234 Result: Up-regulated in Transcription
  misc_feature: MA Experiment 20000234 PARAMETER Experiment Name: At_Siliques_P Parameter: Age (day) Value: 21
  misc_feature: MA Experiment 20000234 PARAMETER Experiment Name: At_Siliques_P Parameter: Organism Value: A. thaliana
  misc_feature: MA Experiment 20000234 PARAMETER Experiment Name: At_Siliques_P Parameter: Plant Line Value: WS
  misc_feature: MA Experiment 20000234 PARAMETER Experiment Name: At_Siliques_P Parameter: Tissue Value: Less Than 5mm Siliques vs. Whole Plant
  misc_feature: MA Experiment ID: 20000264 Result: Up-regulated in Transcription
  misc_feature: MA Experiment 20000264 PARAMETER Experiment Name: At_Open_Flower_P Parameter: Age (day) Value: 21
  misc_feature: MA Experiment 20000264 PARAMETER Experiment Name: At_Open_Flower_P Parameter: Plant Line Value: WS
  misc_feature: MA Experiment 20000264 PARAMETER Experiment Name: At_Open_Flower_P Parameter: Tissue Value: Open Flower vs. Whole Plant
  misc_feature: MA Experiment ID: 20000265 Result: Up-regulated in Transcription
  misc_feature: MA Experiment 20000265 PARAMETER Experiment Name: At_Open_Flower_P Parameter: Age (day) Value: 21
  misc_feature: MA Experiment 20000265 PARAMETER Experiment Name: At_Open_Flower_P Parameter: Plant Line Value: WS
  misc_feature: MA Experiment 20000265 PARAMETER Experiment Name: At_Open_Flower_P Parameter: Tissue Value: Closed Flower vs. Whole Plant
  misc_feature: MA Experiment ID: 20000437 Result: Down-regulated in Transcription
  misc_feature: MA Experiment 20000437 PARAMETER Experiment Name: At_Drought_P Parameter: Age (day) Value: 8
  misc_feature: MA Experiment 20000437 PARAMETER Experiment Name: At_Drought_P Parameter: Organism Value: A. thaliana
  misc_feature: MA Experiment 20000437 PARAMETER Experiment Name: At_Drought_P Parameter: Plant Line Value: WS
  misc_feature: MA Experiment 20000437 PARAMETER Experiment Name: At_Drought_P Parameter: Timepoint (hr) Value: 24
  misc_feature: MA Experiment 20000437 PARAMETER Experiment Name: At_Drought_P Parameter: Tissue Value: Whole Plant
  misc_feature: MA Experiment 20000437 PARAMETER Experiment Name: At_Drought_P Parameter: Treatment Value: Drought vs. No Drought
  misc_feature: MA Experiment ID: 20000438 Result: Up-regulated in Transcription
  misc_feature: MA Experiment 20000438 PARAMETER Experiment Name: At_Shoots__P Parameter: Age (day) Value: 14
  misc_feature: MA Experiment 20000438 PARAMETER Experiment Name: At_Shoots__P Parameter: Tissue Value: Shoots vs. Whole Plant
  misc_feature: MA Experiment ID: 20000794 Result: Down-regulated in Transcription
  misc_feature: MA Experiment 20000794 PARAMETER Experiment Name: At_Petals_P Parameter: Age (day) Value: 23-25 days
  misc_feature: MA Experiment 20000794 PARAMETER Experiment Name: At_Petals_P Parameter: Plant Line Value: WS
  misc_feature: MA Experiment 20000794 PARAMETER Experiment Name: At_Petals_P Parameter: Tissue Value: Petals vs. Whole plant
  misc_feature: MA Experiment ID: 20001248 Result: Down-regulated in Transcription
  misc_feature: MA Experiment 20001248 PARAMETER Experiment Name: At_Far-red-induction_P Parameter: Age (day) Value: 7
  misc_feature: MA Experiment 20001248 PARAMETER Experiment Name: At_Far-red-induction_P Parameter: Light Value: Far-red vs. White
  misc_feature: MA Experiment 20001248 PARAMETER Experiment Name: At_Far-red-induction_P Parameter: Organism Value: A. thaliana
  misc_feature: MA Experiment 20001248 PARAMETER Experiment Name: At_Far-red-induction_P Parameter: Plant Line Value: Columbia
  misc_feature: MA Experiment 20001248 PARAMETER Experiment Name: At_Far-red-induction_P Parameter: Timepoint (hr) Value: 4
  misc_feature: MA Experiment 20001248 PARAMETER Experiment Name: At_Far-red-induction_P Parameter: Tissue Value: Whole Plant
  misc_feature: MA Experiment ID: 20001450 Result: Down-regulated in Transcription
  misc_feature: MA Experiment 20001450 PARAMETER Experiment Name: At_Far-red-induction_P Parameter: Age (day) Value: 7
  misc_feature: MA Experiment 20001450 PARAMETER Experiment Name: At_Far-red-induction_P Parameter: Light Value: Far-red vs. White
  misc_feature: MA Experiment 20001450 PARAMETER Experiment Name: At_Far-red-induction_P Parameter: Organism Value: A. thaliana
  misc_feature: MA Experiment 20001450 PARAMETER Experiment Name: At_Far-red-induction_P Parameter: Plant Line Value: Columbia
  misc_feature: MA Experiment 20001450 PARAMETER Experiment Name: At_Far-red-induction_P Parameter: Timepoint (hr) Value: 8
  misc_feature: MA Experiment 20001450 PARAMETER Experiment Name: At_Far-red-induction_P Parameter: Tissue Value: Whole Plant
  misc_feature: MA Experiment ID: 20001554 Result: Down-regulated in Transcription
  misc_feature: MA Experiment 20001554 PARAMETER Experiment Name: At_Drought_Soil_Dry_P Parameter: Age (day) Value: 21
  misc_feature: MA Experiment 20001554 PARAMETER Experiment Name: At_Drought_Soil_Dry_P Parameter: Organism Value: A. thaliana
  misc_feature: MA Experiment 20001554 PARAMETER Experiment Name: At_Drought_Soil_Dry_P Parameter: Plant Line Value: WS
  misc_feature: MA Experiment 20001554 PARAMETER Experiment Name: At_Drought_Soil_Dry_P Parameter: Post Timepoint (hr) Value: None
  misc_feature: MA Experiment 20001554 PARAMETER Experiment Name: At_Drought_Soil_Dry_P Parameter: Post-Treatment Value: None
  misc_feature: MA Experiment 20001554 PARAMETER Experiment Name: At_Drought_Soil_Dry_P Parameter: Timepoint (day) Value: 7
  misc_feature: MA Experiment 20001554 PARAMETER Experiment Name: At_Drought_Soil_Dry_P Parameter: Treatment Value: Drought vs. No Drought
  misc_feature: MA Experiment ID: 20001555 Result: Down-regulated in Transcription
  misc_feature: MA Experiment 20001555 PARAMETER Experiment Name: At_Drought_Soil_Dry_P Parameter: Age (day) Value: 24
  misc_feature: MA Experiment 20001555 PARAMETER Experiment Name: At_Drought_Soil_Dry_P Parameter: Organism Value: A. thaliana
  misc_feature: MA Experiment 20001555 PARAMETER Experiment Name: At_Drought_Soil_Dry_P Parameter: Plant Line Value: WS
  misc_feature: MA Experiment 20001555 PARAMETER Experiment Name: At_Drought_Soil_Dry_P Parameter: Post Timepoint (hr) Value: None
  misc_feature: MA Experiment 20001555 PARAMETER Experiment Name: At_Drought_Soil_Dry_P Parameter: Post-Treatment Value: None
  misc_feature: MA Experiment 20001555 PARAMETER Experiment Name: At_Drought_Soil_Dry_P Parameter: Timepoint (day) Value: 10
  misc_feature: MA Experiment 20001555 PARAMETER Experiment Name: At_Drought_Soil_Dry_P Parameter: Treatment Value: Drought vs. No Drought
  misc_feature: MA Experiment ID: 20001556 Result: Down-regulated in Transcription
  misc_feature: MA Experiment 20001556 PARAMETER Experiment Name: At_Drought_Soil_Dry_P Parameter: Age (day) Value: 26
  misc_feature: MA Experiment 20001556 PARAMETER Experiment Name: At_Drought_Soil_Dry_P Parameter: Organism Value: A. thaliana
  misc_feature: MA Experiment 20001556 PARAMETER Experiment Name: At_Drought_Soil_Dry_P Parameter: Plant Line Value: WS
  misc_feature: MA Experiment 20001556 PARAMETER Experiment Name: At_Drought_Soil_Dry_P Parameter: Post Timepoint (hr) Value: None
  misc_feature: MA Experiment 20001556 PARAMETER Experiment Name: At_Drought_Soil_Dry_P Parameter: Post-Treatment Value: None
  misc_feature: MA Experiment 20001556 PARAMETER Experiment Name: At_Drought_Soil_Dry_P Parameter: Timepoint (day) Value: 12
  misc_feature: MA Experiment 20001556 PARAMETER Experiment Name: At_Drought_Soil_Dry_P Parameter: Treatment Value: Drought vs. No Drought
  misc_feature: MA Experiment ID: 20001557 Result: Down-regulated in Transcription
  misc_feature: MA Experiment 20001557 PARAMETER Experiment Name: At_Drought_Soil_Dry_P Parameter: Age (day) Value: 27
  misc_feature: MA Experiment 20001557 PARAMETER Experiment Name: At_Drought_Soil_Dry_P Parameter: Organism Value: A. thaliana
  misc_feature: MA Experiment 20001557 PARAMETER Experiment Name: At_Drought_Soil_Dry_P Parameter: Plant Line Value: WS
  misc_feature: MA Experiment 20001557 PARAMETER Experiment Name: At_Drought_Soil_Dry_P Parameter: Post Timepoint (hr) Value: 3
  misc_feature: MA Experiment 20001557 PARAMETER Experiment Name: At_Drought_Soil_Dry_P Parameter: Post-Treatment Value: Re-Water vs. No Drought
  misc_feature: MA Experiment 20001557 PARAMETER Experiment Name: At_Drought_Soil_Dry_P Parameter: Timepoint (day) Value: 13
  misc_feature: MA Experiment 20001557 PARAMETER Experiment Name: At_Drought_Soil_Dry_P Parameter: Treatment Value: Drought vs. No Drought
  misc_feature: MA Experiment ID: 20001560 Result: Up-regulated in Transcription
  misc_feature: MA Experiment 20001560 PARAMETER Experiment Name: At_Drought_Soil_Dry_P Parameter: Age (day) Value: 28
  misc_feature: MA Experiment 20001560 PARAMETER Experiment Name: At_Drought_Soil_Dry_P Parameter: Organism Value: A. thaliana
  misc_feature: MA Experiment 20001560 PARAMETER Experiment Name: At_Drought_Soil_Dry_P Parameter: Plant Line Value: WS
  misc_feature: MA Experiment 20001560 PARAMETER Experiment Name: At_Drought_Soil_Dry_P Parameter: Post Timepoint (hr) Value: None
  misc_feature: MA Experiment 20001560 PARAMETER Experiment Name: At_Drought_Soil_Dry_P Parameter: Post-Treatment Value: None
  misc_feature: MA Experiment 20001560 PARAMETER Experiment Name: At_Drought_Soil_Dry_P Parameter: Timepoint (day) Value: 14
  misc_feature: MA Experiment 20001560 PARAMETER Experiment Name: At_Drought_Soil_Dry_P Parameter: Treatment Value: Drought vs. No Drought
  misc_feature: MA Experiment ID: 20001904 Result: Down-regulated in Transcription
  misc_feature: MA Experiment 20001904 PARAMETER Experiment Name: At_Drought_Reproduction_P Parameter: Age (day) Value: 37
  misc_feature: MA Experiment 20001904 PARAMETER Experiment Name: At_Drought_Reproduction_P Parameter: Organism Value: A. thaliana
  misc_feature: MA Experiment 20001904 PARAMETER Experiment Name: At_Drought_Reproduction_P Parameter: Plant Line Value: WS
  misc_feature: MA Experiment 20001904 PARAMETER Experiment Name: At_Drought_Reproduction_P Parameter: Timepoint (day) Value: 7
  misc_feature: MA Experiment 20001904 PARAMETER Experiment Name: At_Drought_Reproduction_P Parameter: Tissue Value: Rosettes
  misc_feature: MA Experiment 20001904 PARAMETER Experiment Name: At_Drought_Reproduction_P Parameter: Treatment Value: Drought vs. No Drought
  misc_feature: MA Experiment ID: 20001905 Result: Down-regulated in Transcription
  misc_feature: MA Experiment 20001905 PARAMETER Experiment Name: At_Drought_Reproduction_P Parameter: Age (day) Value: 40
  misc_feature: MA Experiment 20001905 PARAMETER Experiment Name: At_Drought_Reproduction_P Parameter: Organism Value: A. thaliana
  misc_feature: MA Experiment 20001905 PARAMETER Experiment Name: At_Drought_Reproduction_P Parameter: Plant Line Value: WS
  misc_feature: MA Experiment 20001905 PARAMETER Experiment Name: At_Drought_Reproduction_P Parameter: Timepoint (day) Value: 10
  misc_feature: MA Experiment 20001905 PARAMETER Experiment Name: At_Drought_Reproduction_P Parameter: Tissue Value: Rosettes
  misc_feature: MA Experiment 20001905 PARAMETER Experiment Name: At_Drought_Reproduction_P Parameter: Treatment Value: Drought vs. No Drought
  misc_feature: MA Experiment ID: 20001911 Result: Down-regulated in Transcription
  misc_feature: MA Experiment 20001911 PARAMETER Experiment Name: At_Drought_Reproduction_P Parameter: Age (day) Value: 40
  misc_feature: MA Experiment 20001911 PARAMETER Experiment Name: At_Drought_Reproduction_P Parameter: Organism Value: A. thaliana
  misc_feature: MA Experiment 20001911 PARAMETER Experiment Name: At_Drought_Reproduction_P Parameter: Plant Line Value: WS
  misc_feature: MA Experiment 20001911 PARAMETER Experiment Name: At_Drought_Reproduction_P Parameter: Timepoint (day) Value: 10
  misc_feature: MA Experiment 20001911 PARAMETER Experiment Name: At_Drought_Reproduction_P Parameter: Tissue Value: Flowers
  misc_feature: MA Experiment 20001911 PARAMETER Experiment Name: At_Drought_Reproduction_P Parameter: Treatment Value: Drought vs. No Drought
atcttcttcttcttcatcaaatctcacaaatcttcaacacttaatcacaaatctcaaagcttcggataccaaatggctcgtaccaagcaaaccgcaaggaaatccaccggaggaaaagccccaaggaaacaactcgcaacaaaggcggcgaggaaatcagctccggcgaccggaggagtaaagaagccacacagattccgtcctggaactgttgccctaagagaaatcaggaagtatcagaagagcactgagcttctgatccgcaagcttccgttccagcgtttggttcgtgagatcgctcaggatttcaaaacagatctgcgtttccagagcagcgccgtcgcagcacttcaggaagcggctgaagcatacctcgttggattgtttgaagacaccaatctttgcgcgattcatgctaagagagtcactatcatgcctaaggatattcaattggcgaggagaattagaggcgagagggcttaagaaggagattgaagtactctagactgtgatcgttatgcttatgtatatctttcgttttccctaatttcgtgttttagggttggattaggttttgcgtttatgttgttcgatatctaacggatcaaaatctctccttcctta

SEQ ID NO: 78132 - protein, 160 aa, Arabidopsis thaliana
  peptide (1)..(160): Ceres Seq. ID no. 12606715
  misc_feature (41)..(159): Pfam Name: Core histone H2A/H2B/H3/H4 Pfam Description: Core histone H2A/H2B/H3/H4
  misc_feature (25)..(160): Homolog of NCBI NO: 15232146 NR Description: histone H3, putative; protein id: At3g27360.1, by cDNA: gi_14335141, supported by cDNA: gi_18655352 [Arabidopsis >gi|15238433|ref|NP_201339.1| histone H3 (sp|P05203); id:
  misc_feature (25)..(160): Homolog of NCBI NO: 122087 NR Description: Histone H3 >gi|81849|pir||S04520 histone H3
  misc_feature (25)..(160): Homolog of NCBI NO: 1362108 NR Description: histone H3 homolog - common tobacco
  misc_feature (25)..(160): Homolog of NCBI NO: 166384 NR Description: histone H3 (H3-1.1)
  misc_feature (26)..(160): Homolog of NCBI NO: 70753 NR Description: histone H3 - garden pea (tentative sequence)
  misc_feature (26)..(160): Homolog of NCBI NO: 122083 NR Description: Histone H3 >gi|70751|pir||HSEAH3 histone H3 -
  misc_feature (21)..(160): Homolog of NCBI NO: 37546835 NR Description: similar to histone protein Hist2h3c1 [Homo
  misc_feature (18)..(160): Homolog of NCBI NO: 34876396 NR Description: similar to H3 histone family, member I [Rattus
  misc_feature (23)..(160): Homolog of NCBI NO: 30061401 NR Description: histone 2, H3ca1 [Mus musculus]
  misc_feature (24)..(160): Homolog of NCBI NO: 34876364 NR Description: similar to CG31613-PA [Rattus norvegicus]
IFFFFIKSHKSSTLNHKSQSFGYQMARTKQTARKSTGGKAPRKQLATKAARKSAPATGGVKKPHRFRPGTVALREIRKYQKSTELLIRKLPFQRLVREIAQDFKTDLRFQSSAVAALQEAAEAYLVGLFEDTNLCAIHAKRVTIMPKDIQLARRIRGERA

SEQ ID NO: 78133 - protein, 136 aa, Arabidopsis thaliana; identical to SEQ ID NO: 8709
  peptide (1)..(136): Ceres Seq. ID no. 12606716
  misc_feature (17)..(135): Pfam Name: Core histone H2A/H2B/H3/H4 Pfam Description: Core histone H2A/H2B/H3/H4
  misc_feature (1)..(136): Homolog of NCBI NO: 15232146 NR Description: histone H3, putative; protein id: At3g27360.1, by cDNA: gi_14335141, supported by cDNA: gi_18655352 [Arabidopsis >gi|15238433|ref|NP_201339.1| histone H3 (sp|P05203); id:
  misc_feature (1)..(136): Homolog of NCBI NO: 122087 NR Description: Histone H3 >gi|81849|pir||S04520 histone H3
  misc_feature (1)..(136): Homolog of NCBI NO: 1362108 NR Description: histone H3 homolog - common tobacco
  misc_feature (1)..(136): Homolog of NCBI NO: 166384 NR Description: histone H3 (H3-1.1)
  misc_feature (2)..(136): Homolog of NCBI NO: 70753 NR Description: histone H3 - garden pea (tentative sequence)
  misc_feature (2)..(136): Homolog of NCBI NO: 122083 NR Description: Histone H3 >gi|70751|pir||HSEAH3 histone H3 -
  misc_feature (1)..(136): Homolog of NCBI NO: 37546835 NR Description: similar to histone protein Hist2h3c1 [Homo
  misc_feature (1)..(136): Homolog of NCBI NO: 34876396 NR Description: similar to H3 histone family, member I [Rattus
  misc_feature (1)..(136): Homolog of NCBI NO: 30061401 NR Description: histone 2, H3ca1 [Mus musculus]
  misc_feature (1)..(136): Homolog of NCBI NO: 34876364 NR Description: similar to CG31613-PA [Rattus norvegicus]

SEQ ID NO: 78134 - DNA, 1728 bp, Arabidopsis thaliana
  misc_feature (1)..(1728): Ceres Seq. ID no. 12639333
  misc_feature: MA Experiment ID: 20000171 Result: Up-regulated in Transcription
  misc_feature: MA Experiment 20000171 PARAMETER Experiment Name: At_42deg_Heat_P Parameter: Age (day) Value: 14
  misc_feature: MA Experiment 20000171 PARAMETER Experiment Name: At_42deg_Heat_P Parameter: Organism Value: A. thaliana
  misc_feature: MA Experiment 20000171 PARAMETER Experiment Name: At_42deg_Heat_P Parameter: Plant Line Value: WS
  misc_feature: MA Experiment 20000171 PARAMETER Experiment Name: At_42deg_Heat_P Parameter: Temperature (deg C) Value: 42 vs. 22
  misc_feature: MA Experiment 20000171 PARAMETER Experiment Name: At_42deg_Heat_P Parameter: Timepoint (hr) Value: 1
  misc_feature: MA Experiment 20000171 PARAMETER Experiment Name: At_42deg_Heat_P Parameter: Tissue Value: Aerial
  misc_feature: MA Experiment ID: 20000211 Result: Up-regulated in Transcription
  misc_feature: MA Experiment 20000211 PARAMETER Experiment Name: At_0.001percent_MeJA__P Parameter: Age (day) Value: 14
  misc_feature: MA Experiment 20000211 PARAMETER Experiment Name: At_0.001percent_MeJA__P Parameter: Organism Value: A. thaliana
  misc_feature: MA Experiment 20000211 PARAMETER Experiment Name: At_0.001percent_MeJA__P Parameter: Plant Line Value: WS
  misc_feature: MA Experiment 20000211 PARAMETER Experiment Name: At_0.001percent_MeJA__P Parameter: Timepoint (hr) Value: 1
  misc_feature: MA Experiment 20000211 PARAMETER Experiment Name: At_0.001percent_MeJA__P Parameter: Tissue Value: Aerial
  misc_feature: MA Experiment 20000211 PARAMETER Experiment Name: At_0.001percent_MeJA__P Parameter: Treatment Value: 0.001percent MeJA vs. No Treatment
  misc_feature: MA Experiment ID: 20000495 Result: Up-regulated in Transcription
  misc_feature: MA Experiment 20000495 PARAMETER Experiment Name: At_Guard_Cells_P Parameter: Harvest Date Value: 8/2/2002
  misc_feature: MA Experiment 20000495 PARAMETER Experiment Name: At_Guard_Cells_P Parameter: Organism Value: A. thaliana
  misc_feature: MA Experiment 20000495 PARAMETER Experiment Name: At_Guard_Cells_P Parameter: Tissue Value: Guard Cells vs. Leaves
  misc_feature: MA Experiment ID: 20001248 Result: Down-regulated in Transcription
  misc_feature: MA Experiment 20001248 PARAMETER Experiment Name: At_Far-red-induction_P Parameter: Age (day) Value: 7
  misc_feature: MA Experiment 20001248 PARAMETER Experiment Name: At_Far-red-induction_P Parameter: Light Value: Far-red vs. White
  misc_feature: MA Experiment 20001248 PARAMETER Experiment Name: At_Far-red-induction_P Parameter: Organism Value: A. thaliana
  misc_feature: MA Experiment 20001248 PARAMETER Experiment Name: At_Far-red-induction_P Parameter: Plant Line Value: Columbia
  misc_feature: MA Experiment 20001248 PARAMETER Experiment Name: At_Far-red-induction_P Parameter: Timepoint (hr) Value: 4
  misc_feature: MA Experiment 20001248 PARAMETER Experiment Name: At_Far-red-induction_P Parameter: Tissue Value: Whole Plant
  misc_feature: MA Experiment ID: 20001554 Result: Up-regulated in Transcription
  misc_feature: MA Experiment 20001554 PARAMETER Experiment Name: At_Drought_Soil_Dry_P Parameter: Age (day) Value: 21
  misc_feature: MA Experiment 20001554 PARAMETER Experiment Name: At_Drought_Soil_Dry_P Parameter: Organism Value: A. thaliana
  misc_feature: MA Experiment 20001554 PARAMETER Experiment Name: At_Drought_Soil_Dry_P Parameter: Plant Line Value: WS
  misc_feature: MA Experiment 20001554 PARAMETER Experiment Name: At_Drought_Soil_Dry_P Parameter: Post Timepoint (hr) Value: None
  misc_feature: MA Experiment 20001554 PARAMETER Experiment Name: At_Drought_Soil_Dry_P Parameter: Post-Treatment Value: None
  misc_feature: MA Experiment 20001554 PARAMETER Experiment Name: At_Drought_Soil_Dry_P Parameter: Timepoint (day) Value: 7
  misc_feature: MA Experiment 20001554 PARAMETER Experiment Name: At_Drought_Soil_Dry_P Parameter: Treatment Value: Drought vs. No Drought
atggagcataagaatattggtgcagaagtacttcaagatacgtacgatgatcaacagaaatgggttcttgattcttctcttgatagcagaggacgtgttcctcttcgggctcgaactggcgcttggagagctgcactcttcatcatcgcgatcgagttcagcgagagattgagttacttcgggttagctacaaacttggtcgtctacctaacaacaattctaaaccaagatctcaagatggctataagaaatgtgaactactggtcaggtgtcactactttgatgcctcttcttggaggctttatagccgatgcatatctaggccgttatgctactgtcttggttgcaaccaccatttatcttatgggtttggtccttttaacaatgtcctggttcataccaggcttaaaaccttgtcaccaagaagtgtgcgttgaacctagaaaagcacacgaagtagccttcttcattgccatttacttgatctccatagggactggaggtcataagccttcccttgaaagctttggtgctgaccaattcgacgatgaccatgttgaagaaagaaagatgaaaatgtctttctttaactggtggaacgttagtctatgtgctggtattctaacggccgtgactgctgttgcctatatcgaagaccgggttggttggggcgttgctggcatcatactaactgtagtcatggctatatcactcatcatcttcttcattggaaaaccattctatcgttaccggacaccttctggtagccctttgacaccaatcttgcaagtctttgttgccgccattgccaaaagaaatctaccttatccttctgatccttctctgcttcatgaagtgtccaagacagagtttactagtggccggcttctctgtcacacagagcatcttaaatttcttgacaaggcagcaattatcgaagacaaaaatcctctggccctcgagaaacagagtccatggagacttctaacgttgacaaaagtcgaggaaacgaagctgatcatcaacgtgattccaatatggttctccacgttggcctttggcatatgtgcaacacaagcttcgacgtttttcatcaaacaagcaataaccatggacagacacatcggtggcttcacagttcctccagcttccatgtttacacttaccgccctcacattgatcatctcactcactgtctatgagaaactcctcgttcccttgctaagaagcatcacacggaatcaaagaggcatcaacattctccaaagaatcgggaccggtatgattttctccctcatcaccatgatcattgcagctctagttgagaaacaacgattggaccgtaccaacaacaacaaacccatgagtgtgatatggctagctcctcagttcatggtcattggctttgcggacgctttcacactagttggactccaagagtacttttaccaccaagtccctgactccatgagaagcttaggtatagcgttttacctaagcgtgataggtgcggctagcttccttaacaatctcctgatcacagccgttgatactctcgcggagaatttctcggggaagagttggttcggaaaggacctaaacagcagccgcttggaccggttctactggtttcttgctggtgttatcgctgccaatatatgtgtctttgtgattgtggcaaagagatgtccttacaaaagtgtgcagccaagccaagggctctcctga

SEQ ID NO: 78135 - protein, 575 aa, Arabidopsis thaliana
  peptide (1)..(575): Ceres Seq. ID no. 12639334
  misc_feature (110)..(502): Pfam Name: POT family Pfam Description: POT family
  misc_feature (1)..(575): Homolog of NCBI NO: 15224397 NR Description: putative peptide/amino acid transporter; protein At2g37900.1 [Arabidopsis thaliana] >gi|25408574|pir||E84798
  misc_feature (1)..(571): Homolog of NCBI NO: 15232380 NR Description: transporter-like protein; protein id: At3g53960.1
  misc_feature (19)..(568): Homolog of NCBI NO: 34897398 NR Description: putative peptide transport protein [Oryza sativa
  misc_feature (16)..(566): Homolog of NCBI NO: 15232435 NR Description: peptide transport - like protein; protein id: supported by cDNA: 117581., supported by cDNA: gi_13430485,
  misc_feature (18)..(568): Homolog of NCBI NO: 15218352 NR Description: oligopeptide transporter, putative; protein id: [Arabidopsis thaliana] >gi|25406146|pir||E96744 probable
  misc_feature (16)..(566): Homolog of NCBI NO: 15240905 NR Description: oligopeptide transporter - like protein; protein At5g01180.1 [Arabidopsis thaliana] >gi|11358593|pir||T45958
  misc_feature (4)..(571): Homolog of NCBI NO: 4102839 NR Description: LeOPT1 [Lycopersicon esculentum]
  misc_feature (16)..(566): Homolog of NCBI NO: 37535262 NR Description: putative peptide transport protein [Oryza sativa
  misc_feature (28)..(569): Homolog of NCBI NO: 11358594 NR Description: oligopeptide transporter-like protein -
  misc_feature (18)..(568): Homolog of NCBI NO: 18086410 NR Description: At1g72120/F28P5_2 [Arabidopsis thaliana]
MEHKNIGAEVLQDTYDDQQKWVLDSSLDSRGRVPLRARTGAWRAALFIIAIEFSERLSYFGLATNLVVYLTTILNQDLKMAIRNVNYWSGVTTLMPLLGGFIADAYLGRYATVLVATTIYLMGLVLLTMSWFIPGLKPCHQEVCVEPRKAHEVAFFIAIYLISIGTGGHKPSLESFGADQFDDDHVEERKMKMSFFNWWNVSLCAGILTAVTAVAYIEDRVGWGVAGIILTVVMAISLIIFFIGKPFYRYRTPSGSPLTPILQVFVAAIAKRNLPYPSDPSLLHEVSKTEFTSGRLLCHTEHLKFLDKAAIIEDKNPLALEKQSPWRLLTLTKVEETKLIINVIPIWFSTLAFGICATQASTFFIKQAITMDRHIGGFTVPPASMFTLTALTLIISLTVYEKLLVPLLRSITRNQRGINILQRIGTGMIFSLITMIIAALVEKQRLDRTNNNKPMSVIWLAPQFMVIGFADAFTLVGLQEYFYHQVPDSMRSLGIAFYLSVIGAASFLNNLLITAVDTLAENFSGKSWFGKDLNSSRLDRFYWFLAGVIAANICVFVIVAKRCPYKSVQPSQGLS

SEQ ID NO: 78136 - protein, 496 aa, Arabidopsis thaliana
  peptide (1)..(496): Ceres Seq. ID no. 12639335
  misc_feature (31)..(423): Pfam Name: POT family Pfam Description: POT family
  misc_feature (1)..(496): Homolog of NCBI NO: 15224397 NR Description: putative peptide/amino acid transporter; protein At2g37900.1 [Arabidopsis thaliana] >gi|25408574|pir||E84798
  misc_feature (1)..(492): Homolog of NCBI NO: 15232380 NR Description: transporter-like protein; protein id: At3g53960.1
  misc_feature (1)..(489): Homolog of NCBI NO: 34897398 NR Description: putative peptide transport protein [Oryza sativa
  misc_feature (1)..(487): Homolog of NCBI NO: 15232435 NR Description: peptide transport - like protein; protein id: supported by cDNA: 117581., supported by cDNA: gi_13430485,
  misc_feature (1)..(489): Homolog of NCBI NO: 15218352 NR Description: oligopeptide transporter, putative; protein id: [Arabidopsis thaliana] >gi|25406146|pir||E96744 probable
  misc_feature (1)..(487): Homolog of NCBI NO: 15240905 NR Description: oligopeptide transporter - like protein; protein At5g01180.1 [Arabidopsis thaliana] >gi|11358593|pir||T45958
  misc_feature (1)..(492): Homolog of NCBI NO: 4102839 NR Description: LeOPT1 [Lycopersicon esculentum]
  misc_feature (1)..(487): Homolog of NCBI NO: 37535262 NR Description: putative peptide transport protein [Oryza sativa
  misc_feature (1)..(490): Homolog of NCBI NO: 11358594 NR Description: oligopeptide transporter-like protein -
  misc_feature (1)..(489): Homolog of NCBI NO: 18086410 NR Description: At1g72120/F28P5_2 [Arabidopsis thaliana]
MAIRNVNYWSGVTTLMPLLGGFIADAYLGRYATVLVATTIYLMGLVLLTMSWFIPGLKPCHQEVCVEPRKAHEVAFFIAIYLISIGTGGHKPSLESFGADQFDDDHVEERKMKMSFFNWWNVSLCAGILTAVTAVAYIEDRVGWGVAGIILTVVMAISLIIFFIGKPFYRYRTPSGSPLTPILQVFVAAIAKRNLPYPSDPSLLHEVSKTEFTSGRLLCHTEHLKFLDKAAIIEDKNPLALEKQSPWRLLTLTKVEETKLIINVIPIWFSTLAFGICATQASTFFIKQAITMDRHIGGFTVPPASMFTLTALTLIISLTVYEKLLVPLLRSITRNQRGINILQRIGTGMIFSLITMIIAALVEKQRLDRTNNNKPMSVIWLAPQFMVIGFADAFTLVGLQEYFYHQVPDSMRSLGIAFYLSVIGAASFLNNLLITAVDTLAENFSGKSWFGKDLNSSRLDRFYWFLAGVIAANICVFVIVAKRCPYKSVQPSQGLS

SEQ ID NO: 78137 - protein, 481 aa, Arabidopsis thaliana
  peptide (1)..(481): Ceres Seq. ID no. 12639336
  misc_feature (16)..(408): Pfam Name: POT family Pfam Description: POT family
  misc_feature (1)..(481): Homolog of NCBI NO: 15224397 NR Description: putative peptide/amino acid transporter; protein At2g37900.1 [Arabidopsis thaliana] >gi|25408574|pir||E84798
  misc_feature (1)..(477): Homolog of NCBI NO: 15232380 NR Description: transporter-like protein; protein id: At3g53960.1
  misc_feature (1)..(474): Homolog of NCBI NO: 34897398 NR Description: putative peptide transport protein [Oryza sativa
  misc_feature (1)..(472): Homolog of NCBI NO: 15232435 NR Description: peptide transport - like protein; protein id: supported by cDNA: 117581., supported by cDNA: gi_13430485,
  misc_feature (1)..(474): Homolog of NCBI NO: 15218352 NR Description: oligopeptide transporter, putative; protein id: [Arabidopsis thaliana] >gi|25406146|pir||E96744 probable
  misc_feature (1)..(472): Homolog of NCBI NO: 15240905 NR Description: oligopeptide transporter - like protein; protein At5g01180.1 [Arabidopsis thaliana] >gi|11358593|pir||T45958
  misc_feature (1)..(477): Homolog of NCBI NO: 4102839 NR Description: LeOPT1 [Lycopersicon esculentum]
  misc_feature (1)..(472): Homolog of NCBI NO: 37535262 NR Description: putative peptide transport protein [Oryza sativa
  misc_feature (1)..(475): Homolog of NCBI NO: 11358594 NR Description: oligopeptide transporter-like protein -
  misc_feature (1)..(474): Homolog of NCBI NO: 18086410 NR Description: At1g72120/F28P5_2 [Arabidopsis thaliana]
MPLLGGFIADAYLGRYATVLVATTIYLMGLVLLTMSWFIPGLKPCHQEVCVEPRKAHEVAFFIAIYLISIGTGGHKPSLESFGADQFDDDHVEERKMKMSFFNWWNVSLCAGILTAVTAVAYIEDRVGWGVAGIILTVVMAISLIIFFIGKPFYRYRTPSGSPLTPILQVFVAAIAKRNLPYPSDPSLLHEVSKTEFTSGRLLCHTEHLKFLDKAAIIEDKNPLALEKQSPWRLLTLTKVEETKLIINVIPIWFSTLAFGICATQASTFFIKQAITMDRHIGGFTVPPASMFTLTALTLIISLTVYEKLLVPLLRSITRNQRGINILQRIGTGMIFSLITMIIAALVEKQRLDRTNNNKPMSVIWLAPQFMVIGFADAFTLVGLQEYFYHQVPDSMRSLGIAFYLSVIGAASFLNNLLITAVDTLAENFSGKSWFGKDLNSSRLDRFYWFLAGVIAANICVFVIVAKRCPYKSVQPSQGLS

SEQ ID NO: 78138 - DNA, 624 bp, Arabidopsis thaliana
  misc_feature (1)..(624): Ceres Seq. ID no. 12639348
  misc_feature: MA Experiment ID: 20000355 Result: Down-regulated in Transcription
  misc_feature: MA Experiment 20000355 PARAMETER Experiment Name: At_Siliques_Sub_P Parameter: Age (day) Value: 21
  misc_feature: MA Experiment 20000355 PARAMETER Experiment Name: At_Siliques_Sub_P Parameter: Organism Value: A. thaliana
  misc_feature: MA Experiment 20000355 PARAMETER Experiment Name: At_Siliques_Sub_P Parameter: Plant Line Value: WS
  misc_feature: MA Experiment 20000355 PARAMETER Experiment Name: At_Siliques_Sub_P Parameter: Tissue Value: Less Than 5mm Siliques vs. Whole Plant
  misc_feature: MA Experiment ID: 20001807 Result: Up-regulated in Transcription
  misc_feature: MA Experiment 20001807 PARAMETER Experiment Name: At_50mM_NH4NO3_L-to-H_Sub_P Parameter: Timepoint (hr) Value: 6
  misc_feature: MA Experiment 20001807 PARAMETER Experiment Name: At_50mM_NH4NO3_L-to-H_Sub_P Parameter: Tissue Value: Leaf
  misc_feature: MA Experiment 20001807 PARAMETER Experiment Name: At_50mM_NH4NO3_L-to-H_Sub_P Parameter: Treatment Value: 50mM NH4NO3 vs 100mM Mannitol
atgacgactgacatcgatttagaacaaggaggagcttttggatatcaccggaggtcgttggacggaagtgacgtcagcgtatattattcagacggtgaagatgtgatgtcatgctactcttacttctattcgacgactggaggatcgtatgaatacgaaggagatcagtcgaggaaagtgtcgtcggtgatgagtccctcgtcgtcggagatagatgatgatgatgctacggcgccgccggagaaagattgtcggatatgtcatttgggagtggaaacgagcggtggaggtgcgattgaattagggtgttcttgtaaagacgatttggctgttgctcatagacaatgcgctgagacttggttcaagatcaaaggcgacaaaacctgcgagatttgccaatcggtagcccggaacgtcggcggtgcgaacgaaatggttgggtcaacgatggaagagagggagttgagaaacggtgaggaaacagcggcgggagaaggcggaggagcaacggtggtggagaacagatggcaaccacagagagtggtgaatttggtgttagcttgtatggtttttgggttctttatatcatggatctttcatttccatgtttcctcttcttcttga

SEQ ID NO: 78139 - protein, 207 aa, Arabidopsis thaliana
  peptide (1)..(207): Ceres Seq. ID no. 12639349
  misc_feature (84)..(132): Pfam Name: Zinc finger, C3HC4 type (RING finger) Pfam Description: Zinc finger, C3HC4 type (RING finger)
  misc_feature (1)..(207): Homolog of NCBI NO: 15224415 NR Description: unknown protein; protein id: At2g37950.1
  misc_feature (81)..(206): Homolog of NCBI NO: 15239254 NR Description: putative protein; protein id: At5g05830.1 thaliana] >gi|9759108|dbj|BAB09677.1|
  misc_feature (33)..(203): Homolog of NCBI NO: 34908318 NR Description: P0529H11.12 [Oryza sativa (japonica
  misc_feature (82)..(203): Homolog of NCBI NO: 9759231 NR Description: gb|AAD32776.1~gene_id:K19M22.19~similar to
  misc_feature (70)..(203): Homolog of NCBI NO: 15237796 NR Description: putative protein; protein id: At5g59000.1,
  misc_feature (70)..(203): Homolog of NCBI NO: 21537129 NR Description: unknown [Arabidopsis thaliana]
  misc_feature (5)..(127): Homolog of NCBI NO: 15240886 NR Description: putative protein; protein id: At5g01070.1
  misc_feature (61)..(139): Homolog of NCBI NO: 29725746 NR Description: hypothetical protein [Arabidopsis thaliana]
  misc_feature (53)..(139): Homolog of NCBI NO: 13605863 NR Description: AT5g60580/muf9_230 [Arabidopsis thaliana]
  misc_feature (53)..(139): Homolog of NCBI NO: 18424371 NR Description: putative protein; protein id: At5g60580.1, by cDNA: gi_13605862 [Arabidopsis thaliana] emb|CAB86085.1~gene_id:MUF9.21~similar to unknown protein
MTTDIDLEQGGAFGYHRRSLDGSDVSVYYSDGEDVMSCYSYFYSTTGGSYEYEGDQSRKVSSVMSPSSSEIDDDDATAPPEKDCRICHLGVETSGGGAIELGCSCKDDLAVAHRQCAETWFKIKGDKTCEICQSVARNVGGANEMVGSTMEERELRNGEETAAGEGGGATVVENRWQPQRVVNLVLACMVFGFFISWIFHFHVSSSS

SEQ ID NO: 78140 - protein, 172 aa, Arabidopsis thaliana
  peptide (1)..(172): Ceres Seq. ID no. 12639350
  misc_feature (49)..(97): Pfam Name: Zinc finger, C3HC4 type (RING finger) Pfam Description: Zinc finger, C3HC4 type (RING finger)
  misc_feature (1)..(172): Homolog of NCBI NO: 15224415 NR Description: unknown protein; protein id: At2g37950.1
  misc_feature (46)..(171): Homolog of NCBI NO: 15239254 NR Description: putative protein; protein id: At5g05830.1 thaliana] >gi|9759108|dbj|BAB09677.1|
  misc_feature (1)..(168): Homolog of NCBI NO: 34908318 NR Description: P0529H11.12 [Oryza sativa (japonica
  misc_feature (47)..(168): Homolog of NCBI NO: 9759231 NR Description: gb|AAD32776.1~gene_id:K19M22.19~similar to
  misc_feature (35)..(168): Homolog of NCBI NO: 15237796 NR Description: putative protein; protein id: At5g59000.1,
  misc_feature (35)..(168): Homolog of NCBI NO: 21537129 NR Description: unknown [Arabidopsis thaliana]
  misc_feature (1)..(92): Homolog of NCBI NO: 15240886 NR Description: putative protein; protein id: At5g01070.1
  misc_feature (26)..(104): Homolog of NCBI NO: 29725746 NR Description: hypothetical protein [Arabidopsis thaliana]
  misc_feature (18)..(104): Homolog of NCBI NO: 13605863 NR Description: AT5g60580/muf9_230 [Arabidopsis thaliana]
  misc_feature (18)..(104): Homolog of NCBI NO: 18424371 NR Description: putative protein; protein id: At5g60580.1, by cDNA: gi_13605862 [Arabidopsis thaliana] emb|CAB86085.1~gene_id:MUF9.21~similar to unknown protein
MSCYSYFYSTTGGSYEYEGDQSRKVSSVMSPSSSEIDDDDATAPPEKDCRICHLGVETSGGGAIELGCSCKDDLAVAHRQCAETWFKIKGDKTCEICQSVARNVGGANEMVGSTMEERELRNGEETAAGEGGGATVVENRWQPQRVVNLVLACMVFGFFISWIFHFHVSSSS

SEQ ID NO: 78141 - protein, 144 aa, Arabidopsis thaliana
  peptide (1)..(144): Ceres Seq. ID no. 12639351
  misc_feature (21)..(69): Pfam Name: Zinc finger, C3HC4 type (RING finger) Pfam Description: Zinc finger, C3HC4 type (RING finger)
  misc_feature (1)..(144): Homolog of NCBI NO: 15224415 NR Description: unknown protein; protein id: At2g37950.1
  misc_feature (18)..(143): Homolog of NCBI NO: 15239254 NR Description: putative protein; protein id: At5g05830.1 thaliana] >gi|9759108|dbj|BAB09677.1|
  misc_feature (1)..(140): Homolog of NCBI NO: 34908318 NR Description: P0529H11.12 [Oryza sativa (japonica
  misc_feature (19)..(140): Homolog of NCBI NO: 9759231 NR Description: gb|AAD32776.1~gene_id:K19M22.19~similar to
  misc_feature (7)..(140): Homolog of NCBI NO: 15237796 NR Description: putative protein; protein id: At5g59000.1,
  misc_feature (7)..(140): Homolog of NCBI NO: 21537129 NR Description: unknown [Arabidopsis thaliana]
  misc_feature (1)..(64): Homolog of NCBI NO: 15240886 NR Description: putative protein; protein id: At5g01070.1
  misc_feature (1)..(76): Homolog of NCBI NO: 29725746 NR Description: hypothetical protein [Arabidopsis thaliana]
  misc_feature (1)..(76): Homolog of NCBI NO: 13605863 NR Description: AT5g60580/muf9_230 [Arabidopsis thaliana]
  misc_feature (1)..(76): Homolog of NCBI NO: 18424371 NR Description: putative protein; protein id: At5g60580.1, by cDNA: gi_13605862 [Arabidopsis thaliana] emb|CAB86085.1~gene_id:MUF9.21~similar to unknown protein
MSPSSSEIDDDDATAPPEKDCRICHLGVETSGGGAIELGCSCKDDLAVAHRQCAETWFKIKGDKTCEICQSVARNVGGANEMVGSTMEERELRNGEETAAGEGGGATVVENRWQPQRVVNLVLACMVFGFFISWIFHFHVSSSS

SEQ ID NO: 78142 - DNA, 1524 bp, Arabidopsis thaliana
  misc_feature (1)..(1524): Ceres Seq. ID no. 12639352
  misc_feature: MA Experiment ID: 20000315 Result: Down-regulated in Transcription
  misc_feature: MA Experiment 20000315 PARAMETER Experiment Name: At_14day_Shoots-Roots_Sub_P Parameter: Age (day) Value: 14
  misc_feature: MA Experiment 20000315 PARAMETER Experiment Name: At_14day_Shoots-Roots_Sub_P Parameter: Organism Value: A. thaliana
  misc_feature: MA Experiment 20000315 PARAMETER Experiment Name: At_14day_Shoots-Roots_Sub_P Parameter: Plant Line Value: WS
  misc_feature: MA Experiment 20000315 PARAMETER Experiment Name: At_14day_Shoots-Roots_Sub_P Parameter: Tissue Value: Shoots vs. Whole Plant
  misc_feature: MA Experiment ID: 20000347 Result: Up-regulated in Transcription
  misc_feature: MA Experiment 20000347 PARAMETER Experiment Name: At_2mM_SA_Sub_P Parameter: Age (day) Value: 14
  misc_feature: MA Experiment 20000347 PARAMETER Experiment Name: At_2mM_SA_Sub_P Parameter: Organism Value: A. thaliana
  misc_feature: MA Experiment 20000347 PARAMETER Experiment Name: At_2mM_SA_Sub_P Parameter: Plant Line Value: WS
  misc_feature: MA Experiment 20000347 PARAMETER Experiment Name: At_2mM_SA_Sub_P Parameter: Timepoint (hr) Value: 6
  misc_feature: MA Experiment 20000347 PARAMETER Experiment Name: At_2mM_SA_Sub_P Parameter: Tissue Value: Aerial
  misc_feature: MA Experiment 20000347 PARAMETER Experiment Name: At_2mM_SA_Sub_P Parameter: Treatment Value: 2mM SA vs. No Treatment
  misc_feature: MA Experiment ID: 20000355 Result: Down-regulated in Transcription
  misc_feature: MA Experiment 20000355 PARAMETER Experiment Name: At_Siliques_Sub_P Parameter: Age (day) Value: 21
  misc_feature: MA Experiment 20000355 PARAMETER Experiment Name: At_Siliques_Sub_P Parameter: Organism Value: A. thaliana
  misc_feature: MA Experiment 20000355 PARAMETER Experiment Name: At_Siliques_Sub_P Parameter: Plant Line Value: WS
  misc_feature: MA Experiment 20000355 PARAMETER Experiment Name: At_Siliques_Sub_P Parameter: Tissue Value: Less Than 5mm Siliques vs. Whole Plant
  misc_feature: MA Experiment ID: 20000440 Result: Down-regulated in Transcription
  misc_feature: MA Experiment 20000440 PARAMETER Experiment Name: At_Closed-Flower__Sub_P Parameter: Tissue Value: Closed Flower vs. Whole Plant
atggagagttgtcagaatttggtaagtgtaaaacacgtggagactataaaaattgtcatgtcatgcaagttaagaagaaaagtcagttttccaaaaataatacttttgttcctctgccgacctaacgtggagacttgtcaacattttgctagggcgaaatttcactcctccttcttaaatttccacaaaattctagggaataaaaaaaaaaagattgttgtagacataaagagtttaatctcagaagataatggtttgaagcttcttagagaatcagctggttcagagttatgttgcatcgtgagaatcccacagagcctcgctcgaatcaacctcaaagcttatgaaccgaagattgtctccattggtccttaccatcacggcaaagagcatctcaaaatgactcagcagcataaacgccgattcttgaagtttttcgtggctaaaatggaagaaaaaggatttgttcctcaagaattggtcaaagctgtatcgagtttggaaggagttatacgaggttcttactccgaggatctaggtttagattctgaaaacttggttcagatgatggttcttgatggttgctttatcctcacgttgttctttgttgtttccgggaaagttgaatacactaatcttgatgatccgatttttcgaatgccgtggattttgccgtcgattcgagcagatcttctccttttggaaaaccaggttccttatgttcttcttcaaactctatttgaaacatcgaagttagttacttgtagtggtttaaacgaaatcgcctttgaattctttaactactcattacaaaaaccagagaccttttgggaaaaacattatggtcttgaagcaaaacatcttcttgatttgatacgtaagacttttgttcctgttccgtctcaaagaagaatcaaagatcatagcagtaaatcgtcattcaatgatcatgaatatctcggatttgttctctctgccaagaagcttcatcttcggggaatcaaattcaaaccgaggaaaaacacagactcaatcttagacattagttatagtaatggtgtgcttcacattcctccggtagtcatggatgattttaccgcctcgatctttttaaactgtgtcgcatttgagcaattatatgctgattcatcgaaccacataacgagctacgtagctttcatggcttgtcttataaacgaagagagtgatgcatcgttccttagcgaaaggaggatcctagagaactattttggaacagaggatgaagtgtcccggttctataaacgcattggtaaagacattgccctcgacttagagaagagttacctagcaaaggtgtttgaaggagttaacgagtatacttctcaaggattccatgttcattgtgcagagtttattcatacgcatttcgatagtccatggacatttgcatcatcatttgcagcgttgttgcttcttctgtttgcggctttgcaagtcttctttgcagcttatagttatttccgtcctccaaaagaaaagtga

SEQ ID NO: 78143 - protein, 507 aa, Arabidopsis thaliana
  peptide (1)..(507): Ceres Seq. ID no. 12639353
  misc_feature (93)..(490): Pfam Name: Plant protein of unknown function Pfam Description: Plant protein of unknown function
  misc_feature (71)..(507): Homolog of NCBI NO: 15242911 NR Description: putative protein; protein id: At5g22540.1 thaliana] >gi|9758660|dbj|BAB09126.1|
  misc_feature (89)..(300): Homolog of NCBI NO: 9758661 NR Description: emb|CAB72473.1~gene_id:MQJ16.9~strong similarity
  misc_feature (319)..(505): Homolog of NCBI NO: 9758661 NR Description: emb|CAB72473.1~gene_id:MQJ16.9~strong similarity
  misc_feature (72)..(308): Homolog of NCBI NO: 15230487 NR Description: putative protein; protein id: At3g44710.1
  misc_feature (299)..(505): Homolog of NCBI NO: 15230487 NR Description: putative protein; protein id: At3g44710.1
  misc_feature (73)..(298): Homolog of NCBI NO: 15242915 NR Description: putative protein; protein id: At5g22560.1 thaliana] >gi|9758662|dbj|BAB09128.1|
  misc_feature (297)..(505): Homolog of NCBI NO: 15242915 NR Description: putative protein; protein id: At5g22560.1 thaliana] >gi|9758662|dbj|BAB09128.1|
  misc_feature (319)..(505): Homolog of NCBI NO: 18420531 NR Description: putative protein; protein id: At5g22550.1,
  misc_feature (203)..(300): Homolog of NCBI NO: 18420531 NR Description: putative protein; protein id: At5g22550.1,
  misc_feature (89)..(160): Homolog of NCBI NO: 18420531 NR Description: putative protein; protein id: At5g22550.1,
MESCQNLVSVKHVETIKIVMSCKLRRKVSFPKIILLFLCRPNVETCQHFARAKFHSSFLNFHKILGNKKKKIVVDIKSLISEDNGLKLLRESAGSELCCIVRIPQSLARINLKAYEPKIVSIGPYHHGKEHLKMTQQHKRRFLKFFVAKMEEKGFVPQELVKAVSSLEGVIRGSYSEDLGLDSENLVQMMVLDGCFILTLFFVVSGKVEYTNLDDPIFRMPWILPSIRADLLLLENQVPYVLLQTLFETSKLVTCSGLNEIAFEFFNYSLQKPETFWEKHYGLEAKHLLDLIRKTFVPVPSQRRIKDHSSKSSFNDHEYLGFVLSAKKLHLRGIKFKPRKNTDSILDISYSNGVLHIPPVVMDDFTASIFLNCVAFEQLYADSSNHITSYVAFMACLINEESDASFLSERRILENYFGTEDEVSRFYKRIGKDIALDLEKSYLAKVFEGVNEYTSQGFHVHCAEFIHTHFDSPWTFASSFAALLLLLFAALQVFFAAYSYFRPPKEK

SEQ ID NO: 78144 - protein, 488 aa, Arabidopsis thaliana
  peptide (1)..(488): Ceres Seq. ID no. 12639354
  misc_feature (74)..(471): Pfam Name: Plant protein of unknown function Pfam Description: Plant protein of unknown function
  misc_feature (52)..(488): Homolog of NCBI NO: 15242911 NR Description: putative protein; protein id: At5g22540.1 thaliana] >gi|9758660|dbj|BAB09126.1|
  misc_feature (70)..(281): Homolog of NCBI NO: 9758661 NR Description: emb|CAB72473.1~gene_id:MQJ16.9~strong similarity
  misc_feature (300)..(486): Homolog of NCBI NO: 9758661 NR Description: emb|CAB72473.1~gene_id:MQJ16.9~strong similarity
  misc_feature (53)..(289): Homolog of NCBI NO: 15230487 NR Description: putative protein; protein id: At3g44710.1
  misc_feature (280)..(486): Homolog of NCBI NO: 15230487 NR Description: putative protein; protein id: At3g44710.1
  misc_feature (54)..(279): Homolog of NCBI NO: 15242915 NR Description: putative protein; protein id: At5g22560.1 thaliana] >gi|9758662|dbj|BAB09128.1|
  misc_feature (278)..(486): Homolog of NCBI NO: 15242915 NR Description: putative protein; protein id: At5g22560.1 thaliana] >gi|9758662|dbj|BAB09128.1|
  misc_feature (300)..(486): Homolog of NCBI NO: 18420531 NR Description: putative protein; protein id: At5g22550.1,
  misc_feature (184)..(281): Homolog of NCBI NO: 18420531 NR Description: putative protein; protein id: At5g22550.1,
  misc_feature (70)..(141): Homolog of NCBI NO: 18420531 NR Description: putative protein; protein id: At5g22550.1,
MSCKLRRKVSFPKIILLFLCRPNVETCQHFARAKFHSSFLNFHKILGNKKKKIVVDIKSLISEDNGLKLLRESAGSELCCIVRIPQSLARINLKAYEPKIVSIGPYHHGKEHLKMTQQHKRRFLKFFVAKMEEKGFVPQELVKAVSSLEGVIRGSYSEDLGLDSENLVQMMVLDGCFILTLFFVVSGKVEYTNLDDPIFRMPWILPSIRADLLLLENQVPYVLLQTLFETSKLVTCSGLNEIAFEFFNYSLQKPETFWEKHYGLEAKHLLDLIRKTFVPVPSQRRIKDHSSKSSFNDHEYLGFVLSAKKLHLRGIKFKPRKNTDSILDISYSNGVLHIPPVVMDDFTASIFLNCVAFEQLYADSSNHITSYVAFMACLINEESDASFLSERRILENYFGTEDEVSRFYKRIGKDIALDLEKSYLAKVFEGVNEYTSQGFHVHCAEFIHTHFDSPWTFASSFAALLLLLFAALQVFFAAYSYFRPPKEK

SEQ ID NO: 78145 - protein, 374 aa, Arabidopsis thaliana; identical to SEQ ID NO: 70030
  peptide (1)..(374): Ceres Seq. ID no. 12639355
  misc_feature (1)..(357): Pfam Name: Plant protein of unknown function Pfam Description: Plant protein of unknown function
  misc_feature (1)..(374): Homolog of NCBI NO: 15242911 NR Description: putative protein; protein id: At5g22540.1 thaliana] >gi|9758660|dbj|BAB09126.1|
  misc_feature (1)..(167): Homolog of NCBI NO: 9758661 NR Description: emb|CAB72473.1~gene_id:MQJ16.9~strong similarity
  misc_feature (186)..(372): Homolog of NCBI NO: 9758661 NR Description: emb|CAB72473.1~gene_id:MQJ16.9~strong similarity
  misc_feature (1)..(175): Homolog of NCBI NO: 15230487 NR Description: putative protein; protein id: At3g44710.1
  misc_feature (166)..(372): Homolog of NCBI NO: 15230487 NR Description: putative protein; protein id: At3g44710.1
  misc_feature (1)..(165): Homolog of NCBI NO: 15242915 NR Description: putative protein; protein id: At5g22560.1 thaliana] >gi|9758662|dbj|BAB09128.1|
  misc_feature (164)..(372): Homolog of NCBI NO: 15242915 NR Description: putative protein; protein id: At5g22560.1 thaliana] >gi|9758662|dbj|BAB09128.1|
  misc_feature (186)..(372): Homolog of NCBI NO: 18420531 NR Description: putative protein; protein id: At5g22550.1,
  misc_feature (70)..(167): Homolog of NCBI NO: 18420531 NR Description: putative protein; protein id: At5g22550.1,
  misc_feature (1)..(27): Homolog of NCBI NO: 18420531 NR Description: putative protein; protein id: At5g22550.1,

SEQ ID NO: 78146 - DNA, 1193 bp, Arabidopsis thaliana
  misc_feature (1)..(1193): Ceres Seq. ID no. 12639376
  misc_feature: MA Experiment ID: 20000227 Result: Up-regulated in Transcription
  misc_feature: MA Experiment 20000227 PARAMETER Experiment Name: At_Root-Tips-vs-Tops_P Parameter: Tissue Value: Root Tips vs. Root Tops
  misc_feature: MA Experiment ID: 20000234 Result: Up-regulated in Transcription
  misc_feature: MA Experiment 20000234 PARAMETER Experiment Name: At_Siliques_P Parameter: Age (day) Value: 21
  misc_feature: MA Experiment 20000234 PARAMETER Experiment Name: At_Siliques_P Parameter: Organism Value: A. thaliana
  misc_feature: MA Experiment 20000234 PARAMETER Experiment Name: At_Siliques_P Parameter: Plant Line Value: WS
  misc_feature: MA Experiment 20000234 PARAMETER Experiment Name: At_Siliques_P Parameter: Tissue Value: Less Than 5mm Siliques vs. Whole Plant
  misc_feature: MA Experiment ID: 20001451 Result: Down-regulated in Transcription
  misc_feature: MA Experiment 20001451 PARAMETER Experiment Name: At_Far-red-induction_P Parameter: Age (day) Value: 7
  misc_feature: MA Experiment 20001451 PARAMETER Experiment Name: At_Far-red-induction_P Parameter: Light Value: Far-red vs. White
  misc_feature: MA Experiment 20001451 PARAMETER Experiment Name: At_Far-red-induction_P Parameter: Organism Value: A. thaliana
  misc_feature: MA Experiment 20001451 PARAMETER Experiment Name: At_Far-red-induction_P Parameter: Plant Line Value: Columbia
  misc_feature: MA Experiment 20001451 PARAMETER Experiment Name: At_Far-red-induction_P Parameter: Timepoint (hr) Value: 24
  misc_feature: MA Experiment 20001451 PARAMETER Experiment Name: At_Far-red-induction_P Parameter: Tissue Value: Whole Plant
  misc_feature: MA Experiment ID: 20001557 Result: Up-regulated in Transcription
  misc_feature: MA Experiment 20001557 PARAMETER Experiment Name: At_Drought_Soil_Dry_P Parameter: Age (day) Value: 27
  misc_feature: MA Experiment 20001557 PARAMETER Experiment Name: At_Drought_Soil_Dry_P Parameter: Organism Value: A. thaliana
  misc_feature: MA Experiment 20001557 PARAMETER Experiment Name: At_Drought_Soil_Dry_P Parameter: Plant Line Value: WS
  misc_feature: MA Experiment 20001557 PARAMETER Experiment Name: At_Drought_Soil_Dry_P Parameter: Post Timepoint (hr) Value: 3
  misc_feature: MA Experiment 20001557 PARAMETER Experiment Name: At_Drought_Soil_Dry_P Parameter: Post-Treatment Value: Re-Water vs. No Drought
  misc_feature: MA Experiment 20001557 PARAMETER Experiment Name: At_Drought_Soil_Dry_P Parameter: Timepoint (day) Value: 13
  misc_feature: MA Experiment 20001557 PARAMETER Experiment Name: At_Drought_Soil_Dry_P Parameter: Treatment Value: Drought vs. No Drought
  misc_feature: MA Experiment ID: 20001558 Result: Up-regulated in Transcription
  misc_feature: MA Experiment 20001558 PARAMETER Experiment Name: At_Drought_Soil_Dry_P Parameter: Age (day) Value: 27
  misc_feature: MA Experiment 20001558 PARAMETER Experiment Name: At_Drought_Soil_Dry_P Parameter: Organism Value: A. thaliana
  misc_feature: MA Experiment 20001558 PARAMETER Experiment Name: At_Drought_Soil_Dry_P Parameter: Plant Line Value: WS
  misc_feature: MA Experiment 20001558 PARAMETER Experiment Name: At_Drought_Soil_Dry_P Parameter: Post Timepoint (hr) Value: 6
  misc_feature: MA Experiment 20001558 PARAMETER Experiment Name: At_Drought_Soil_Dry_P Parameter: Post-Treatment Value: Re-Water vs. No Drought
  misc_feature: MA Experiment 20001558 PARAMETER Experiment Name: At_Drought_Soil_Dry_P Parameter: Timepoint (day) Value: 13
  misc_feature: MA Experiment 20001558 PARAMETER Experiment Name: At_Drought_Soil_Dry_P Parameter: Treatment Value: Drought vs. No Drought
  misc_feature: MA Experiment ID: 20001757 Result: Up-regulated in Transcription
  misc_feature: MA Experiment 20001757 PARAMETER Experiment Name: At_50mM_NH4NO3_L-to-H_P Parameter: Timepoint (hr) Value: 6
  misc_feature: MA Experiment 20001757 PARAMETER Experiment Name: At_50mM_NH4NO3_L-to-H_P Parameter: Tissue Value: Leaf
  misc_feature: MA Experiment 20001757 PARAMETER Experiment Name: At_50mM_NH4NO3_L-to-H_P Parameter: Treatment Value: 50mM NH4NO3 vs 100mM Mannitol
actgcaatttctctctttcgcttctaaaaaaaaacctaacaacctctcttctctcttcctcgttcaacaacaatggagttctggggagttgcggtgacaccaaaaaacgctactaaggtgactcctgaagaagacagccttgtccacatttctcaggcttcacttgactgcacagtgaaatctggagaatctgtggttttgagtgtgactgttggtggggctaaacttgttattggaacactttcacaagacaagttccctcagattagctttgatttggtttttgataaagagtttgagctttcacacagcggtaccaaagcaaatgttcatttcattggctacaaatcccccaacatcgagcaggatgacttcactagttcggatgatgaggatgttcctgaagctgttcctgctcctgcccctactgctgttactgccaacggaaatgctggagcagctgttgtcaaggctgacacaaagccaaaggccaaacctgccgaagtgaagcctgcagaagagaagcctgaatcagacgaggaagatgagtctgatgatgaagatgagtctgaagaggatgatgactctgagaaaggaatggatgttgatgaagatgactcagatgatgacgaggaggaggattctgaggatgaagaagaggaggagactcctaagaagcctgagccaatcaacaagaagaggccaaatgaatctgtatccaaaacacccgtctctggaaagaaggcaaaaccagcagcagcaccagcttctactcctcagaagacagaagagaagaagaaaggaggacacaccgccacaccacacccagctaagaagggtggaaagtctcctgtgaatgctaaccagagccccaagtctggaggtcaatcatccggtggtaacaacaacaagaagccattcaactcaggcaaacaatttggtggttccaacaacaagggttctaacaagggcaagggaaagggtagagcttaaggacgtggatcaaggagaggttttgggttttcgagtagatgatgaaaacacttggaagtgtggttttggatttttatcttattttattagtataacttgttatcggatgagctattttgagtatttgcaatttctactttcctatgtaattcagtatatgaatatttgctgaaatgagaaagaagactcgaattgcaaac

SEQ ID NO: 78147 - protein, 306 aa, Arabidopsis thaliana; identical to SEQ ID NO: 28416
  peptide (1)..(306): Ceres Seq. ID no. 12639377
  misc_feature (124)..(243): Pfam Name: AMP-binding enzyme Pfam Description: AMP-binding enzyme
  misc_feature (1)..(306): Homolog of NCBI NO: 30688577 NR Description: histone deacetylase-related protein [Arabidopsis
  misc_feature (1)..(306): Homolog of NCBI NO: 25352191 NR Description: probable histone deacetylase (EC 3.5.1.-) - Arabidopsis thaliana >gi|2854070|gb|AAC02539.1| putative deacetylase [Arabidopsis thaliana]
  misc_feature (95)..(306): Homolog of NCBI NO: 30688581 NR Description: histone deacetylase-related protein [Arabidopsis
  misc_feature (1)..(301): Homolog of NCBI NO: 7804960 NR Description: putative histone deacetylase HD2 [Oryza sativa]
  misc_feature (1)..(282): Homolog of NCBI NO: 7489751 NR Description: histone deacetylase (EC 3.5.1.-) HD2-p39,
  misc_feature (1)..(285): Homolog of NCBI NO: 7716948 NR Description: histone deacetylase 2 isoform b [Zea mays]
  misc_feature (1)..(269): Homolog of NCBI NO: 7716950 NR Description: histone deacetylase 2 isoform c [Zea mays]

SEQ ID NO: 78148 - DNA, 1410 bp, Arabidopsis thaliana
  misc_feature (1)..(1410): Ceres Seq. ID no. 12639412
  misc_feature: MA Experiment ID: 20000171 Result: Down-regulated in Transcription
  misc_feature: MA Experiment 20000171 PARAMETER Experiment Name: At_42deg_Heat_P Parameter: Age (day) Value: 14
  misc_feature: MA Experiment 20000171 PARAMETER Experiment Name: At_42deg_Heat_P Parameter: Organism Value: A. thaliana
  misc_feature: MA Experiment 20000171 PARAMETER Experiment Name: At_42deg_Heat_P Parameter: Plant Line Value: WS
  misc_feature: MA Experiment 20000171 PARAMETER Experiment Name: At_42deg_Heat_P Parameter: Temperature (deg C) Value: 42 vs. 22
  misc_feature: MA Experiment 20000171 PARAMETER Experiment Name: At_42deg_Heat_P Parameter: Timepoint (hr) Value: 1
  misc_feature: MA Experiment 20000171 PARAMETER Experiment Name: At_42deg_Heat_P Parameter: Tissue Value: Aerial
  misc_feature: MA Experiment ID: 20000173 Result: Down-regulated in Transcription
  misc_feature: MA Experiment 20000173 PARAMETER Experiment Name: At_42deg_Heat_P Parameter: Age (day) Value: 14
  misc_feature: MA Experiment 20000173 PARAMETER Experiment Name: At_42deg_Heat_P Parameter: Organism Value: A. thaliana
  misc_feature: MA Experiment 20000173 PARAMETER Experiment Name: At_42deg_Heat_P Parameter: Plant Line Value: WS
  misc_feature: MA Experiment 20000173 PARAMETER Experiment Name: At_42deg_Heat_P Parameter: Temperature (deg C) Value: 42 vs. 22
  misc_feature: MA Experiment 20000173 PARAMETER Experiment Name: At_42deg_Heat_P Parameter: Timepoint (hr) Value: 6
  misc_feature: MA Experiment 20000173 PARAMETER Experiment Name: At_42deg_Heat_P Parameter: Tissue Value: Aerial
  misc_feature: MA Experiment ID: 20000180 Result: Up-regulated in Transcription
  misc_feature: MA Experiment 20000180 PARAMETER Experiment Name: At_Germinating_Seeds_P Parameter: Age (hr) Value: 24 vs. 0
  misc_feature: MA Experiment 20000180 PARAMETER Experiment Name: At_Germinating_Seeds_P Parameter: Tissue Value: Germinating Seeds
  misc_feature: MA Experiment ID: 20000227 Result: Up-regulated in Transcription
  misc_feature: MA Experiment 20000227 PARAMETER Experiment Name: At_Root-Tips-vs-Tops_P Parameter: Tissue Value: Root Tips vs. Root Tops
  misc_feature: MA Experiment ID: 20000234 Result: Up-regulated in Transcription
  misc_feature: MA Experiment 20000234 PARAMETER Experiment Name: At_Siliques_P Parameter: Age (day) Value: 21
  misc_feature: MA Experiment 20000234 PARAMETER Experiment Name: At_Siliques_P Parameter: Organism Value: A. thaliana
  misc_feature: MA Experiment 20000234 PARAMETER Experiment Name: At_Siliques_P Parameter: Plant Line Value: WS
  misc_feature: MA Experiment 20000234 PARAMETER Experiment Name: At_Siliques_P Parameter: Tissue Value: Less Than 5mm Siliques vs. Whole Plant
  misc_feature: MA Experiment ID: 20000265 Result: Up-regulated in Transcription
  misc_feature: MA Experiment 20000265 PARAMETER Experiment Name: At_Open_Flower_P Parameter: Age (day) Value: 21
  misc_feature: MA Experiment 20000265 PARAMETER Experiment Name: At_Open_Flower_P Parameter: Plant Line Value: WS
  misc_feature: MA Experiment 20000265 PARAMETER Experiment Name: At_Open_Flower_P Parameter: Tissue Value: Closed Flower vs. Whole Plant
  misc_feature: MA Experiment ID: 20000286 Result: Up-regulated in Transcription
  misc_feature: MA Experiment 20000286 PARAMETER Experiment Name: At_Open_Flower_P Parameter: Age (day) Value: 21
  misc_feature: MA Experiment 20000286 PARAMETER Experiment Name: At_Open_Flower_P Parameter: Plant Line Value: WS
  misc_feature: MA Experiment 20000286 PARAMETER Experiment Name: At_Open_Flower_P Parameter: Tissue Value: Half Open vs. Whole Plant
  misc_feature: MA Experiment ID: 20000437 Result: Down-regulated in Transcription
  misc_feature: MA Experiment 20000437 PARAMETER Experiment Name: At_Drought_P Parameter: Age (day) Value: 8
  misc_feature: MA Experiment 20000437 PARAMETER Experiment Name: At_Drought_P Parameter: Organism Value: A. thaliana
  misc_feature: MA Experiment 20000437 PARAMETER Experiment Name: At_Drought_P Parameter: Plant Line Value: WS
  misc_feature: MA Experiment 20000437 PARAMETER Experiment Name: At_Drought_P Parameter: Timepoint (hr) Value: 24
  misc_feature: MA Experiment 20000437 PARAMETER Experiment Name: At_Drought_P Parameter: Tissue Value: Whole Plant
  misc_feature: MA Experiment 20000437 PARAMETER Experiment Name: At_Drought_P Parameter: Treatment Value: Drought vs. No Drought
  misc_feature: MA Experiment ID: 20000496 Result: Up-regulated in Transcription
  misc_feature: MA Experiment 20000496 PARAMETER Experiment Name: At_Guard_Cells_P Parameter: Harvest Date Value: 7/19/2002
  misc_feature: MA Experiment 20000496 PARAMETER Experiment Name: At_Guard_Cells_P Parameter: Organism Value: Canola
  misc_feature: MA Experiment 20000496 PARAMETER Experiment Name: At_Guard_Cells_P Parameter: Tissue Value: Guard Cells vs. Leaves
  misc_feature: MA Experiment ID: 20001247 Result: Up-regulated in Transcription
  misc_feature: MA Experiment 20001247 PARAMETER Experiment Name: At_Far-red-induction_P Parameter: Age (day) Value: 7
  misc_feature: MA Experiment 20001247 PARAMETER Experiment Name: At_Far-red-induction_P Parameter: Light Value: Far-red vs. White
  misc_feature: MA Experiment 20001247 PARAMETER Experiment Name: At_Far-red-induction_P Parameter: Organism Value: A. thaliana
  misc_feature: MA Experiment 20001247 PARAMETER Experiment Name: At_Far-red-induction_P Parameter: Plant Line Value: Columbia
  misc_feature: MA Experiment 20001247 PARAMETER Experiment Name: At_Far-red-induction_P Parameter: Timepoint (hr) Value: 1
  misc_feature: MA Experiment 20001247 PARAMETER Experiment Name: At_Far-red-induction_P Parameter: Tissue Value: Whole Plant
  misc_feature: MA Experiment ID: 20001450 Result: Up-regulated in Transcription
  misc_feature: MA Experiment 20001450 PARAMETER Experiment Name: At_Far-red-induction_P Parameter: Age (day) Value: 7
  misc_feature: MA Experiment 20001450 PARAMETER Experiment Name: At_Far-red-induction_P Parameter: Light Value: Far-red vs. White
  misc_feature: MA Experiment 20001450 PARAMETER Experiment Name: At_Far-red-induction_P Parameter: Organism Value: A. thaliana
  misc_feature: MA Experiment 20001450 PARAMETER Experiment Name: At_Far-red-induction_P Parameter: Plant Line Value: Columbia
  misc_feature: MA Experiment 20001450 PARAMETER Experiment Name: At_Far-red-induction_P Parameter: Timepoint (hr) Value: 8
  misc_feature: MA Experiment 20001450 PARAMETER Experiment Name: At_Far-red-induction_P Parameter: Tissue Value: Whole Plant
  misc_feature: MA Experiment ID: 20001451 Result: Up-regulated in Transcription
  misc_feature: MA Experiment 20001451 PARAMETER Experiment Name: At_Far-red-induction_P Parameter: Age (day) Value: 7
  misc_feature: MA Experiment 20001451 PARAMETER Experiment Name: At_Far-red-induction_P Parameter: Light Value: Far-red vs. White
  misc_feature: MA Experiment 20001451 PARAMETER Experiment Name: At_Far-red-induction_P Parameter: Organism Value: A. thaliana
  misc_feature: MA Experiment 20001451 PARAMETER Experiment Name: At_Far-red-induction_P Parameter: Plant Line Value: Columbia
  misc_feature: MA Experiment 20001451 PARAMETER Experiment Name: At_Far-red-induction_P Parameter: Timepoint (hr) Value: 24
  misc_feature: MA Experiment 20001451 PARAMETER Experiment Name: At_Far-red-induction_P Parameter: Tissue Value: Whole Plant
  misc_feature: MA Experiment ID: 20001555 Result: Down-regulated in Transcription
  misc_feature: MA Experiment 20001555 PARAMETER Experiment Name: At_Drought_Soil_Dry_P Parameter: Age (day) Value: 24
  misc_feature: MA Experiment 20001555 PARAMETER Experiment Name: At_Drought_Soil_Dry_P Parameter: Organism Value: A. thaliana
  misc_feature: MA Experiment 20001555 PARAMETER Experiment Name: At_Drought_Soil_Dry_P Parameter: Plant Line Value: WS
  misc_feature: MA Experiment 20001555 PARAMETER Experiment Name: At_Drought_Soil_Dry_P Parameter: Post Timepoint (hr) Value: None
  misc_feature: MA Experiment 20001555 PARAMETER Experiment Name: At_Drought_Soil_Dry_P Parameter: Post-Treatment Value: None
  misc_feature: MA Experiment 20001555 PARAMETER Experiment Name: At_Drought_Soil_Dry_P Parameter: Timepoint (day) Value: 10
  misc_feature: MA Experiment 20001555 PARAMETER Experiment Name: At_Drought_Soil_Dry_P Parameter: Treatment Value: Drought vs. No Drought
  misc_feature: MA Experiment ID: 20001556 Result: Down-regulated in Transcription
  misc_feature: MA Experiment 20001556 PARAMETER Experiment Name: At_Drought_Soil_Dry_P Parameter: Age (day) Value: 26
  misc_feature: MA Experiment 20001556 PARAMETER Experiment Name: At_Drought_Soil_Dry_P Parameter: Organism Value: A. thaliana
  misc_feature: MA Experiment 20001556 PARAMETER Experiment Name: At_Drought_Soil_Dry_P Parameter: Plant Line Value: WS
  misc_feature: MA Experiment 20001556 PARAMETER Experiment Name: At_Drought_Soil_Dry_P Parameter: Post Timepoint (hr) Value: None
  misc_feature: MA Experiment 20001556 PARAMETER Experiment Name: At_Drought_Soil_Dry_P Parameter: Post-Treatment Value: None
  misc_feature: MA Experiment 20001556 PARAMETER Experiment Name: At_Drought_Soil_Dry_P Parameter: Timepoint (day) Value: 12
  misc_feature: MA Experiment 20001556 PARAMETER Experiment Name: At_Drought_Soil_Dry_P Parameter: Treatment Value: Drought vs. No Drought
  misc_feature: MA Experiment ID: 20001557 Result: Up-regulated in Transcription
  misc_feature: MA Experiment 20001557 PARAMETER Experiment Name: At_Drought_Soil_Dry_P Parameter: Age (day) Value: 27
  misc_feature: MA Experiment 20001557 PARAMETER Experiment Name: At_Drought_Soil_Dry_P Parameter: Organism Value: A. thaliana
  misc_feature: MA Experiment 20001557 PARAMETER Experiment Name: At_Drought_Soil_Dry_P Parameter: Plant Line Value: WS
  misc_feature: MA Experiment 20001557 PARAMETER Experiment Name: At_Drought_Soil_Dry_P Parameter: Post Timepoint (hr) Value: 3
  misc_feature: MA Experiment 20001557 PARAMETER Experiment Name: At_Drought_Soil_Dry_P Parameter: Post-Treatment Value: Re-Water vs. No Drought
  misc_feature: MA Experiment 20001557 PARAMETER Experiment Name: At_Drought_Soil_Dry_P Parameter: Timepoint (day) Value: 13
  misc_feature: MA Experiment 20001557 PARAMETER Experiment Name: At_Drought_Soil_Dry_P Parameter: Treatment Value: Drought vs. No Drought
  misc_feature: MA Experiment ID: 20001558 Result: Up-regulated in Transcription
  misc_feature: MA Experiment 20001558 PARAMETER Experiment Name: At_Drought_Soil_Dry_P Parameter: Age (day) Value: 27
  misc_feature: MA Experiment 20001558 PARAMETER Experiment Name: At_Drought_Soil_Dry_P Parameter: Organism Value: A. thaliana
  misc_feature: MA Experiment 20001558 PARAMETER Experiment Name: At_Drought_Soil_Dry_P Parameter: Plant Line Value: WS
  misc_feature: MA Experiment 20001558 PARAMETER Experiment Name: At_Drought_Soil_Dry_P Parameter: Post Timepoint (hr) Value: 6
  misc_feature: MA Experiment 20001558 PARAMETER Experiment Name: At_Drought_Soil_Dry_P Parameter: Post-Treatment Value: Re-Water vs. No Drought
  misc_feature: MA Experiment 20001558 PARAMETER Experiment Name: At_Drought_Soil_Dry_P Parameter: Timepoint (day) Value: 13
  misc_feature: MA Experiment 20001558 PARAMETER Experiment Name: At_Drought_Soil_Dry_P Parameter: Treatment Value: Drought vs. No Drought
  misc_feature: MA Experiment ID: 20001560 Result: Up-regulated in Transcription
  misc_feature: MA Experiment 20001560 PARAMETER Experiment Name: At_Drought_Soil_Dry_P Parameter: Age (day) Value: 28
  misc_feature: MA Experiment 20001560 PARAMETER Experiment Name: At_Drought_Soil_Dry_P Parameter: Organism Value: A. thaliana
  misc_feature: MA Experiment 20001560 PARAMETER Experiment Name: At_Drought_Soil_Dry_P Parameter: Plant Line Value: WS
  misc_feature: MA Experiment 20001560 PARAMETER Experiment Name: At_Drought_Soil_Dry_P Parameter: Post Timepoint (hr) Value: None
  misc_feature: MA Experiment 20001560 PARAMETER Experiment Name: At_Drought_Soil_Dry_P Parameter: Post-Treatment Value: None
  misc_feature: MA Experiment 20001560 PARAMETER Experiment Name: At_Drought_Soil_Dry_P Parameter: Timepoint (day) Value: 14
  misc_feature: MA Experiment 20001560 PARAMETER Experiment Name: At_Drought_Soil_Dry_P Parameter: Treatment Value: Drought vs. No Drought
  misc_feature: MA Experiment ID: 20001906 Result: Down-regulated in Transcription
  misc_feature: MA Experiment 20001906 PARAMETER Experiment Name: At_Drought_Reproduction_P Parameter: Age (day) Value: 35
  misc_feature: MA Experiment 20001906 PARAMETER Experiment Name: At_Drought_Reproduction_P Parameter: Organism Value: A. thaliana
  misc_feature: MA Experiment 20001906 PARAMETER Experiment Name: At_Drought_Reproduction_P Parameter: Plant Line Value: WS
  misc_feature: MA Experiment 20001906 PARAMETER Experiment Name: At_Drought_Reproduction_P Parameter: Timepoint (day) Value: 5
  misc_feature: MA Experiment 20001906 PARAMETER Experiment Name: At_Drought_Reproduction_P Parameter: Tissue Value: Siliques
  misc_feature: MA Experiment 20001906 PARAMETER Experiment Name: At_Drought_Reproduction_P Parameter: Treatment Value: Drought vs. No Drought
  misc_feature: MA Experiment ID: 20001911 Result: Down-regulated in Transcription
  misc_feature: MA Experiment 20001911 PARAMETER Experiment Name: At_Drought_Reproduction_P Parameter: Age (day) Value: 40
  misc_feature: MA Experiment 20001911 PARAMETER Experiment Name: At_Drought_Reproduction_P Parameter: Organism Value: A. thaliana
  misc_feature: MA Experiment 20001911 PARAMETER Experiment Name: At_Drought_Reproduction_P Parameter: Plant Line Value: WS
  misc_feature: MA Experiment 20001911 PARAMETER Experiment Name: At_Drought_Reproduction_P Parameter: Timepoint (day) Value: 10
  misc_feature: MA Experiment 20001911 PARAMETER Experiment Name: At_Drought_Reproduction_P Parameter: Tissue Value: Flowers
  misc_feature: MA Experiment 20001911 PARAMETER Experiment Name: At_Drought_Reproduction_P Parameter: Treatment Value: Drought vs. No Drought
atgtcgcttgacataaagaaaccgaacatcaccaagacgaagaagaagaagacaggtttcgtcgtaaaaatgcagcttaataacaacagaggaggaaataaaagaaacatctttatcttcttcttcttcagaaactattacacatggatcctctggttttgcctctctctgtatttcttcacatcttacttctccgtcgaagaccaatcctcaccgtcgtcaatacgtctcttgtctaaccacaaaacgtcgtcgtctctcccatctcgtgctctcatcgaatcttccgccattaaaaccacctccattggtttgttcaccggaatgaagatatacgtttacgatttaccggcgagttataacgacgattgggttacagcatcagaccgttgcgctagccacctcttcgcggcggaggtagctatccaccgtgcacttctctcctccgacgtccgtacgttagacccagatgaagctgattacttcttcgtccctgtctacgtttcttgcaatttctccacatccaacggcttcccttctctaagccacgctcgctctctccttagctccgccgtcgattttctctccgatcattacccattttggaacaggagtcaaggctctgaccacgtcttcgtcgcttcccatgactttggcgcatgcttccacgcaatggaggatatggctatagaggaagggattccaaaatttatgaagagatcaataattttacaaacgtttggagttaagtacaagcatccatgtcaagaagtggaacatgttgtgattcctccttatattccaccggagagtgttcaaaaagctattgaaaaagctccggtgaacggacggcgagacatttgggcgtttttccggggaaaaatggaagtcaaccctaagaatattagcggacgcttttacagcaagggagtgagaacggcgattctaaagaaattcggaggaagaaggcggttttatctaaaccggcaccggtttgctggataccgatcagaaatcgtgagatcagtgttttgtctctgtcctttagggtgggcaccatggagtcctagactagtggaatccgccgtgttaggttgtgttcccgttgttatcgccgatgggattcaattaccgttctcggagacggtacaatggccggaaatctcactaacggtggcggagaaagacgtgaggaatctacgaaaggttttggaacacgtggcggctactaatttgtctgcaatacaaagaaacttacatgaaccggtgtttaagcgggccctcttgtacaatgtgccgatgaaagaaggagacgccacgtggcatattctcgagtcgttgtggaggaagctcgatgatcggtcgtacagaaggtcaagggttttaagccaacgagaagtcgacatgtag

SEQ ID NO: 78149 - protein, 469 aa, Arabidopsis thaliana
  peptide (1)..(469): Ceres Seq. ID no. 12639413
  misc_feature (111)..(419): Pfam Name: Exostosin family Pfam Description: Exostosin family
  misc_feature (104)..(469): Homolog of NCBI NO: 15237173 NR Description: putative protein; protein id: At5g22940.1 thaliana] >gi|10177241|dbj|BAB10615.1|
  misc_feature (1)..(104): Homolog of NCBI NO: 15237173 NR Description: putative protein; protein id: At5g22940.1 thaliana] >gi|10177241|dbj|BAB10615.1|
  misc_feature (43)..(459): Homolog of NCBI NO: 25407954 NR Description: hypothetical protein At2g28110 [imported] - thaliana >gi|4063747|gb|AAC98455.1| hypothetical protein
  misc_feature (226)..(458): Homolog of NCBI NO: 34902390 NR Description: Unknown protein [Oryza sativa (japonica
  misc_feature (109)..(226): Homolog of NCBI NO: 34902390 NR Description: Unknown protein [Oryza sativa (japonica
  misc_feature (109)..(451): Homolog of NCBI NO: 34907046 NR Description: contains EST D39982(S1682)~similar to Arabidopsis
  misc_feature (109)..(451): Homolog of NCBI NO: 34907048 NR Description: contains EST D24978(R2878)~similar to Arabidopsis
  misc_feature (107)..(451): Homolog of NCBI NO: 34907044 NR Description: hypothetical protein~similar to Arabidopsis
  misc_feature (109)..(455): Homolog of NCBI NO: 15223522 NR Description: unknown protein; protein id: At1g27440.1 thaliana] >gi|9802541|gb|AAF99743.1|AC004557_22 F17L21.23
  misc_feature (109)..(451): Homolog of NCBI NO: 38347167 NR Description: OSJNBa0039C07.13 [Oryza sativa (japonica
MSLDIKKPNITKTKKKKTGFVVKMQLNNNRGGNKRNIFIFFFFRNYYTWILWFCLSLYFFTSYFSVEDQSSPSSIRLLSNHKTSSSLPSRALIESSAIKTTSIGLFTGMKIYVYDLPASYNDDWVTASDRCASHLFAAEVAIHRALLSSDVRTLDPDEADYFFVPVYVSCNFSTSNGFPSLSHARSLLSSAVDFLSDHYPFWNRSQGSDHVFVASHDFGACFHAMEDMAIEEGIPKFMKRSIILQTFGVKYKHPCQEVEHVVIPPYIPPESVQKAIEKAPVNGRRDIWAFFRGKMEVNPKNISGRFYSKGVRTAILKKFGGRRRFYLNRHRFAGYRSEIVRSVFCLCPLGWAPWSPRLVESAVLGCVPVVIADGIQLPFSETVQWPEISLTVAEKDVRNLRKVLEHVAATNLSAIQRNLHEPVFKRALLYNVPMKEGDATWHILESLWRKLDDRSYRRSRVLSQREVDM

SEQ ID NO: 78150 - protein, 446 aa, Arabidopsis thaliana
  peptide (1)..(446): Ceres Seq. ID no. 12639414
  misc_feature (88)..(396): Pfam Name: Exostosin family Pfam Description: Exostosin family
  misc_feature (81)..(446): Homolog of NCBI NO: 15237173 NR Description: putative protein; protein id: At5g22940.1 thaliana] >gi|10177241|dbj|BAB10615.1|
  misc_feature (1)..(81): Homolog of NCBI NO: 15237173 NR Description: putative protein; protein id: At5g22940.1 thaliana] >gi|10177241|dbj|BAB10615.1|
  misc_feature (20)..(436): Homolog of NCBI NO: 25407954 NR Description: hypothetical protein At2g28110 [imported] - thaliana >gi|4063747|gb|AAC98455.1| hypothetical protein
  misc_feature (203)..(435): Homolog of NCBI NO: 34902390 NR Description: Unknown protein [Oryza sativa (japonica
  misc_feature (86)..(203): Homolog of NCBI NO: 34902390 NR Description: Unknown protein [Oryza sativa (japonica
  misc_feature (86)..(428): Homolog of NCBI NO: 34907046 NR Description: contains EST D39982(S1682)~similar to Arabidopsis
  misc_feature (86)..(428): Homolog of NCBI NO: 34907048 NR Description: contains EST D24978(R2878)~similar to Arabidopsis
  misc_feature (84)..(428): Homolog of NCBI NO: 34907044 NR Description: hypothetical protein~similar to Arabidopsis
  misc_feature (86)..(432): Homolog of NCBI NO: 15223522 NR Description: unknown protein; protein id: At1g27440.1 thaliana] >gi|9802541|gb|AAF99743.1|AC004557_22 F17L21.23
  misc_feature (86)..(428): Homolog of NCBI NO: 38347167 NR Description: OSJNBa0039C07.13 [Oryza sativa (japonica
MQLNNNRGGNKRNIFIFFFFRNYYTWILWFCLSLYFFTSYFSVEDQSSPSSIRLLSNHKTSSSLPSRALIESSAIKTTSIGLFTGMKIYVYDLPASYNDDWVTASDRCASHLFAAEVAIHRALLSSDVRTLDPDEADYFFVPVYVSCNFSTSNGFPSLSHARSLLSSAVDFLSDHYPFWNRSQGSDHVFVASHDFGACFHAMEDMAIEEGIPKFMKRSIILQTFGVKYKHPCQEVEHVVIPPYIPPESVQKAIEKAPVNGRRDIWAFFRGKMEVNPKNISGRFYSKGVRTAILKKFGGRRRFYLNRHRFAGYRSEIVRSVFCLCPLGWAPWSPRLVESAVLGCVPVVIADGIQLPFSETVQWPEISLTVAEKDVRNLRKVLEHVAATNLSAIQRNLHEPVFKRALLYNVPMKEGDATWHILESLWRKLDDRSYRRSRVLSQREVDM

SEQ ID NO: 78151 - protein, 361 aa, Arabidopsis thaliana
  peptide (1)..(361): Ceres Seq. ID no. 12639415
  misc_feature (3)..(311): Pfam Name: Exostosin family Pfam Description: Exostosin family
  misc_feature (1)..(361): Homolog of NCBI NO: 15237173 NR Description: putative protein; protein id: At5g22940.1 thaliana] >gi|10177241|dbj|BAB10615.1|
  misc_feature (1)..(351): Homolog of NCBI NO: 25407954 NR Description: hypothetical protein At2g28110 [imported] - thaliana >gi|4063747|gb|AAC98455.1| hypothetical protein
  misc_feature (118)..(350): Homolog of NCBI NO: 34902390 NR Description: Unknown protein [Oryza sativa (japonica
  misc_feature (1)..(118): Homolog of NCBI NO: 34902390 NR Description: Unknown protein [Oryza sativa (japonica
  misc_feature (1)..(343): Homolog of NCBI NO: 34907046 NR Description: contains EST D39982(S1682)~similar to Arabidopsis
  misc_feature (1)..(343): Homolog of NCBI NO: 34907048 NR Description: contains EST D24978(R2878)~similar to Arabidopsis
  misc_feature (1)..(343): Homolog of NCBI NO: 34907044 NR Description: hypothetical protein~similar to Arabidopsis
  misc_feature (1)..(347): Homolog of NCBI NO: 15223522 NR Description: unknown protein; protein id: At1g27440.1 thaliana] >gi|9802541|gb|AAF99743.1|AC004557_22 F17L21.23
  misc_feature (1)..(343): Homolog of NCBI NO: 38347167 NR Description: OSJNBa0039C07.13 [Oryza sativa (japonica
  misc_feature (1)..(350): Homolog of NCBI NO: 18424516 NR Description: putative protein; protein id: At5g61840.1, by cDNA: 34861., supported by cDNA: gi_15809825, supported by gi_17978868 [Arabidopsis thaliana] >gi|15809826|gb|AAL06841.1|
MKIYVYDLPASYNDDWVTASDRCASHLFAAEVAIHRALLSSDVRTLDPDEADYFFVPVYVSCNFSTSNGFPSLSHARSLLSSAVDFLSDHYPFWNRSQGSDHVFVASHDFGACFHAMEDMAIEEGIPKFMKRSIILQTFGVKYKHPCQEVEHVVIPPYIPPESVQKAIEKAPVNGRRDIWAFFRGKMEVNPKNISGRFYSKGVRTAILKKFGGRRRFYLNRHRFAGYRSEIVRSVFCLCPLGWAPWSPRLVESAVLGCVPVVIADGIQLPFSETVQWPEISLTVAEKDVRNLRKVLEHVAATNLSAIQRNLHEPVFKRALLYNVPMKEGDATWHILESLWRKLDDRSYRRSRVLSQREVDM

SEQ ID NO: 78152 - DNA, 723 bp, Arabidopsis thaliana
  misc_feature (1)..(723): Ceres Seq. ID no. 12639439
  misc_feature: MA Experiment ID: 20000794 Result: Down-regulated in Transcription
  misc_feature: MA Experiment 20000794 PARAMETER Experiment Name: At_Petals_P Parameter: Age (day) Value: 23-25 days
  misc_feature: MA Experiment 20000794 PARAMETER Experiment Name: At_Petals_P Parameter: Plant Line Value: WS
  misc_feature: MA Experiment 20000794 PARAMETER Experiment Name: At_Petals_P Parameter: Tissue Value: Petals vs. Whole plant
atgaggggtctcgtttccggcgccaagatgctatcatcaaccccatcgtcgatggcgacaagcatcgccactggtagaagaagctacagtctgattccgatggttattgagcactcatcgcgaggagagagagcttacgacatcttctctcgtttgctcaaggagcgtattatctgcatcaacggtcccattaatgacgacacatctcacgtcgtcgtcgctcagcttctttacctcgagtctgagaatccttcgaagccgatccatatgtatctcaattcccctggcggccatgtcaccgccggtcttgcaatttatgatactatgcagtacattcgttctcctattagcacaatttgtttgggtcaggctgcatcaatggcttctcttctgttggcagcgggtgccaaggggcaaaggcggtcacttccaaatgcaactgttatgattcatcagccttcaggaggatatagtggacaggctaaagatataacgattcatacaaaacagattgttcgtgtgtgggatgcgttaaatgaattgtatgtcaaacacacgggtcaacctcttgacgtggttgcgaataacatggatagggatcatttcatgactcctgaagaggctaaggcgtttggaataatcgatgaagtgattgatgaaagaccgttggagttggtgaaagatgcagttggaaatgaaagcaaagataagagttcaagttag

SEQ ID NO: 78153 - protein, 240 aa, Arabidopsis thaliana; identical to SEQ ID NO: 43913
  peptide (1)..(240): Ceres Seq. ID no. 12639440
  misc_feature (40)..(221): Pfam Name: Clp protease Pfam Description: Clp protease
  misc_feature (1)..(240): Homolog of NCBI NO: 18420643 NR Description: ATP-dependent Clp protease proteolytic subunit
  misc_feature (12)..(233): Homolog of NCBI NO: 38344435 NR Description: OSJNBa0038O10.7 [Oryza sativa (japonica
  misc_feature (23)..(228): Homolog of NCBI NO: 20129427 NR Description: CG5045-PA [Drosophila melanogaster]
  misc_feature (30)..(222): Homolog of NCBI NO: 6685315 NR Description: ATP-dependent Clp protease proteolytic subunit
  misc_feature (30)..(235): Homolog of NCBI NO: 23501987 NR Description: ATP-dependent Clp protease, proteolytic subunit
  misc_feature (30)..(221): Homolog of NCBI NO: 18203228 NR Description: ATP-dependent Clp protease proteolytic subunit Clp) >gi|6942106|gb|AAF32318.1|AF218420_1 ClpP [Brucella
  misc_feature (30)..(221): Homolog of NCBI NO: 16126206 NR Description: ATP-dependent Clp protease, proteolytic subunit
  misc_feature (30)..(221): Homolog of NCBI NO: 18266800 NR Description: ATP-dependent Clp protease proteolytic subunit
  misc_feature (30)..(221): Homolog of NCBI NO: 17987157 NR Description: ATP-DEPENDENT CLP PROTEASE PROTEOLYTIC SUBUNIT melitensis] >gi|25289873|pir||AD3361 endopeptidase Clp (EC
  misc_feature (30)..(221): Homolog of NCBI NO: 21759068 NR Description: ATP-dependent Clp protease proteolytic subunit

SEQ ID NO: 78154 - protein, 231 aa, Arabidopsis thaliana; identical to SEQ ID NO: 43914
  peptide (1)..(231): Ceres Seq. ID no. 12639441
  misc_feature (31)..(212): Pfam Name: Clp protease Pfam Description: Clp protease
  misc_feature (1)..(231): Homolog of NCBI NO: 18420643 NR Description: ATP-dependent Clp protease proteolytic subunit
  misc_feature (3)..(224): Homolog of NCBI NO: 38344435 NR Description: OSJNBa0038O10.7 [Oryza sativa (japonica
  misc_feature (14)..(219): Homolog of NCBI NO: 20129427 NR Description: CG5045-PA [Drosophila melanogaster]
  misc_feature (21)..(213): Homolog of NCBI NO: 6685315 NR Description: ATP-dependent Clp protease proteolytic subunit
  misc_feature (21)..(226): Homolog of NCBI NO: 23501987 NR Description: ATP-dependent Clp protease, proteolytic subunit
  misc_feature (21)..(212): Homolog of NCBI NO: 18203228 NR Description: ATP-dependent Clp protease proteolytic subunit Clp) >gi|6942106|gb|AAF32318.1|AF218420_1 ClpP [Brucella
  misc_feature (21)..(212): Homolog of NCBI NO: 16126206 NR Description: ATP-dependent Clp protease, proteolytic subunit
  misc_feature (21)..(212): Homolog of NCBI NO: 18266800 NR Description: ATP-dependent Clp protease proteolytic subunit
  misc_feature (21)..(212): Homolog of NCBI NO: 17987157 NR Description: ATP-DEPENDENT CLP PROTEASE PROTEOLYTIC SUBUNIT melitensis] >gi|25289873|pir||AD3361 endopeptidase Clp (EC
  misc_feature (21)..(212): Homolog of NCBI NO: 21759068 NR Description: ATP-dependent Clp protease proteolytic subunit

SEQ ID NO: 78155 - protein, 223 aa, Arabidopsis thaliana
  peptide (1)..(223): Ceres Seq. ID no. 12639442
  misc_feature (23)..(204): Pfam Name: Clp protease Pfam Description: Clp protease
  misc_feature (1)..(223): Homolog of NCBI NO: 18420643 NR Description: ATP-dependent Clp protease proteolytic subunit
  misc_feature (1)..(216): Homolog of NCBI NO: 38344435 NR Description: OSJNBa0038O10.7 [Oryza sativa (japonica
  misc_feature (6)..(211): Homolog of NCBI NO: 20129427 NR Description: CG5045-PA [Drosophila melanogaster]
  misc_feature (13)..(205): Homolog of NCBI NO: 6685315 NR Description: ATP-dependent Clp protease proteolytic subunit
  misc_feature (13)..(218): Homolog of NCBI NO: 23501987 NR Description: ATP-dependent Clp protease, proteolytic subunit
  misc_feature (13)..(204): Homolog of NCBI NO: 18203228 NR Description: ATP-dependent Clp protease proteolytic subunit Clp) >gi|6942106|gb|AAF32318.1|AF218420_1 ClpP [Brucella
  misc_feature (13)..(204): Homolog of NCBI NO: 16126206 NR Description: ATP-dependent Clp protease, proteolytic subunit
  misc_feature (13)..(204): Homolog of NCBI NO: 18266800 NR Description: ATP-dependent Clp protease proteolytic subunit
  misc_feature (13)..(204): Homolog of NCBI NO: 17987157 NR Description: ATP-DEPENDENT CLP PROTEASE PROTEOLYTIC SUBUNIT melitensis] >gi|25289873|pir||AD3361 endopeptidase Clp (EC
  misc_feature (13)..(204): Homolog of NCBI NO: 21759068 NR Description: ATP-dependent Clp protease proteolytic subunit
MATSIATGRRSYSLIPMVIEHSSRGERAYDIFSRLLKERIICINGPINDDTSHVVVAQLLYLESENPSKPIHMYLNSPGGHVTAGLAIYDTMQYIRSPISTICLGQAASMASLLLAAGAKGQRRSLPNATVMIHQPSGGYSGQAKDITIHTKQIVRVWDALNELYVKHTGQPLDVVANNMDRDHFMTPEEAKAFGIIDEVIDERPLELVKDAVGNESKDKSSS

SEQ ID NO: 78156 - DNA, 1229 bp, Arabidopsis thaliana
  misc_feature (1)..(1229): Ceres Seq. ID no. 12639447
  misc_feature: MA Experiment ID: 20001911 Result: Down-regulated in Transcription
  misc_feature: MA Experiment 20001911 PARAMETER Experiment Name: At_Drought_Reproduction_P Parameter: Age (day) Value: 40
  misc_feature: MA Experiment 20001911 PARAMETER Experiment Name: At_Drought_Reproduction_P Parameter: Organism Value: A. thaliana
  misc_feature: MA Experiment 20001911 PARAMETER Experiment Name: At_Drought_Reproduction_P Parameter: Plant Line Value: WS
  misc_feature: MA Experiment 20001911 PARAMETER Experiment Name: At_Drought_Reproduction_P Parameter: Timepoint (day) Value: 10
  misc_feature: MA Experiment 20001911 PARAMETER Experiment Name: At_Drought_Reproduction_P Parameter: Tissue Value: Flowers
  misc_feature: MA Experiment 20001911 PARAMETER Experiment Name: At_Drought_Reproduction_P Parameter: Treatment Value: Drought vs. No Drought
atggcgactcttttcaacaaatttcagcaggctgttggagttcttgccaagagtaccacatttgctaagaacccaaggcaactgcagtttgaagcagacgttaacaaactctttatgtatacaagctataaccggttgggacgagaagctgaggagactgatgcagaggagatcattgagatggctggtaaagccactttatctgagcagcagaagcaagttcaagagaacattcactaccaagttgaaaaattctgctctttgatggatggaatccttcttcctgatgttaggaggaacgagtcggggtcacaatcaacaagccctcgtcctcctcgtagaagtggtcttactttcgccattggtagtaataatgcttttccacatgcagatcagccccttgttcccgagacaaagcctttgaaactcaatgacgtctcacagagattaatggatcaaatgggttacaccctcgagaccaaaccgtctgtaatacctcacaaagacgctggtcaaggttgttttatcaaaggcgaggcagatgttggaaccgtcttagccttttaccctggagttatttactctcctgctttctacaagtacatacccgggtacccgaaggttgattcacagaactcatatctcatcaccaggtatgatgggactgtaataaatgctcaaccttggggtcttgggggagaatcaagggaagcatggaacgggtcctacacacctgcggtcaaagcaaacaccaaaaccgcagaaaacgggtcagacaggttatggaaagcgttgagcaagcctctcgaaggttcgggtaaaggaaaagaggttcttgagaggagaaatccgttggcttttggtcacttagctaaccacccagcgaaagagatgactccaaacgttatgatatgtccttatgacttccctttgatggcgaaagatctgcggccttacattccgaatatatcttttggggattctggagaaataaagatgaaaagatttggaagtttctggtttaagacagggagtaaaaacgggttagaagctccggttctgaagacactggtcttggtggcaacgaggtcgttgtgtaatgaggaacttttgctgaattacaggctgagcaactctaagagacgaccagattggtatactccggttaacgaggaggaagataggagaagatggagctaaatttctcttttatgttttaatgaaacttg

SEQ ID NO: 78157 - protein, 399 aa, Arabidopsis thaliana; identical to SEQ ID NO: 42747
  peptide (1)..(399): Ceres Seq. ID no. 12639448
  misc_feature (1)..(399): Homolog of NCBI NO: 10177809 NR Description: gene_id:MKD15.6~unknown protein [Arabidopsis
  misc_feature (1)..(399): Homolog of NCBI NO: 22327005 NR Description: unknown protein; protein id: At5g23200.1, by cDNA: gi_18491156, supported by cDNA: gi_20258932 [Arabidopsis >gi|18491157|gb|AAL69481.1| unknown protein [Arabidopsis
  misc_feature (1)..(391): Homolog of NCBI NO: 15241572 NR Description: hypothetical protein (fragment at BAC end);
  misc_feature (1)..(391): Homolog of NCBI NO: 26453064 NR Description: unknown protein [Arabidopsis thaliana]
  misc_feature (1)..(330): Homolog of NCBI NO: 11358190 NR Description: hypothetical protein T22D6.210 - Arabidopsis (fragment) >gi|8346564|emb|CAB93728.1| hypothetical protein

SEQ ID NO: 78158 - protein, 361 aa, Arabidopsis thaliana; identical to SEQ ID NO: 42748
  peptide (1)..(361): Ceres Seq. ID no. 12639449
  misc_feature (1)..(361): Homolog of NCBI NO: 10177809 NR Description: gene_id:MKD15.6~unknown protein [Arabidopsis
  misc_feature (1)..(361): Homolog of NCBI NO: 22327005 NR Description: unknown protein; protein id: At5g23200.1, by cDNA: gi_18491156, supported by cDNA: gi_20258932 [Arabidopsis >gi|18491157|gb|AAL69481.1| unknown protein [Arabidopsis
  misc_feature (1)..(353): Homolog of NCBI NO: 15241572 NR Description: hypothetical protein (fragment at BAC end);
  misc_feature (1)..(353): Homolog of NCBI NO: 26453064 NR Description: unknown protein [Arabidopsis thaliana]
  misc_feature (1)..(292): Homolog of NCBI NO: 11358190 NR Description: hypothetical protein T22D6.210 - Arabidopsis (fragment) >gi|8346564|emb|CAB93728.1| hypothetical protein

SEQ ID NO: 78159 - protein, 339 aa, Arabidopsis thaliana; identical to SEQ ID NO: 42749
  peptide (1)..(339): Ceres Seq. ID no. 12639450
  misc_feature (1)..(339): Homolog of NCBI NO: 10177809 NR Description: gene_id:MKD15.6~unknown protein [Arabidopsis
  misc_feature (1)..(339): Homolog of NCBI NO: 22327005 NR Description: unknown protein; protein id: At5g23200.1, by cDNA: gi_18491156, supported by cDNA: gi_20258932 [Arabidopsis >gi|18491157|gb|AAL69481.1| unknown protein [Arabidopsis
  misc_feature (1)..(331): Homolog of NCBI NO: 15241572 NR Description: hypothetical protein (fragment at BAC end);
  misc_feature (1)..(331): Homolog of NCBI NO: 26453064 NR Description: unknown protein [Arabidopsis thaliana]
  misc_feature (1)..(270): Homolog of NCBI NO: 11358190 NR Description: hypothetical protein T22D6.210 - Arabidopsis (fragment) >gi|8346564|emb|CAB93728.1| hypothetical protein

SEQ ID NO: 78160 - DNA, 2625 bp, Arabidopsis thaliana
  misc_feature (1)..(2625): Ceres Seq. ID no. 12639490
  misc_feature: MA Experiment ID: 20000179 Result: Down-regulated in Transcription
  misc_feature: MA Experiment 20000179 PARAMETER Experiment Name: At_Germinating_Seeds_P Parameter: Age (hr) Value: 6 vs. 0
  misc_feature: MA Experiment 20000179 PARAMETER Experiment Name: At_Germinating_Seeds_P Parameter: Tissue Value: Germinating Seeds
  misc_feature: MA Experiment ID: 20000286 Result: Up-regulated in Transcription
  misc_feature: MA Experiment 20000286 PARAMETER Experiment Name: At_Open_Flower_P Parameter: Age (day) Value: 21
  misc_feature: MA Experiment 20000286 PARAMETER Experiment Name: At_Open_Flower_P Parameter: Plant Line Value: WS
  misc_feature: MA Experiment 20000286 PARAMETER Experiment Name: At_Open_Flower_P Parameter: Tissue Value: Half Open vs. Whole Plant
  misc_feature: MA Experiment ID: 20000437 Result: Up-regulated in Transcription
  misc_feature: MA Experiment 20000437 PARAMETER Experiment Name: At_Drought_P Parameter: Age (day) Value: 8
  misc_feature: MA Experiment 20000437 PARAMETER Experiment Name: At_Drought_P Parameter: Organism Value: A. thaliana
  misc_feature: MA Experiment 20000437 PARAMETER Experiment Name: At_Drought_P Parameter: Plant Line Value: WS
  misc_feature: MA Experiment 20000437 PARAMETER Experiment Name: At_Drought_P Parameter: Timepoint (hr) Value: 24
  misc_feature: MA Experiment 20000437 PARAMETER Experiment Name: At_Drought_P Parameter: Tissue Value: Whole Plant
  misc_feature: MA Experiment 20000437 PARAMETER Experiment Name: At_Drought_P Parameter: Treatment Value: Drought vs. No Drought
  misc_feature: MA Experiment ID: 20001451 Result: Down-regulated in Transcription
  misc_feature: MA Experiment 20001451 PARAMETER Experiment Name: At_Far-red-induction_P Parameter: Age (day) Value: 7
  misc_feature: MA Experiment 20001451 PARAMETER Experiment Name: At_Far-red-induction_P Parameter: Light Value: Far-red vs. White
  misc_feature: MA Experiment 20001451 PARAMETER Experiment Name: At_Far-red-induction_P Parameter: Organism Value: A. thaliana
  misc_feature: MA Experiment 20001451 PARAMETER Experiment Name: At_Far-red-induction_P Parameter: Plant Line Value: Columbia
  misc_feature: MA Experiment 20001451 PARAMETER Experiment Name: At_Far-red-induction_P Parameter: Timepoint (hr) Value: 24
  misc_feature: MA Experiment 20001451 PARAMETER Experiment Name: At_Far-red-induction_P Parameter: Tissue Value: Whole Plant
atgaccaccaagcgagcctataagcttcaggaatttgtggcacattctgctgctgtcaattgtcttaagatcggaaggaagtcttctagggttctggtaacaggtggtgaagatcacaaggtcaatctttgggctattggtaagcccaatgccattctgagcttgtatgggcactcaagtggaattgattcagtgacgtttgatgcttcggaggtcttagttgcagcaggagctgctagtggtactatcaaactttgggatttagaggaggcaaagattgtcaggactctcactggtcacaggtccaattgcatctcagtggatttccacccttttggtgagttttttgcgtcaggctcactagacacaaatcttaagatatgggatatacgaaaaaagggctgcatccatacttacaagggtcacacgcgaggagtcaatgtactcagattcaccccagatggtcgctgggttgtatctggaggagaggacaacattgttaagttctgggtttgggatttaacagctggaaaactgctgaccgagtttaagagtcatgaagggcaaattcaaagcctagattttcatcctcatgaattcctactggcaacaggttcagctgatagaactgtaaaattctgggatctggaaacattcgagctgattggttctggtggacctgagactgccggggtccgttgcctgagtttcaatccagatggaaagactgtgctttgtggattgcaagaaagtctcaagattttctcatgggagccaattagatgtcatgatggagtggatgttggatggtcaagattgtcagatatgaatgttcacgagggaaagcttcttggttgctcatacaatcagagttgtgtaggcgtgtgggttgtagatctctcgcgtactgagccatgtatggctggagacactgcgcaatcaaatggtcatccagagaaacgatcttgctcaggaagagatccagtagttctcaatgataataactcaaagacagttctcgggaagctgtccgtttcccaaaatgtagatcctttattgaaggaaacaaagtctctaggaagattatctgtttctcagaactctgatccttcgacaaaagaaacaaagtccattggaaggtcatcaacatcacaaaattcagagtcctcgatgaaggaatcaaagcctctcgggaggttgtcagtttctcaaaattcagacgtttctaaagagtcaaggacgttttcatccacaggaagtttaccaggcactcctcatagggtcagttcgaccaatgtatcaaaagccacttcgggtgtttcaacagccgtctctaatgctgcaacgtcaaggaggaattttacaaaagctaacccaaaggcgaatcctgtcaataaggcagcagattttgctccggtgattgtccccagagcagaccctagaatagagcaggctactgaatccagagcagaacttgacataattgcaagaaccatgccgtattcattgcaggcggctgattcccgaaggtcacctagcagcagaaataaccctgatctgccagacgcttcggttcttgaaatgtctgagtctcagccagttgaaccaaataatataccagatgggggtacacttcctggtggaaaggttggcatgcggggtgcaactgagcgaagcattaatgattttagatacaagagatatggcaggagtaattcaaggtcacggatggggtcacctccacgaaaccacgatgaaaactatgacttggtaagccacagatcaaatagagacccaagccccactgaaagtcagaaaggaggtgattcttcagcccagctttcatcttttcttttgcaaatgaagcgaatctcattcatgtgtcttatcatatcaggaagattccagtcactcgtcataaatagggagaggagaggaagattttcaaacttcgagggtcctgtttcaaatttttcaagtggaaatatgcctgctccaaacatccgcccttcaaatatgttcaagcagagagggaaccatatgccagttgaacaagggatcgattctccttctgaagaaaatattgttgaagacataatgggaaagcacaatcaatttgtcagctctatgcagtctcgtttggctaagttacaggtggttgagatgtcagaagcttcgcaaagagtagttcgtagatattgggaaaggaatgatgtaaaaaattcgataggctcgatagagaagatggctgataatgctgttactgcggacgtactgggtataataaccgagagaaatgagattttgacactggataattgtacctcccttcttccccttctaacagctcttttagggagcggcatggatcagcatttgagcgtttccctggatttgctgctgaagcttgtcagactgtatgggtcaccaatttactcatcactgtcagctccagcatctgttggtgtagatatcgaggctgagcaaaggatcgagcgctacagccgttgctttgtagagctagagaaagtcaaagcatgccttccctctctagcaagaagaggaggtttggtggccaagtctgtgctcgaactcaacctagcatttcaggaagtttcatcataa

SEQ ID NO: 78161 - protein, 874 aa, Arabidopsis thaliana
  peptide (1)..(874): Ceres Seq. ID no. 12639491
  misc_feature (10)..(856): Homolog of NCBI NO: 9759081 NR Description: contains similarity to unknown
  misc_feature (400)..(872): Homolog of NCBI NO: 38344202 NR Description: OSJNBa0064G10.18 [Oryza sativa (japonica
  misc_feature (3)..(488): Homolog of NCBI NO: 38344202 NR Description: OSJNBa0064G10.18 [Oryza sativa (japonica
  misc_feature (1)..(389): Homolog of NCBI NO: 10178281 NR Description: katanin p80 subunit-like protein [Arabidopsis
  misc_feature (646)..(853): Homolog of NCBI NO: 10178281 NR Description: katanin p80 subunit-like protein [Arabidopsis
  misc_feature (58)..(607): Homolog of NCBI NO: 10178281 NR Description: katanin p80 subunit-like protein [Arabidopsis
  misc_feature (1)..(463): Homolog of NCBI NO: 9759081 NR Description: contains similarity to unknown
  misc_feature (10)..(483): Homolog of NCBI NO: 37535664 NR Description: putative microtubule-severing protein subunit
  misc_feature (676)..(872): Homolog of NCBI NO: 37535664 NR Description: putative microtubule-severing protein subunit
  misc_feature (4)..(422): Homolog of NCBI NO: 25402650 NR Description: hypothetical protein [imported] - Arabidopsis >gi|5734734|gb|AAD49999.1|AC007259_12 Hypothetical protein
MTTKRAYKLQEFVAHSAAVNCLKIGRKSSRVLVTGGEDHKVNLWAIGKPNAILSLYGHSSGIDSVTFDASEVLVAAGAASGTIKLWDLEEAKIVRTLTGHRSNCISVDFHPFGEFFASGSLDTNLKIWDIRKKGCIHTYKGHTRGVNVLRFTPDGRWVVSGGEDNIVKFWVWDLTAGKLLTEFKSHEGQIQSLDFHPHEFLLATGSADRTVKFWDLETFELIGSGGPETAGVRCLSFNPDGKTVLCGLQESLKIFSWEPIRCHDGVDVGWSRLSDMNVHEGKLLGCSYNQSCVGVWVVDLSRTEPCMAGDTAQSNGHPEKRSCSGRDPVVLNDNNSKTVLGKLSVSQNVDPLLKETKSLGRLSVSQNSDPSTKETKSIGRSSTSQNSESSMKESKPLGRLSVSQNSDVSKESRTFSSTGSLPGTPHRVSSTNVSKATSGVSTAVSNAATSRRNFTKANPKANPVNKAADFAPVIVPRADPRIEQATESRAELDIIARTMPYSLQAADSRRSPSSRNNPDLPDASVLEMSESQPVEPNNIPDGGTLPGGKVGMRGATERSINDFRYKRYGRSNSRSRMGSPPRNHDENYDLVSHRSNRDPSPTESQKGGDSSAQLSSFLLQMKRISFMCLIISGRFQSLVINRERRGRFSNFEGPVSNFSSGNMPAPNIRPSNMFKQRGNHMPVEQGIDSPSEENIVEDIMGKHNQFVSSMQSRLAKLQVVEMSEASQRVVRRYWERNDVKNSIGSIEKMADNAVTADVLGIITERNEILTLDNCTSLLPLLTALLGSGMDQHLSVSLDLLLKLVRLYGSPIYSSLSAPASVGVDIEAEQRIERYSRCFVELEKVKACLPSLARRGGLVAKSVLELNLAFQEVSS

SEQ ID NO: 78162 - protein, 599 aa, Arabidopsis thaliana
  peptide (1)..(599): Ceres Seq. ID no. 12639492
  misc_feature (1)..(581): Homolog of NCBI NO: 9759081 NR Description: contains similarity to unknown
  misc_feature (125)..(597): Homolog of NCBI NO: 38344202 NR Description: OSJNBa0064G10.18 [Oryza sativa (japonica
  misc_feature (1)..(213): Homolog of NCBI NO: 38344202 NR Description: OSJNBa0064G10.18 [Oryza sativa (japonica
  misc_feature (1)..(114): Homolog of NCBI NO: 10178281 NR Description: katanin p80 subunit-like protein [Arabidopsis
  misc_feature (371)..(578): Homolog of NCBI NO: 10178281 NR Description: katanin p80 subunit-like protein [Arabidopsis
  misc_feature (1)..(332): Homolog of NCBI NO: 10178281 NR Description: katanin p80 subunit-like protein [Arabidopsis
  misc_feature (1)..(188): Homolog of NCBI NO: 9759081 NR Description: contains similarity to unknown
  misc_feature (1)..(208): Homolog of NCBI NO: 37535664 NR Description: putative microtubule-severing protein subunit
  misc_feature (401)..(597): Homolog of NCBI NO: 37535664 NR Description: putative microtubule-severing protein subunit
  misc_feature (1)..(147): Homolog of NCBI NO: 25402650 NR Description: hypothetical protein [imported] - Arabidopsis >gi|5734734|gb|AAD49999.1|AC007259_12 Hypothetical protein
MNVHEGKLLGCSYNQSCVGVWVVDLSRTEPCMAGDTAQSNGHPEKRSCSGRDPVVLNDNNSKTVLGKLSVSQNVDPLLKETKSLGRLSVSQNSDPSTKETKSIGRSSTSQNSESSMKESKPLGRLSVSQNSDVSKESRTFSSTGSLPGTPHRVSSTNVSKATSGVSTAVSNAATSRRNFTKANPKANPVNKAADFAPVIVPRADPRIEQATESRAELDIIARTMPYSLQAADSRRSPSSRNNPDLPDASVLEMSESQPVEPNNIPDGGTLPGGKVGMRGATERSINDFRYKRYGRSNSRSRMGSPPRNHDENYDLVSHRSNRDPSPTESQKGGDSSAQLSSFLLQMKRISFMCLIISGRFQSLVINRERRGRFSNFEGPVSNFSSGNMPAPNIRPSNMFKQRGNHMPVEQGIDSPSEENIVEDIMGKHNQFVSSMQSRLAKLQVVEMSEASQRVVRRYWERNDVKNSIGSIEKMADNAVTADVLGIITERNEILTLDNCTSLLPLLTALLGSGMDQHLSVSLDLLLKLVRLYGSPIYSSLSAPASVGVDIEAEQRIERYSRCFVELEKVKACLPSLARRGGLVAKSVLELNLAFQEVSS

SEQ ID NO: 78163 - protein, 568 aa, Arabidopsis thaliana
  peptide (1)..(568): Ceres Seq. ID no. 12639493
  misc_feature (1)..(550): Homolog of NCBI NO: 9759081 NR Description: contains similarity to unknown
  misc_feature (94)..(566): Homolog of NCBI NO: 38344202 NR Description: OSJNBa0064G10.18 [Oryza sativa (japonica
  misc_feature (1)..(182): Homolog of NCBI NO: 38344202 NR Description: OSJNBa0064G10.18 [Oryza sativa (japonica
  misc_feature (1)..(83): Homolog of NCBI NO: 10178281 NR Description: katanin p80 subunit-like protein [Arabidopsis
  misc_feature (340)..(547): Homolog of NCBI NO: 10178281 NR Description: katanin p80 subunit-like protein [Arabidopsis
  misc_feature (1)..(301): Homolog of NCBI NO: 10178281 NR Description: katanin p80 subunit-like protein [Arabidopsis
  misc_feature (1)..(157): Homolog of NCBI NO: 9759081 NR Description: contains similarity to unknown
  misc_feature (1)..(177): Homolog of NCBI NO: 37535664 NR Description: putative microtubule-severing protein subunit
  misc_feature (370)..(566): Homolog of NCBI NO: 37535664 NR Description: putative microtubule-severing protein subunit
  misc_feature (1)..(116): Homolog of NCBI NO: 25402650 NR Description: hypothetical protein [imported] - Arabidopsis >gi|5734734|gb|AAD49999.1|AC007259_12 Hypothetical protein
MAGDTAQSNGHPEKRSCSGRDPVVLNDNNSKTVLGKLSVSQNVDPLLKETKSLGRLSVSQNSDPSTKETKSIGRSSTSQNSESSMKESKPLGRLSVSQNSDVSKESRTFSSTGSLPGTPHRVSSTNVSKATSGVSTAVSNAATSRRNFTKANPKANPVNKAADFAPVIVPRADPRIEQATESRAELDIIARTMPYSLQAADSRRSPSSRNNPDLPDASVLEMSESQPVEPNNIPDGGTLPGGKVGMRGATERSINDFRYKRYGRSNSRSRMGSPPRNHDENYDLVSHRSNRDPSPTESQKGGDSSAQLSSFLLQMKRISFMCLIISGRFQSLVINRERRGRFSNFEGPVSNFSSGNMPAPNIRPSNMFKQRGNHMPVEQGIDSPSEENIVEDIMGKHNQFVSSMQSRLAKLQVVEMSEASQRVVRRYWERNDVKNSIGSIEKMADNAVTADVLGIITERNEILTLDNCTSLLPLLTALLGSGMDQHLSVSLDLLLKLVRLYGSPIYSSLSAPASVGVDIEAEQRIERYSRCFVELEKVKACLPSLARRGGLVAKSVLELNLAFQEVSS

SEQ ID NO: 78164 - DNA, 970 bp, Arabidopsis thaliana
  misc_feature (1)..(970): Ceres Seq. ID no. 12639528
  misc_feature: MA Experiment ID: 108434 Result: Down-regulated in Transcription
  misc_feature: MA Experiment 108434 PARAMETER Experiment Name: At_Root_Tips_cDNA_P Parameter: Tissue Value: Root Tips
  misc_feature: MA Experiment ID: 108462 Result: Up-regulated in Transcription
  misc_feature: MA Experiment 108462 PARAMETER Experiment Name: At_Germinating_Seeds_cDNA_P Parameter: Age (day) Value: 2 vs. 0
  misc_feature: MA Experiment 108462 PARAMETER Experiment Name: At_Germinating_Seeds_cDNA_P Parameter: Tissue Value: Germinating Seeds
  misc_feature: MA Experiment ID: 108463 Result: Up-regulated in Transcription
  misc_feature: MA Experiment 108463 PARAMETER Experiment Name: At_Germinating_Seeds_cDNA_P Parameter: Age (day) Value: 3 vs. 0
  misc_feature: MA Experiment 108463 PARAMETER Experiment Name: At_Germinating_Seeds_cDNA_P Parameter: Tissue Value: Germinating Seeds
  misc_feature: MA Experiment ID: 108464 Result: Up-regulated in Transcription
  misc_feature: MA Experiment 108464 PARAMETER Experiment Name: At_Germinating_Seeds_cDNA_P Parameter: Age (day) Value: 4 vs. 0
  misc_feature: MA Experiment 108464 PARAMETER Experiment Name: At_Germinating_Seeds_cDNA_P Parameter: Tissue Value: Germinating Seeds
  misc_feature: MA Experiment ID: 108488 Result: Down-regulated in Transcription
  misc_feature: MA Experiment ID: 108561 Result: Up-regulated in Transcription
  misc_feature: MA Experiment 108561 PARAMETER Experiment Name: At_100uM_ABA_cDNA_P Parameter: Timepoint (hr) Value: 6
  misc_feature: MA Experiment 108561 PARAMETER Experiment Name: At_100uM_ABA_cDNA_P Parameter: Tissue Value: Aerial
  misc_feature: MA Experiment 108561 PARAMETER Experiment Name: At_100uM_ABA_cDNA_P Parameter: Treatment Value: 100uM ABA vs. No Treatment
  misc_feature: MA Experiment ID: 108605 Result: Up-regulated in Transcription
  misc_feature: MA Experiment 108605 PARAMETER Experiment Name: At_100uM_ABA_cDNA_P Parameter: Timepoint (hr) Value: 6
  misc_feature: MA Experiment 108605 PARAMETER Experiment Name: At_100uM_ABA_cDNA_P Parameter: Tissue Value: Aerial
  misc_feature: MA Experiment 108605 PARAMETER Experiment Name: At_100uM_ABA_cDNA_P Parameter: Treatment Value: 100uM ABA vs. No Treatment
  misc_feature: MA Experiment ID: 108607 Result: Up-regulated in Transcription
  misc_feature: MA Experiment 108607 PARAMETER Experiment Name: At_100uM_ABA_cDNA_P Parameter: Timepoint (hr) Value: 4
  misc_feature: MA Experiment 108607 PARAMETER Experiment Name: At_100uM_ABA_cDNA_P Parameter: Tissue Value: Aerial
  misc_feature: MA Experiment 108607 PARAMETER Experiment Name: At_100uM_ABA_cDNA_P Parameter: Treatment Value: 100uM ABA vs. No Treatment
  misc_feature: MA Experiment ID: 108609 Result: Up-regulated in Transcription
  misc_feature: MA Experiment 108609 PARAMETER Experiment Name: At_100uM_ABA_cDNA_P Parameter: Timepoint (hr) Value: 24
  misc_feature: MA Experiment 108609 PARAMETER Experiment Name: At_100uM_ABA_cDNA_P Parameter: Tissue Value: Aerial
  misc_feature: MA Experiment 108609 PARAMETER Experiment Name: At_100uM_ABA_cDNA_P Parameter: Treatment Value: 100uM ABA vs. No Treatment
  misc_feature: MA Experiment ID: 108668 Result: Down-regulated in Transcription
  misc_feature: MA Experiment 108668 PARAMETER Experiment Name: At_2mM_SA_cDNA_P Parameter: Plant Line Value: WS
  misc_feature: MA Experiment 108668 PARAMETER Experiment Name: At_2mM_SA_cDNA_P Parameter: Timepoint (hr) Value: 6
  misc_feature: MA Experiment 108668 PARAMETER Experiment Name: At_2mM_SA_cDNA_P Parameter: Treatment Value: 2mM SA vs. No Treatment
  misc_feature: MA Experiment ID: 20000069 Result: Up-regulated in Transcription
  misc_feature: MA Experiment 20000069 PARAMETER Experiment Name: At_100uM_ABA_Mutants_cDNA_P Parameter: Plant Line Value: CS23
  misc_feature: MA Experiment 20000069 PARAMETER Experiment Name: At_100uM_ABA_Mutants_cDNA_P Parameter: Timepoint (hr) Value: 6
  misc_feature: MA Experiment 20000069 PARAMETER Experiment Name: At_100uM_ABA_Mutants_cDNA_P Parameter: Tissue Value: Aerial
  misc_feature: MA Experiment 20000069 PARAMETER Experiment Name: At_100uM_ABA_Mutants_cDNA_P Parameter: Treatment Value: 100uM ABA vs. No Treatment
  misc_feature: MA Experiment ID: 20000071 Result: Up-regulated in Transcription
  misc_feature: MA Experiment 20000071 PARAMETER Experiment Name: At_100uM_ABA_Mutants_cDNA_P Parameter: Plant Line Value: CS8104
  misc_feature: MA Experiment 20000071 PARAMETER Experiment Name: At_100uM_ABA_Mutants_cDNA_P Parameter: Timepoint (hr) Value: 6
  misc_feature: MA Experiment 20000071 PARAMETER Experiment Name: At_100uM_ABA_Mutants_cDNA_P Parameter: Tissue Value: Aerial
  misc_feature: MA Experiment 20000071 PARAMETER Experiment Name: At_100uM_ABA_Mutants_cDNA_P Parameter: Treatment Value: 100uM ABA vs. No Treatment
  misc_feature: MA Experiment ID: 20000113 Result: Down-regulated in Transcription
  misc_feature: MA Experiment 20000113 PARAMETER Experiment Name: At_42deg_Heat_cDNA_P Parameter: Temperature (deg C) Value: 42 vs. 22
  misc_feature: MA Experiment 20000113 PARAMETER Experiment Name: At_42deg_Heat_cDNA_P Parameter: Timepoint (hr) Value: 8
  misc_feature: MA Experiment 20000113 PARAMETER Experiment Name: At_42deg_Heat_cDNA_P Parameter: Tissue Value: Aerial
  misc_feature: MA Experiment ID: 20000117 Result: Up-regulated in Transcription
  misc_feature: MA Experiment 20000117 PARAMETER Experiment Name: At_100uM_ABA_Mutants_cDNA_P Parameter: Plant Line Value: Columbia
  misc_feature: MA Experiment 20000117 PARAMETER Experiment Name: At_100uM_ABA_Mutants_cDNA_P Parameter: Timepoint (hr) Value: 6
  misc_feature: MA Experiment 20000117 PARAMETER Experiment Name: At_100uM_ABA_Mutants_cDNA_P Parameter: Tissue Value: Aerial
  misc_feature: MA Experiment 20000117 PARAMETER Experiment Name: At_100uM_ABA_Mutants_cDNA_P Parameter: Treatment Value: 100uM ABA vs. No Treatment
  misc_feature: MA Experiment ID: 20000169 Result: Up-regulated in Transcription
  misc_feature: MA Experiment 20000169 PARAMETER Experiment Name: At_100uM_ABA_P Parameter: Age (day) Value: 14
  misc_feature: MA Experiment 20000169 PARAMETER Experiment Name: At_100uM_ABA_P Parameter: Organism Value: A. thaliana
  misc_feature: MA Experiment 20000169 PARAMETER Experiment Name: At_100uM_ABA_P Parameter: Plant Line Value: WS
  misc_feature: MA Experiment 20000169 PARAMETER Experiment Name: At_100uM_ABA_P Parameter: Timepoint (hr) Value: 6
  misc_feature: MA Experiment 20000169 PARAMETER Experiment Name: At_100uM_ABA_P Parameter: Tissue Value: Aerial
  misc_feature: MA Experiment 20000169 PARAMETER Experiment Name: At_100uM_ABA_P Parameter: Treatment Value: 100uM ABA vs. No Treatment
  misc_feature: MA Experiment ID: 20000180 Result: Up-regulated in Transcription
  misc_feature: MA Experiment 20000180 PARAMETER Experiment Name: At_Germinating_Seeds_P Parameter: Age (hr) Value: 24 vs. 0
  misc_feature: MA Experiment 20000180 PARAMETER Experiment Name: At_Germinating_Seeds_P Parameter: Tissue Value: Germinating Seeds
  misc_feature: MA Experiment ID: 20000182 Result: Down-regulated in Transcription
  misc_feature: MA Experiment 20000182 PARAMETER Experiment Name: At_2mM_SA_P Parameter: Age (day) Value: 14
  misc_feature: MA Experiment 20000182 PARAMETER Experiment Name: At_2mM_SA_P Parameter: Organism Value: A. thaliana
  misc_feature: MA Experiment 20000182 PARAMETER Experiment Name: At_2mM_SA_P Parameter: Plant Line Value: WS
  misc_feature: MA Experiment 20000182 PARAMETER Experiment Name: At_2mM_SA_P Parameter: Timepoint (hr) Value: 6
  misc_feature: MA Experiment 20000182 PARAMETER Experiment Name: At_2mM_SA_P Parameter: Tissue Value: Aerial
  misc_feature: MA Experiment 20000182 PARAMETER Experiment Name: At_2mM_SA_P Parameter: Treatment Value: 2mM SA vs. No Treatment
  misc_feature: MA Experiment ID: 20000184 Result: Down-regulated in Transcription
  misc_feature: MA Experiment 20000184 PARAMETER Experiment Name: At_Shoots__P Parameter: Age (day) Value: 7
  misc_feature: MA Experiment 20000184 PARAMETER Experiment Name: At_Shoots__P Parameter: Tissue Value: Shoots vs. Whole Plant
  misc_feature: MA Experiment ID: 20000234 Result: Down-regulated in Transcription
  misc_feature: MA Experiment 20000234 PARAMETER Experiment Name: At_Siliques_P Parameter: Age (day) Value: 21
  misc_feature: MA Experiment 20000234 PARAMETER Experiment Name: At_Siliques_P Parameter: Organism Value: A. thaliana
  misc_feature: MA Experiment 20000234 PARAMETER Experiment Name: At_Siliques_P Parameter: Plant Line Value: WS
  misc_feature: MA Experiment 20000234 PARAMETER Experiment Name: At_Siliques_P Parameter: Tissue Value: Less Than 5mm Siliques vs. Whole Plant
  misc_feature: MA Experiment ID: 20000267 Result: Up-regulated in Transcription
  misc_feature: MA Experiment 20000267 PARAMETER Experiment Name: At_Drought_P Parameter: Age (day) Value: 7
  misc_feature: MA Experiment 20000267 PARAMETER Experiment Name: At_Drought_P Parameter: Organism Value: A. thaliana
  misc_feature: MA Experiment 20000267 PARAMETER Experiment Name: At_Drought_P Parameter: Plant Line Value: WS
  misc_feature: MA Experiment 20000267 PARAMETER Experiment Name: At_Drought_P Parameter: Timepoint (hr) Value: 6
  misc_feature: MA Experiment 20000267 PARAMETER Experiment Name: At_Drought_P Parameter: Tissue Value: Whole Plant
  misc_feature: MA Experiment 20000267 PARAMETER Experiment Name: At_Drought_P Parameter: Treatment Value: Drought vs. No Drought
  misc_feature: MA Experiment ID: 20000436 Result: Up-regulated in Transcription
  misc_feature: MA Experiment 20000436 PARAMETER Experiment Name: At_Drought_P Parameter: Age (day) Value: 7
  misc_feature: MA Experiment 20000436 PARAMETER Experiment Name: At_Drought_P Parameter: Organism Value: A. thaliana
  misc_feature: MA Experiment 20000436 PARAMETER Experiment Name: At_Drought_P Parameter: Plant Line Value: WS
  misc_feature: MA Experiment 20000436 PARAMETER Experiment Name: At_Drought_P Parameter: Timepoint (hr) Value: 12
  misc_feature: MA Experiment 20000436 PARAMETER Experiment Name: At_Drought_P Parameter: Tissue Value: Whole Plant
  misc_feature: MA Experiment 20000436 PARAMETER Experiment Name: At_Drought_P Parameter: Treatment Value: Drought vs. No Drought
  misc_feature: MA Experiment ID: 20000437 Result: Up-regulated in Transcription
  misc_feature: MA Experiment 20000437 PARAMETER Experiment Name: At_Drought_P Parameter: Age (day) Value: 8
  misc_feature: MA Experiment 20000437 PARAMETER Experiment Name: At_Drought_P Parameter: Organism Value: A. thaliana
  misc_feature: MA Experiment 20000437 PARAMETER Experiment Name: At_Drought_P Parameter: Plant Line Value: WS
  misc_feature: MA Experiment 20000437 PARAMETER Experiment Name: At_Drought_P Parameter: Timepoint (hr) Value: 24
  misc_feature: MA Experiment 20000437 PARAMETER Experiment Name: At_Drought_P Parameter: Tissue Value: Whole Plant
  misc_feature: MA Experiment 20000437 PARAMETER Experiment Name: At_Drought_P Parameter: Treatment Value: Drought vs. No Drought
  misc_feature: MA Experiment ID: 20000453 Result: Up-regulated in Transcription
  misc_feature: MA Experiment 20000453 PARAMETER Experiment Name: At_100uM_ABA_P Parameter: Age (day) Value: 15
  misc_feature: MA Experiment 20000453 PARAMETER Experiment Name: At_100uM_ABA_P Parameter: Organism Value: A. thaliana
  misc_feature: MA Experiment 20000453 PARAMETER Experiment Name: At_100uM_ABA_P Parameter: Plant Line Value: WS
  misc_feature: MA Experiment 20000453 PARAMETER Experiment Name: At_100uM_ABA_P Parameter: Timepoint (hr) Value: 24
  misc_feature: MA Experiment 20000453 PARAMETER Experiment Name: At_100uM_ABA_P Parameter: Tissue Value: Aerial
  misc_feature: MA Experiment 20000453 PARAMETER Experiment Name: At_100uM_ABA_P Parameter: Treatment Value: 100uM ABA vs. No Treatment
  misc_feature: MA Experiment ID: 20000573 Result: Down-regulated in Transcription
  misc_feature: MA Experiment 20000573 PARAMETER Experiment Name: At_100uM_ABA_Mutants__P Parameter: Organism Value: A. thaliana
  misc_feature: MA Experiment 20000573 PARAMETER Experiment Name: At_100uM_ABA_Mutants__P Parameter: Plant Line Value: CS22 vs. Ler wt
  misc_feature: MA Experiment 20000573 PARAMETER Experiment Name: At_100uM_ABA_Mutants__P Parameter: Timepoint (hr) Value: N/A
  misc_feature: MA Experiment 20000573 PARAMETER Experiment Name: At_100uM_ABA_Mutants__P Parameter: Tissue Value: Whole Plant
  misc_feature: MA Experiment 20000573 PARAMETER Experiment Name: At_100uM_ABA_Mutants__P Parameter: Treatment Value: None
  misc_feature: MA Experiment ID: 20000574 Result: Down-regulated in Transcription
  misc_feature: MA Experiment 20000574 PARAMETER Experiment Name: At_100uM_ABA_Mutants__P Parameter: Organism Value: A. thaliana
  misc_feature: MA Experiment 20000574 PARAMETER Experiment Name: At_100uM_ABA_Mutants__P Parameter: Plant Line Value: CS23 vs. Ler wt
  misc_feature: MA Experiment 20000574 PARAMETER Experiment Name: At_100uM_ABA_Mutants__P Parameter: Timepoint (hr) Value: N/A
  misc_feature: MA Experiment 20000574 PARAMETER Experiment Name: At_100uM_ABA_Mutants__P Parameter: Tissue Value: Whole Plant
  misc_feature: MA Experiment 20000574 PARAMETER Experiment Name: At_100uM_ABA_Mutants__P Parameter: Treatment Value: None
  misc_feature: MA Experiment ID: 20000575 Result: Up-regulated in Transcription
  misc_feature: MA Experiment 20000575 PARAMETER Experiment Name: At_100uM_ABA_Mutants__P Parameter: Organism Value: A. thaliana
  misc_feature: MA Experiment 20000575 PARAMETER Experiment Name: At_100uM_ABA_Mutants__P Parameter: Plant Line Value: CS22
  misc_feature: MA Experiment 20000575 PARAMETER Experiment Name: At_100uM_ABA_Mutants__P Parameter: Timepoint (hr) Value: 6
  misc_feature: MA Experiment 20000575 PARAMETER Experiment Name: At_100uM_ABA_Mutants__P Parameter: Tissue Value: Whole Plant
  misc_feature: MA Experiment 20000575 PARAMETER Experiment Name: At_100uM_ABA_Mutants__P Parameter: Treatment Value: 1uM ABA vs. No Treatment
  misc_feature: MA Experiment ID: 20000576 Result: Up-regulated in Transcription
  misc_feature: MA Experiment 20000576 PARAMETER Experiment Name: At_100uM_ABA_Mutants__P Parameter: Organism Value: A. thaliana
  misc_feature: MA Experiment 20000576 PARAMETER Experiment Name: At_100uM_ABA_Mutants__P Parameter: Plant Line Value: CS23
  misc_feature: MA Experiment 20000576 PARAMETER Experiment Name: At_100uM_ABA_Mutants__P Parameter: Timepoint (hr) Value: 6
  misc_feature: MA Experiment 20000576 PARAMETER Experiment Name: At_100uM_ABA_Mutants__P Parameter: Tissue Value: Whole Plant
  misc_feature: MA Experiment 20000576 PARAMETER Experiment Name: At_100uM_ABA_Mutants__P Parameter: Treatment Value: 1uM ABA vs. No Treatment
  misc_feature: MA Experiment ID: 20000794 Result: Up-regulated in Transcription
  misc_feature: MA Experiment 20000794 PARAMETER Experiment Name: At_Petals_P Parameter: Age (day) Value: 23-25 days
  misc_feature: MA Experiment 20000794 PARAMETER Experiment Name: At_Petals_P Parameter: Plant Line Value: WS
  misc_feature: MA Experiment 20000794 PARAMETER Experiment Name: At_Petals_P Parameter: Tissue Value: Petals vs. Whole plant
  misc_feature: MA Experiment ID: 20001451 Result: Up-regulated in Transcription
  misc_feature: MA Experiment 20001451 PARAMETER Experiment Name: At_Far-red-induction_P Parameter: Age (day) Value: 7
  misc_feature: MA Experiment 20001451 PARAMETER Experiment Name: At_Far-red-induction_P Parameter: Light Value: Far-red vs. White
  misc_feature: MA Experiment 20001451 PARAMETER Experiment Name: At_Far-red-induction_P Parameter: Organism Value: A. thaliana
  misc_feature: MA Experiment 20001451 PARAMETER Experiment Name: At_Far-red-induction_P Parameter: Plant Line Value: Columbia
  misc_feature: MA Experiment 20001451 PARAMETER Experiment Name: At_Far-red-induction_P Parameter: Timepoint (hr) Value: 24
  misc_feature: MA Experiment 20001451 PARAMETER Experiment Name: At_Far-red-induction_P Parameter: Tissue Value: Whole Plant
  misc_feature: MA Experiment ID: 20001554 Result: Up-regulated in Transcription
  misc_feature: MA Experiment 20001554 PARAMETER Experiment Name: At_Drought_Soil_Dry_P Parameter: Age (day) Value: 21
  misc_feature: MA Experiment 20001554 PARAMETER Experiment Name: At_Drought_Soil_Dry_P Parameter: Organism Value: A. thaliana
  misc_feature: MA Experiment 20001554 PARAMETER Experiment Name: At_Drought_Soil_Dry_P Parameter: Plant Line Value: WS
  misc_feature: MA Experiment 20001554 PARAMETER Experiment Name: At_Drought_Soil_Dry_P Parameter: Post Timepoint (hr) Value: None
  misc_feature: MA Experiment 20001554 PARAMETER Experiment Name: At_Drought_Soil_Dry_P Parameter: Post-Treatment Value: None
  misc_feature: MA Experiment 20001554 PARAMETER Experiment Name: At_Drought_Soil_Dry_P Parameter: Timepoint (day) Value: 7
  misc_feature: MA Experiment 20001554 PARAMETER Experiment Name: At_Drought_Soil_Dry_P Parameter: Treatment Value: Drought vs. No Drought
  misc_feature: MA Experiment ID: 20001555 Result: Up-regulated in Transcription
  misc_feature: MA Experiment 20001555 PARAMETER Experiment Name: At_Drought_Soil_Dry_P Parameter: Age (day) Value: 24
  misc_feature: MA Experiment 20001555 PARAMETER Experiment Name: At_Drought_Soil_Dry_P Parameter: Organism Value: A. thaliana
  misc_feature: MA Experiment 20001555 PARAMETER Experiment Name: At_Drought_Soil_Dry_P Parameter: Plant Line Value: WS
  misc_feature: MA Experiment 20001555 PARAMETER Experiment Name: At_Drought_Soil_Dry_P Parameter: Post Timepoint (hr) Value: None
  misc_feature: MA Experiment 20001555 PARAMETER Experiment Name: At_Drought_Soil_Dry_P Parameter: Post-Treatment Value: None
  misc_feature: MA Experiment 20001555 PARAMETER Experiment Name: At_Drought_Soil_Dry_P Parameter: Timepoint (day) Value: 10
  misc_feature: MA Experiment 20001555 PARAMETER Experiment Name: At_Drought_Soil_Dry_P Parameter: Treatment Value: Drought vs. No Drought
  misc_feature: MA Experiment ID: 20001560 Result: Down-regulated in Transcription
  misc_feature: MA Experiment 20001560 PARAMETER Experiment Name: At_Drought_Soil_Dry_P Parameter: Age (day) Value: 28
  misc_feature: MA Experiment 20001560 PARAMETER Experiment Name: At_Drought_Soil_Dry_P Parameter: Organism Value: A. thaliana
  misc_feature: MA Experiment 20001560 PARAMETER Experiment Name: At_Drought_Soil_Dry_P Parameter: Plant Line Value: WS
  misc_feature: MA Experiment 20001560 PARAMETER Experiment Name: At_Drought_Soil_Dry_P Parameter: Post Timepoint (hr) Value: None
  misc_feature: MA Experiment 20001560 PARAMETER Experiment Name: At_Drought_Soil_Dry_P Parameter: Post-Treatment Value: None
  misc_feature: MA Experiment 20001560 PARAMETER Experiment Name: At_Drought_Soil_Dry_P Parameter: Timepoint (day) Value: 14
  misc_feature: MA Experiment 20001560 PARAMETER Experiment Name: At_Drought_Soil_Dry_P Parameter: Treatment Value: Drought vs. No Drought
  misc_feature: MA Experiment ID: 20001757 Result: Down-regulated in Transcription
  misc_feature: MA Experiment 20001757 PARAMETER Experiment Name: At_50mM_NH4NO3_L-to-H_P Parameter: Timepoint (hr) Value: 6
  misc_feature: MA Experiment 20001757 PARAMETER Experiment Name: At_50mM_NH4NO3_L-to-H_P Parameter: Tissue Value: Leaf
  misc_feature: MA Experiment 20001757 PARAMETER Experiment Name: At_50mM_NH4NO3_L-to-H_P Parameter: Treatment Value: 50mM NH4NO3 vs 100mM Mannitol
  misc_feature: MA Experiment ID: 20001905 Result: Up-regulated in Transcription
  misc_feature: MA Experiment 20001905 PARAMETER Experiment Name: At_Drought_Reproduction_P Parameter: Age (day) Value: 40
  misc_feature: MA Experiment 20001905 PARAMETER Experiment Name: At_Drought_Reproduction_P Parameter: Organism Value: A. thaliana
  misc_feature: MA Experiment 20001905 PARAMETER Experiment Name: At_Drought_Reproduction_P Parameter: Plant Line Value: WS
  misc_feature: MA Experiment 20001905 PARAMETER Experiment Name: At_Drought_Reproduction_P Parameter: Timepoint (day) Value: 10
  misc_feature: MA Experiment 20001905 PARAMETER Experiment Name: At_Drought_Reproduction_P Parameter: Tissue Value: Rosettes
  misc_feature: MA Experiment 20001905 PARAMETER Experiment Name: At_Drought_Reproduction_P Parameter: Treatment Value: Drought vs. No Drought
  misc_feature: MA Experiment ID: 20001906 Result: Up-regulated in Transcription
  misc_feature: MA Experiment 20001906 PARAMETER Experiment Name: At_Drought_Reproduction_P Parameter: Age (day) Value: 35
  misc_feature: MA Experiment 20001906 PARAMETER Experiment Name: At_Drought_Reproduction_P Parameter: Organism Value: A. thaliana
  misc_feature: MA Experiment 20001906 PARAMETER Experiment Name: At_Drought_Reproduction_P Parameter: Plant Line Value: WS
  misc_feature: MA Experiment 20001906 PARAMETER Experiment Name: At_Drought_Reproduction_P Parameter: Timepoint (day) Value: 5
  misc_feature: MA Experiment 20001906 PARAMETER Experiment Name: At_Drought_Reproduction_P Parameter: Tissue Value: Siliques
  misc_feature: MA Experiment 20001906 PARAMETER Experiment Name: At_Drought_Reproduction_P Parameter: Treatment Value: Drought vs. No Drought
  misc_feature: MA Experiment ID: 20001908 Result: Up-regulated in Transcription
  misc_feature: MA Experiment 20001908 PARAMETER Experiment Name: At_Drought_Reproduction_P Parameter: Age (day) Value: 40
  misc_feature: MA Experiment 20001908 PARAMETER Experiment Name: At_Drought_Reproduction_P Parameter: Organism Value: A. thaliana
  misc_feature: MA Experiment 20001908 PARAMETER Experiment Name: At_Drought_Reproduction_P Parameter: Plant Line Value: WS
  misc_feature: MA Experiment 20001908 PARAMETER Experiment Name: At_Drought_Reproduction_P Parameter: Timepoint (day) Value: 10
  misc_feature: MA Experiment 20001908 PARAMETER Experiment Name: At_Drought_Reproduction_P Parameter: Tissue Value: Siliques
  misc_feature: MA Experiment 20001908 PARAMETER Experiment Name: At_Drought_Reproduction_P Parameter: Treatment Value: Drought vs. No Drought
  misc_feature: MA Experiment ID: 20001911 Result: Up-regulated in Transcription
  misc_feature: MA Experiment 20001911 PARAMETER Experiment Name: At_Drought_Reproduction_P Parameter: Age (day) Value: 40
  misc_feature: MA Experiment 20001911 PARAMETER Experiment Name: At_Drought_Reproduction_P Parameter: Organism Value: A. thaliana
  misc_feature: MA Experiment 20001911 PARAMETER Experiment Name: At_Drought_Reproduction_P Parameter: Plant Line Value: WS
  misc_feature: MA Experiment 20001911 PARAMETER Experiment Name: At_Drought_Reproduction_P Parameter: Timepoint (day) Value: 10
  misc_feature: MA Experiment 20001911 PARAMETER Experiment Name: At_Drought_Reproduction_P Parameter: Tissue Value: Flowers
  misc_feature: MA Experiment 20001911 PARAMETER Experiment Name: At_Drought_Reproduction_P Parameter: Treatment Value: Drought vs. No Drought
aacgagaaacagaacatcactaccaaacatctccagctcagtttcttcaaataaaaacagttaatctctctaaaacaattttttgttttctctctctcttaaataaccagagagttcagaatcattttgattctctttgtaatctttagttgttgtacctaacatcatggctgaagaggaaccgaagaaggtgacagagaccgtgtcggaaccaactccaacaccggaagttccggtggagaaacctgctgctgctgcagatgttgctcctcaggagaagcctgtggctccacctcccgttcttccatctccggcaccggcagaggagaagcaagaagactctaaggctattgttcccgtcgtccctaaagaagtagaggaagagaagaaagaaggatcagttaatcgagatgctgttctggctagagttgagacagagaagaggatgtcacttatcaaagcttgggaagaggctgagaaatgcaaagtggagaacaaagctgagaagaagctttcttcaattggatcatgggagaacaacaagaaagcagctgtggaagctgagctcaagaaaatggaggagcaattggagaagaagaaggcagagtatgtggagcagatgaagaacaaaatagctcaaattcacaaggaagcagaagagaagagagcgatgattgaagctaagcgtggagaagaaattctcaaagcagaggaattagcagccaagtaccgtgccactggaaccgctcccaaaaagcttttcggatgcatgtgatctctaatcatctcgatggggaaacaaatgaaatatggtatttgatgtaatgacgttctttagtttgcttaatgtgggtttaatatggcaacatagaaagttataaggtcaacatcttatattgattgggctgcgtttgttaatttgatttgtatttgtacatcttttcattgaaaggctttctcttagctttat

SEQ ID NO: 78165 - protein, 202 aa, Arabidopsis thaliana; identical to SEQ ID NO: 21120
  peptide (1)..(202): Ceres Seq. ID no. 12639529
  misc_feature (90)..(199): Pfam Name: Remorin, C-terminal region Pfam Description: Remorin, C-terminal region
  misc_feature (1)..(202): Homolog of NCBI NO: 15237822 NR Description: putative protein; protein id: At5g23750.1, by cDNA: 28686., supported by cDNA: gi_14423537 [Arabidopsis >gi|10176842|dbj|BAB10048.1| contains similarity to
  misc_feature (1)..(202): Homolog of NCBI NO: 21555669 NR Description: remorin [Arabidopsis thaliana]
  misc_feature (1)..(200): Homolog of NCBI NO: 34925093 NR Description: Remorin (pp34) >gi|7489271|pir||T07780 remorin -
  misc_feature (1)..(200): Homolog of NCBI NO: 4731573 NR Description: remorin 1 [Lycopersicon esculentum]
  misc_feature (36)..(200): Homolog of NCBI NO: 15229057 NR Description: remorin -like protein; protein id: At3g48940.1
  misc_feature (1)..(201): Homolog of NCBI NO: 15233068 NR Description: putative DNA-binding protein; protein id: supported by cDNA: 40796., supported by cDNA: gi_17104524
  misc_feature (28)..(202): Homolog of NCBI NO: 4883530 NR Description: remorin 2 [Lycopersicon esculentum]
  misc_feature (13)..(201): Homolog of NCBI NO: 15225899 NR Description: remorin; protein id: At2g45820.1, supported by gi_15028386, supported by cDNA: gi_19310658 [Arabidopsis
  misc_feature (13)..(201): Homolog of NCBI NO: 601843 NR Description: DNA-binding protein
  misc_feature (77)..(200): Homolog of NCBI NO: 22758339 NR Description: putative remorin protein [Oryza sativa (japonica

SEQ ID NO: 78166 - protein, 109 aa, Arabidopsis thaliana; identical to SEQ ID NO: 21121
  peptide (1)..(109): Ceres Seq. ID no. 12639530
  misc_feature (1)..(106): Pfam Name: Remorin, C-terminal region Pfam Description: Remorin, C-terminal region
  misc_feature (1)..(109): Homolog of NCBI NO: 15237822 NR Description: putative protein; protein id: At5g23750.1, by cDNA: 28686., supported by cDNA: gi_14423537 [Arabidopsis >gi|10176842|dbj|BAB10048.1| contains similarity to
  misc_feature (1)..(109): Homolog of NCBI NO: 21555669 NR Description: remorin [Arabidopsis thaliana]
  misc_feature (1)..(107): Homolog of NCBI NO: 34925093 NR Description: Remorin (pp34) >gi|7489271|pir||T07780 remorin -
  misc_feature (1)..(107): Homolog of NCBI NO: 4731573 NR Description: remorin 1 [Lycopersicon esculentum]
  misc_feature (1)..(107): Homolog of NCBI NO: 15229057 NR Description: remorin -like protein; protein id: At3g48940.1
  misc_feature (1)..(108): Homolog of NCBI NO: 15233068 NR Description: putative DNA-binding protein; protein id: supported by cDNA: 40796., supported by cDNA: gi_17104524
  misc_feature (1)..(109): Homolog of NCBI NO: 4883530 NR Description: remorin 2 [Lycopersicon esculentum]
  misc_feature (1)..(108): Homolog of NCBI NO: 15225899 NR Description: remorin; protein id: At2g45820.1, supported by gi_15028386, supported by cDNA: gi_19310658 [Arabidopsis
  misc_feature (1)..(108): Homolog of NCBI NO: 601843 NR Description: DNA-binding protein
  misc_feature (1)..(107): Homolog of NCBI NO: 22758339 NR Description: putative remorin protein [Oryza sativa (japonica

SEQ ID NO: 78167 - DNA, 542 bp, Arabidopsis thaliana
  misc_feature (1)..(542): Ceres Seq. ID no. 12639531
  misc_feature: MA Experiment ID: 108434 Result: Down-regulated in Transcription
  misc_feature: MA Experiment 108434 PARAMETER Experiment Name: At_Root_Tips_cDNA_P Parameter: Tissue Value: Root Tips
  misc_feature: MA Experiment ID: 108573 Result: Down-regulated in Transcription
  misc_feature: MA Experiment 108573 PARAMETER Experiment Name: At_Drought_cDNA_P Parameter: Timepoint (hr) Value: 6
  misc_feature: MA Experiment 108573 PARAMETER Experiment Name: At_Drought_cDNA_P Parameter: Tissue Value: Aerial
  misc_feature: MA Experiment 108573 PARAMETER Experiment Name: At_Drought_cDNA_P Parameter: Treatment Value: Drought vs. No Drought
  misc_feature: MA Experiment ID: 20000071 Result: Down-regulated in Transcription
  misc_feature: MA Experiment 20000071 PARAMETER Experiment Name: At_100uM_ABA_Mutants_cDNA_P Parameter: Plant Line Value: CS8104
  misc_feature: MA Experiment 20000071 PARAMETER Experiment Name: At_100uM_ABA_Mutants_cDNA_P Parameter: Timepoint (hr) Value: 6
  misc_feature: MA Experiment 20000071 PARAMETER Experiment Name: At_100uM_ABA_Mutants_cDNA_P Parameter: Tissue Value: Aerial
  misc_feature: MA Experiment 20000071 PARAMETER Experiment Name: At_100uM_ABA_Mutants_cDNA_P Parameter: Treatment Value: 100uM ABA vs. No Treatment
  misc_feature: MA Experiment ID: 20000072 Result: Down-regulated in Transcription
  misc_feature: MA Experiment 20000072 PARAMETER Experiment Name: At_100uM_ABA_Mutants_cDNA_P Parameter: Plant Line Value: CS8105
  misc_feature: MA Experiment 20000072 PARAMETER Experiment Name: At_100uM_ABA_Mutants_cDNA_P Parameter: Timepoint (hr) Value: 6
  misc_feature: MA Experiment 20000072 PARAMETER Experiment Name: At_100uM_ABA_Mutants_cDNA_P Parameter: Tissue Value: Aerial
  misc_feature: MA Experiment 20000072 PARAMETER Experiment Name: At_100uM_ABA_Mutants_cDNA_P Parameter: Treatment Value: 100uM ABA vs. No Treatment
  misc_feature: MA Experiment ID: 20000314 Result: Up-regulated in Transcription
  misc_feature: MA Experiment 20000314 PARAMETER Experiment Name: At_14day_Shoots-Roots_Sub_P Parameter: Age (day) Value: 14
  misc_feature: MA Experiment 20000314 PARAMETER Experiment Name: At_14day_Shoots-Roots_Sub_P Parameter: Organism Value: A. thaliana
  misc_feature: MA Experiment 20000314 PARAMETER Experiment Name: At_14day_Shoots-Roots_Sub_P Parameter: Plant Line Value: WS
  misc_feature: MA Experiment 20000314 PARAMETER Experiment Name: At_14day_Shoots-Roots_Sub_P Parameter: Tissue Value: Roots vs. Whole Plant
  misc_feature: MA Experiment ID: 20000315 Result: Down-regulated in Transcription
  misc_feature: MA Experiment 20000315 PARAMETER Experiment Name: At_14day_Shoots-Roots_Sub_P Parameter: Age (day) Value: 14
  misc_feature: MA Experiment 20000315 PARAMETER Experiment Name: At_14day_Shoots-Roots_Sub_P Parameter: Organism Value: A. thaliana
  misc_feature: MA Experiment 20000315 PARAMETER Experiment Name: At_14day_Shoots-Roots_Sub_P Parameter: Plant Line Value: WS
  misc_feature: MA Experiment 20000315 PARAMETER Experiment Name: At_14day_Shoots-Roots_Sub_P Parameter: Tissue Value: Shoots vs. Whole Plant
cccactaaattataatttttgctttataaaaaaaaatatcaaactctatattttctcgatctcttctcttcctcttatttctccaagatcccagacgaaatggctcagaaagtggtgctgaaggttttaaccatgactgatgataagacgaagcagaaagccatagaagctgcagctgatatcttcggagttgattccatagcagcggatatgaaggatcaaaaattgacggtgatcggtttgatggatgcggttgcggtggtgaagaagttgaagaaggttggtaaagtcgatttgatatcggttggaccggcaaaagaagagaagaaagaagagaagaaggaagagaagaaagaggaaaagaaagaggagaagaaggaagagcagaaagaagaagaacctaagaaataagtgactcgaattgctattaaaaccctaaatttttgtcatattgatttcacaattagaacgctgaatcattgaataatttaagatgtaaaattaattgttcaatacagattgtaataaaagcgaagtatttg

SEQ ID NO: 78168 - protein, 103 aa, Arabidopsis thaliana
  peptide (1)..(103): Ceres Seq. ID no. 12639532
  misc_feature (14)..(99): Pfam Name: 60s Acidic ribosomal protein Pfam Description: 60s Acidic ribosomal protein
  misc_feature (1)..(103): Homolog of NCBI NO: 18420713 NR Description: expressed protein; protein id: At5g23760.1,
  misc_feature (1)..(103): Homolog of NCBI NO: 26452654 NR Description: unknown protein [Arabidopsis thaliana]
  misc_feature (1)..(103): Homolog of NCBI NO: 21554550 NR Description: unknown [Arabidopsis thaliana]
  misc_feature (1)..(103): Homolog of NCBI NO: 37535864 NR Description: hypothetical protein [Oryza sativa (japonica group)] >gi|22758342|gb|AAN05546.1| hypothetical protein [Oryza
  misc_feature (38)..(103): Homolog of NCBI NO: 10176843 NR Description: gene_id:MRO11.20~unknown protein [Arabidopsis
  misc_feature (3)..(103): Homolog of NCBI NO: 13543783 NR Description: Unknown (protein for MGC:7642) [Mus musculus]
  misc_feature (3)..(103): Homolog of NCBI NO: 15223416 NR Description: expressed protein; protein id: At1g01490.1, by cDNA: gi_17380661 [Arabidopsis thaliana] hypothetical protein [Arabidopsis thaliana]
MAQKVVLKVLTMTDDKTKQKAIEAAADIFGVDSIAADMKDQKLTVIGLMDAVAVVKKLKKVGKVDLISVGPAKEEKKEEKKEEKKEEKKEEKKEEQKEEEPKK

SEQ ID NO: 78169 - protein, 92 aa, Arabidopsis thaliana
  peptide (1)..(92): Ceres Seq. ID no. 12639533
  misc_feature (3)..(88): Pfam Name: 60s Acidic ribosomal protein Pfam Description: 60s Acidic ribosomal protein
  misc_feature (1)..(92): Homolog of NCBI NO: 18420713 NR Description: expressed protein; protein id: At5g23760.1,
  misc_feature (1)..(92): Homolog of NCBI NO: 26452654 NR Description: unknown protein [Arabidopsis thaliana]
  misc_feature (1)..(92): Homolog of NCBI NO: 21554550 NR Description: unknown [Arabidopsis thaliana]
  misc_feature (1)..(92): Homolog of NCBI NO: 37535864 NR Description: hypothetical protein [Oryza sativa (japonica group)] >gi|22758342|gb|AAN05546.1| hypothetical protein [Oryza
  misc_feature (27)..(92): Homolog of NCBI NO: 10176843 NR Description: gene_id:MRO11.20~unknown protein [Arabidopsis
  misc_feature (1)..(92): Homolog of NCBI NO: 13543783 NR Description: Unknown (protein for MGC:7642) [Mus musculus]
  misc_feature (1)..(92): Homolog of NCBI NO: 15223416 NR Description: expressed protein; protein id: At1g01490.1, by cDNA: gi_17380661 [Arabidopsis thaliana] hypothetical protein [Arabidopsis thaliana]
MTDDKTKQKAIEAAADIFGVDSIAADMKDQKLTVIGLMDAVAVVKKLKKVGKVDLISVGPAKEEKKEEKKEEKKEEKKEEKKEEQKEEEPKK

SEQ ID NO: 78170 - protein, 66 aa, Arabidopsis thaliana
  peptide (1)..(66): Ceres Seq. ID no. 12639534
  misc_feature (1)..(62): Pfam Name: 60s Acidic ribosomal protein Pfam Description: 60s Acidic ribosomal protein
  misc_feature (1)..(66): Homolog of NCBI NO: 18420713 NR Description: expressed protein; protein id: At5g23760.1,
  misc_feature (1)..(66): Homolog of NCBI NO: 26452654 NR Description: unknown protein [Arabidopsis thaliana]
  misc_feature (1)..(66): Homolog of NCBI NO: 21554550 NR Description: unknown [Arabidopsis thaliana]
  misc_feature (1)..(66): Homolog of NCBI NO: 37535864 NR Description: hypothetical protein [Oryza sativa (japonica group)] >gi|22758342|gb|AAN05546.1| hypothetical protein [Oryza
  misc_feature (1)..(66): Homolog of NCBI NO: 10176843 NR Description: gene_id:MRO11.20~unknown protein [Arabidopsis
  misc_feature (1)..(66): Homolog of NCBI NO: 13543783 NR Description: Unknown (protein for MGC:7642) [Mus musculus]
  misc_feature (1)..(66): Homolog of NCBI NO: 15223416 NR Description: expressed protein; protein id: At1g01490.1, by cDNA: gi_17380661 [Arabidopsis thaliana] hypothetical protein [Arabidopsis thaliana]
MKDQKLTVIGLMDAVAVVKKLKKVGKVDLISVGPAKEEKKEEKKEEKKEEKKEEKKEEQKEEEPKK

SEQ ID NO: 78171 - DNA, 981 bp, Arabidopsis thaliana
  misc_feature (1)..(981): Ceres Seq. ID no. 12639573
  misc_feature: MA Experiment ID: 20000495 Result: Down-regulated in Transcription
  misc_feature: MA Experiment 20000495 PARAMETER Experiment Name: At_Guard_Cells_P Parameter: Harvest Date Value: 8/2/2002
  misc_feature: MA Experiment 20000495 PARAMETER Experiment Name: At_Guard_Cells_P Parameter: Organism Value: A. thaliana
  misc_feature: MA Experiment 20000495 PARAMETER Experiment Name: At_Guard_Cells_P Parameter: Tissue Value: Guard Cells vs. Leaves
  misc_feature: MA Experiment ID: 20000794 Result: Down-regulated in Transcription
  misc_feature: MA Experiment 20000794 PARAMETER Experiment Name: At_Petals_P Parameter: Age (day) Value: 23-25 days
  misc_feature: MA Experiment 20000794 PARAMETER Experiment Name: At_Petals_P Parameter: Plant Line Value: WS
  misc_feature: MA Experiment 20000794 PARAMETER Experiment Name: At_Petals_P Parameter: Tissue Value: Petals vs. Whole plant
  misc_feature: MA Experiment ID: 20001558 Result: Up-regulated in Transcription
  misc_feature: MA Experiment 20001558 PARAMETER Experiment Name: At_Drought_Soil_Dry_P Parameter: Age (day) Value: 27
  misc_feature: MA Experiment 20001558 PARAMETER Experiment Name: At_Drought_Soil_Dry_P Parameter: Organism Value: A. thaliana
  misc_feature: MA Experiment 20001558 PARAMETER Experiment Name: At_Drought_Soil_Dry_P Parameter: Plant Line Value: WS
  misc_feature: MA Experiment 20001558 PARAMETER Experiment Name: At_Drought_Soil_Dry_P Parameter: Post Timepoint (hr) Value: 6
  misc_feature: MA Experiment 20001558 PARAMETER Experiment Name: At_Drought_Soil_Dry_P Parameter: Post-Treatment Value: Re-Water vs. No Drought
  misc_feature: MA Experiment 20001558 PARAMETER Experiment Name: At_Drought_Soil_Dry_P Parameter: Timepoint (day) Value: 13
  misc_feature: MA Experiment 20001558 PARAMETER Experiment Name: At_Drought_Soil_Dry_P Parameter: Treatment Value: Drought vs. No Drought
  misc_feature: MA Experiment ID: 20001560 Result: Up-regulated in Transcription
  misc_feature: MA Experiment 20001560 PARAMETER Experiment Name: At_Drought_Soil_Dry_P Parameter: Age (day) Value: 28
  misc_feature: MA Experiment 20001560 PARAMETER Experiment Name: At_Drought_Soil_Dry_P Parameter: Organism Value: A. thaliana
  misc_feature: MA Experiment 20001560 PARAMETER Experiment Name: At_Drought_Soil_Dry_P Parameter: Plant Line Value: WS
  misc_feature: MA Experiment 20001560 PARAMETER Experiment Name: At_Drought_Soil_Dry_P Parameter: Post Timepoint (hr) Value: None
  misc_feature: MA Experiment 20001560 PARAMETER Experiment Name: At_Drought_Soil_Dry_P Parameter: Post-Treatment Value: None
  misc_feature: MA Experiment 20001560 PARAMETER Experiment Name: At_Drought_Soil_Dry_P Parameter: Timepoint (day) Value: 14
  misc_feature: MA Experiment 20001560 PARAMETER Experiment Name: At_Drought_Soil_Dry_P Parameter: Treatment Value: Drought vs. No Drought
atggcgtctctgagattgttctcaacgaatcatcaatctcttctccttccatcatctctctcacaaaagactctaatatcttcaccaagattcgtcaataaccctagcagacggagtccaatacgatccgttcttcaatttaatcgcaaaccggaactcgccggagaaacgccgcgtatcgtcgttatcacctccggaaaaggcggtgttggaaagacgacaaccaccgcaaatgtcggtctctctctcgctcgttacggtttctcagttgtcgccattgacgccgaccttggtctccgtaacctcgatctcctcctagggttagagaatcgagtcaattacacttgcgtcgaggttataaacggagattgtcgtctcgatcaagctctggtacgtgataagcgttggtcgaatttcgaattgctatgtatatctaaacctagatcgaaacttccgatgggatttggtggtaaagcattggaatggcttgtggatgcgttgaaaactagaccggaaggttcaccggatttcatcatcatcgattgtcctgcaggaatcgatgccggattcataaccgccattactccggcgaatgaagcagttctggtaacaactccggatataacagcgttaagggatgctgatagggttacgggtttgttagaatgcgatggaatcagagatataaagatgattgtgaacagagtgagaactgatatgattaaaggagaggatatgatgtcagtgttagatgtgcaggagatgttgggattgtcattgcttggtgtaattcctgaagattctgaggttattcgaagcacgaatcgagggtttccgcttgttctgaataagcctcctacgcttgcgggattggcgtttgagcaggcggcttggagactcgttgagcaagatagtatgaaggctgttatggtggaggaagaacctaagaaacgtggcttcttctctttctttggcggctaa

SEQ ID NO: 78172 - protein, 326 aa, Arabidopsis thaliana
  peptide (1)..(326): Ceres Seq. ID no. 12639574
  misc_feature (59)..(93): Pfam Name: 4Fe-4S iron sulfur cluster binding proteins, Pfam Description: 4Fe-4S iron sulfur cluster binding proteins,
  misc_feature (1)..(326): Homolog of NCBI NO: 15237874 NR Description: septum site-determining MinD (dbj|BAA90261.1); id: At5g24020.1, supported by cDNA: gi_6759276 [Arabidopsis
  misc_feature (90)..(326): Homolog of NCBI NO: 9971822 NR Description: minD [Tagetes erecta]
  misc_feature (1)..(93): Homolog of NCBI NO: 9971822 NR Description: minD [Tagetes erecta]
  misc_feature (28)..(326): Homolog of NCBI NO: 34897748 NR Description: Similar to Chlorella vulgaris C-27 chloroplast
  misc_feature (46)..(319): Homolog of NCBI NO: 11466429 NR Description: septum-site determining protein [Mesostigma
  misc_feature (59)..(304): Homolog of NCBI NO: 7524873 NR Description: septum site-determining protein [Chlorella
  misc_feature (59)..(301): Homolog of NCBI NO: 11467859 NR Description: septum-site determining protein [Nephroselmis
  misc_feature (58)..(304): Homolog of NCBI NO: 5748667 NR Description: cell division inhibitor MinD [Prototheca
  misc_feature (59)..(325): Homolog of NCBI NO: 23452400 NR Description: cell division inhibitor MinD [Chlamydomonas
  misc_feature (59)..(304): Homolog of NCBI NO: 11467635 NR Description: septum-site determining protein [Guillardia theta]
MASLRLFSTNHQSLLLPSSLSQKTLISSPRFVNNPSRRSPIRSVLQFNRKPELAGETPRIVVITSGKGGVGKTTTTANVGLSLARYGFSVVAIDADLGLRNLDLLLGLENRVNYTCVEVINGDCRLDQALVRDKRWSNFELLCISKPRSKLPMGFGGKALEWLVDALKTRPEGSPDFIIIDCPAGIDAGFITAITPANEAVLVTTPDITALRDADRVTGLLECDGIRDIKMIVNRVRTDMIKGEDMMSVLDVQEMLGLSLLGVIPEDSEVIRSTNRGFPLVLNKPPTLAGLAFEQAAWRLVEQDSMKAVMVEEEPKKRGFFSFFGG

SEQ ID NO: 78173 - protein, 174 aa, Arabidopsis thaliana; identical to SEQ ID NO: 25910
  peptide (1)..(174): Ceres Seq. ID no. 12639575
  misc_feature (1)..(174): Homolog of NCBI NO: 15237874 NR Description: septum site-determining MinD (dbj|BAA90261.1); id: At5g24020.1, supported by cDNA: gi_6759276 [Arabidopsis
  misc_feature (1)..(174): Homolog of NCBI NO: 9971822 NR Description: minD [Tagetes erecta]
  misc_feature (1)..(174): Homolog of NCBI NO: 34897748 NR Description: Similar to Chlorella vulgaris C-27 chloroplast
  misc_feature (1)..(167): Homolog of NCBI NO: 11466429 NR Description: septum-site determining protein [Mesostigma
  misc_feature (1)..(152): Homolog of NCBI NO: 7524873 NR Description: septum site-determining protein [Chlorella
  misc_feature (1)..(149): Homolog of NCBI NO: 11467859 NR Description: septum-site determining protein [Nephroselmis
  misc_feature (1)..(152): Homolog of NCBI NO: 5748667 NR Description: cell division inhibitor MinD [Prototheca
  misc_feature (1)..(173): Homolog of NCBI NO: 23452400 NR Description: cell division inhibitor MinD [Chlamydomonas
  misc_feature (1)..(152): Homolog of NCBI NO: 11467635 NR Description: septum-site determining protein [Guillardia theta]
  misc_feature (1)..(170): Homolog of NCBI NO: 22299560 NR Description: septum site-determining protein
